United States Patent Application Publication US 2014/0057251 A1 - sequence listing, part 6

SEQ ID NO: 10246 - DNA, 662 bp, Cannabis sativa
agtatcttctcttgtttatttattccatgttcttcttcttcttgaataaaaattgtacacgatcaaagccagtttaccgctgttggtacaaatcacgttctattctcagtcttattcttacccttgttaatttgaggatcgaaaggacttttttttccctttcttttcttagcttgatcaaaatttcctagttgagtgattatgttcttccaagctcagctcagcagaaaattacaaaataaatacataaaaacataatgggcaggcaaagaaaacgctagcattcattatctcttgactcaaaaaccttacactggtcacaaatatggggaaaatagctacacttgaaaggtatattgtatggttgaaatacaactttaagctagataaggataaatttagtgacatgatctcaaattctaaaaagaacctttagaaactctttttaagtgtcacctaagttggagaaacatgaactagcatctaaaaagtgttttgagaaagagaagactttgtctcaatttcctcatcaacatttgtcttggtccttcaggagacagcagaagaaactcctattcaaaagtcggttcagcaaaacgaagtagtttaaatgaagttaaactgattttattagttctatgcggagctcccaaggagtcaca

SEQ ID NO: 10247 - DNA, 1292 bp, Cannabis sativa
ctaaaaaaatccccaaaactatatttcagacactacaatcggacccccatcagacccgtcagacacccatcagactcgacctaaataaaccaaaaaaaaacaaaatttatggggtaccatcggacccctatcgggccctatcagatcccatcgggccttcacccctattagctattttaacaaggcatcgggccccccatcggaccagcattggaccacatcgcgctagacgaaaaaaaatactgaaaccaggaaaattgcagtattcacaagcaacaaacattttaacacaaaaaatagcaaaataatagacaattcacagatcaagcatcaaaacaatattctaaactaaatataacaacaacaaacaagattacacaaacaaaaaaaaattaccctttgcttgcatatgtgtgctccgtgtatgatgctccctccaaattttaaagaaaataggtagaataacttatagtgtagtagattatagtgtaataaagttaagaaaatgagtggagaatgagtgaaaaaaattagccctcttagtggggagctcggtagtaaagagaagaagagaaaggagggggtaatataaatgggggtattttagggatattctaaaatatgtcatatcccacaaatattaagtgttgtcatgtgtttaggggaaaaatattaggtatatgtaagtagagaaaatcaaatttccgttcaatttttttgaatagtttatagtatcaaaaatacggttaaaataattgcttatcatgtttataagaaaaaactatagtgacgcatacaataaaatatttagaacttattttttgacactataattttgaaaatttataagtaatcctaattataactacaatgtagacgattataaaaaaaaagaaaaatagattaattttttttcttatatattgtaatagattgaggttgaaccaaaacacttattttgaggtgtgtactataaaattttctaatatataaaactgcacttaaaaacttaaatatatattatgttaattttataattatacactaaatcagcaaaagaaaaacattctcatatttttataacaattaagcttttataaaattaaataaatttaataagagtaattataattacggaaaaatctataatatatgtcccaaatagttattttagtttgtcttttattgttttgacatccaagatagtcatttataaccgtgtacaatgtttttatttgaaattacatctaaattttttataaaattttgaaatgattacaatgccgaaagta

SEQ ID NO: 10248 - DNA, 721 bp, Cannabis sativa
tactcaagctcttgttaatgtgcaagctaatctcgcaaatctgaacatgaacaatagatcttgaggcgcttctggtaactccaatagaggctatcatggtccctaccgtggtggaagaaactcataagaggcaacaggccgacctgtcaattgtgtggaagagttggctacacaagtgtaaaatgctaccacatattcgatatcacattcaatggaaatcataccaacaattatgccaacacctccacctcccacaatccactataagctctataatctgaaaccatcaacacctcaacatctgatgttgcaggatcttagtacattgacagtggagcaagttaccacataactccagatttagacactataaaccgtcctgcagattacaaaggaaaagcaaaagtagttgttggtaatgataactctcctcccattcttcacataggctcaaatgtttttcattcaaaatctaattccaaacctcttattttacaaaatattcttcatgttcccaatgtcaataagaatcttcttagtatctctcaattcaccaaagataagaatgtcacccttgaatgtgatgatgtttcttgtcttataaaggacaagagcactaagcaagcacttctttggggtgaagtttgtgatggcctttacaaacttcaactccctcaagccaaatctcaagccactgtcaagtcagcctccaagaatcaaa

SEQ ID NO: 10249 - DNA, 538 bp, Cannabis sativa
catcgaccacaacagtgtatgacagacgaaatcaaaataacttaattataagtgaatttttattaagtaacttgatttaatttttaatatttcattaaattattttttaattctcatacaacggtaatcgtaggatgtatacaataaagcataatgagtataaaatgttacaacttctatttgataatatacatgatgacaatatgaagtaatttaaggagcgataaagtgtagatttattctaccaaaacataggatgaacttttatctttatatatttatataatgggacaatgtaacttagtttttttagttgtttgattatgtttttagcaatttaatttgattacttttttaagaagtatcgggccaccatcgagatgattatcgtcctatatcagacacgaacacaacccataagaaataatggtccttaaccactacactgacaaattatcgagccaccatcaggatgaccatcgtcctatatcgaagaaaaatccacccatagaattaatggtgcctaaccactaaaatg

SEQ ID NO: 10250 - DNA, 1441 bp, Cannabis sativa
  modified_base (665)..(699): a, c, t, g, unknown or other
  modified_base (744)..(744): a, c, t, g, unknown or other
tttgttcatagaaccaaactaattaaatgctcaaaccaacctacttaacttaacaattgagtaatttagttcgaaaccacaatttatcctttgtaaatgttttaatttttatttttactaaattcttttactttaaaaaacttataataggtaaataacaatagaaaaatatattattaaaacaatattaaaataattataaatattatgtctaaatttgttcctaaatattaatattcaataaaaaaattatattaagtatataaaaaattaggcaatttagtttggtttgaacagtggacgagaatttttaaatcgtgaccaactaaaaaactataaatgttctagattgaccaaattattaacgccatatatatttggtcttgtctcaaattgtttgatctaaattggttggagtttaaaatcacgaattgtggattgtatgaacaatcctaatactaacctaaatttattttggcatttaatagaattttttagtctaatttagttgtgttgtgcaaatttctgaattttttttgagaaattctaaaaaatttaacacagttcaaataatttgtagcatgtgtaacactttaattttaggctaaatactattttggaccttgtgttttacaaaaattatcaattagaccctctattttgtnnnnnnnnnnnnnnnnnnnnnnnnnnnnnnnnnnngtacaaataggaccctgaactatttttttgtcaaaataaaacttnataataatttgatctagagatattttggtaaaactggttacattttttgtatctgttcgtgttataaattgtctcaaagttggttttattaaaaaataaaattatcaaaaattgagttcaggatcctatttttactattttaaaaaatacagggtcaattttgtcatgctaaaaatcatgctaaatttaatataaaatatagaattgtatcaaatttaaactacaataaataattaaatattatttttttattacactaattattataatttataaacttttatgacatttgttaattacatattatcattatttaaaaaatatattctttataaaatatcatatgattcaatataattaattatttatttttacttattttacatcttatgcattagagcataattgtaaatagtagattaaatataacataatttttttttgcatcaaagttatttaaaacttgaagatgaactaatatgtattgattaaagcaatcactactacagtatagaaagtttctaatatgctttgtttaatgtagtgaaaatttctcacaaatttattaccaaatccacaagtcattaaaattacatgaaatatcatatactagtttacttataaaacttcttttaatccatcccacatttttaacaagtcactaaaacttagatacatttttatttaaatataaaac

SEQ ID NO: 10251 - DNA, 573 bp, Cannabis sativa
aaacagaaatcaaaactattttttttttctcgttcttaattaaaaaaaaataaacaagaaagtttttagtttcttttaataaaattataattgagtgtacaggtttaacaacaacttttattattgtgttttttaaatagtaaataaaataaaatgtaaatgttcttaaggtgttaaacaatctagaaattagcggttcattatttaatttgtttttctaattttaatccaaatcgtatctccgacgagagagatgtcatgattcgattgcaagctattattttatctaattgctattaataaaatttcataatttaaaaaaaaaaaatagaatataattttgtcttgtcgtatcatgtttaattccatattcttcatgtcgtataataacatatccaaacttatatttttaatttttttttcatgtcgggtaatgctcttgccccccaaactcctatggttttgtacgtgacttgtaaaaaaagaaaaacagcccgtctttactttataatattatggggcaatcctttcttgctcaacatctgctgcattattcctaaataagtttttttt

SEQ ID NO: 10252 - DNA, 1409 bp, Cannabis sativa
gtattctaaataataaatattatactgattgtatttttatgtatgccttgtttgtttgcttcatcgaaagttgttaagtctcttgtttggtttctttttctgaatgattagatcaaaatcaactgtgatgtgaatgttgttagtgattttatgtgtgtagtgactctagttagggatcacacagcatctgttttgtgggtagctacaaacatgctctatttctttgatcctcttattagagaagttctgacttgtctgttagttgaggagatagccgttttgttgaaatatacttttgtgattattgagagtgactctgaaacagttatcaagacgctgaaggaagcctgttccagttggggtattggtaactatgtgcatcaatgaaaacatctttctaatattttgttaagctgttatttttcgtttattttcagaatttgtaattttgcggctcataatatcgctaaatgggctttcaccaaaactgttactggcatgattgaattgacttctataccagacaacatgttttataataactgcgaggtctaactcttattttattaattttaatttataaacgtgtatatttcaaaaaaaaaaaaaaaattctaacctttatatttcatttctcctcttataaaaaaataaaaataaaaataaaaaataaaaaataaaaacctttctatttctccaattagatttagctaatttttaatatatgtatttatcactaaattattatgactaaagcatataatgtgtcatgattgaatttttctttttgataatttgtaatttaatgatcattgaaaggttaataacctatactaactattgggcatatatattatatgctaacaaatgactaccataaataatttatttacaattagtatagaataatataaaaaaaacaaaataatcatgttaattctacaacactttgccaaaaaaatgatataataatctacaatagttaatattaaattatattgattttacaaaattataccgtataacaaaattatataataaatataataattaaaatattatttttgactcaaaaatttgttaacattaatgaattttttgacaattaattaacaccgtggtatcgaatgaaacttaataatattagatgcaaacaaaaaaattttaatatgactttgtagttaaaattctacatactccacgaattatcattatttttttttcctgagtttttatttacaggatataagattgaacaaaattctctaagagataaaaaaattgatgtcccctctataatgaattctatcactatatatagggattcgatatgacaattattatttttgtaatcttatctacatgacggtttttcttatgaaacctgagcatttttcatgtttctcgta

SEQ ID NO: 10253 - DNA, 624 bp, Cannabis sativa
gggtctaggtccaggttcggggtctgaatcggtgttcgagtctgtggttcgtggttcgggtctgatctgagttccaggtctgaagtccgcgctcgggttcggtcgaagttcgattctgtttctgagttcgggtccggtctaagtctagggttcaggtccgtggtctcgggtccaagtccgtggtccgacgtccggtcccaaattcggttcaggtcggagtccctaatctaggtctggggtctgagtttgggtcaatgtcttcgtttaggtcctagtccgggtctgggtcccgtgtccaagtccaagttcagagttcagggtcaaagtttggatctggggttgattctaaatcatttctaaatataataatataagttaatagtaactattaaatagtataatttatattgtgttattctaataataatacaatagtttattatttagtaatttttggtcagattgataaatatcaccccctaaaaaaattgattggacatttccaaaaaaaaaaaaaaactaaaaaacttgattggagcatcttttatcatatctctcttattacagaaaacagagagagagagtaaggagaagatgaaaatgaagctttgttccataaacatg

SEQ ID NO: 10254 - DNA, 553 bp, Cannabis sativa
aatccaaccaaaatacatatgttcaagattcggttaatgtgtaataatataatgttttttttttctatgctctccttgtgatcatttgcaggtaaaagtgcctcagagacacgctcttcttggactgctatttgggtcattttaataggcttgagtatggctggttttggggcatatctagtgtacaaatacagattaagggtaagcttattgtgctgtgtacacgtagcaacattgaaattcatatatggtttgtgtactttgttctactactgttcttatatactgtttgcaactcttacaaagatgtctacaacatgtgctaatgttgtacataaatcattaaatgaagaaaaatgattctgtcccgaagttgttgaatctggaggacgaagacttgcttatattagattatctttccccgtcaaaatgattttttactatctgcaaaaatttgaatgtggtcaatgctcaagcaggttaattaggactgaaatgatatttgcatgcctactagcagaaatgtatgaagtttaattccttataagcccaa

SEQ ID NO: 10255 - DNA, 540 bp, Cannabis sativa
aagaagaaaaagaagaaggtgagattgcctccaaggctcctgtaaagtaggcataatttttttgttgttttttggccttcaaactgagataattattctttatttattccaagtctttaattatatgtatgatggcttttgtctgattggatggccaatcaggttatagtttaatcttatattccttcctcccttttcttgagaagaattggttgagcttagtcttttaaaaaagctttcatattcattattttttccaagtcacacaacttagtttttaaatgatttatgaacaatagctcattttattgactttctcacttattattacaagttatttcctcaagtaataaataaacttgaacatcttatataaccaattcaaggctattttgatgttacaaatcataagcacgaacaattatttctttgatcacacttagctttggcgtactatttttaaaaatcaatttcgatgctttcatttatagtacttgcaaaaatattttgcaagcagttagtttttctactcgcattagt

SEQ ID NO: 10256 - DNA, 820 bp, Cannabis sativa
tgtagcattagctggattctgcccaacatgtccaggttcattcccgcctctaccaccactggcgaaggagccaccagttccacctgtgttatccgacttcgacactgcaccagttctcaaccattgcgtccctatagaatgatgtcttcttcttggggccgccttcatgaacaaaccgaaaggcttctcaatacgatccattggaacgtcaaagaggcgtgcacaaaatcgttccgaatgtccaaggattctacaaatgaagcagaacgccgggaggtcttcgtatttaaacaccgcatagcagaattccccccctgtttttccagtcgcattttcttcttcaggggcagagcaacattaaccttaactcaaacccgcaaatactccctccaaactccagtaaaattcctagggttcgattcaatgaacgtcccaatgtaatttccaacgtctctagcaacccgtgcagacataaaaccagaagtcatttcatgtaattgaacccataagtccaaacgattaaacgagacaagcctaggattttcccctggatttaacctttcaaagaccaagggcacccggtgaaaggtccagaggctcccttcaatgaccctatcaatatcaatatcatggcaaaactggaacagaaaatgattcggatccaattctttcacatacataccttttccaggttgccatagagatgccatcttatgttgcgtggctggaaaatcaatggacatattggtaagaaaccgacaaactaagcaccatctatcgtcgatttcaaaaagatcatcaacatcatcatcatagcgca

SEQ ID NO: 10257 - DNA, 743 bp, Cannabis sativa
acctcataataatcaaccctactcatcagtgtacaatttcactttgtacttgattaacttaatcttatatatattattaattaattccattaattaatgcttcatgccactatacaaatatttatatgtggtagttgatgaaattctattgagacttggagtattgttcttcaaaatattttataatagttattaaattaaaatatatgagattatatatttaatttattattgcagtatgatatttagcaataaaatgcttgtaaattttaactttactaaaataatatattgtaataattagtgatttatataataataattaatgaaaatattagaaacttaatacatatttaattataacatgtaatattatgcatattttatggtaaagaaatgttagaagatactaagaatatatattgcattcttatatatatatattaataacgttatagatgaaattaattatcatatttcataaaatttaataaaataatttttaaaaaatattactaattaattgtaaaataacacgtctaaaatattgtagacactaatgatggtaatactcaaaacctgcaatagtgcatttctaacatttatatatatatatataatataaatgcacaatactcaaagaataaagtctatcactactaaataaaaattacatttaatcataatatcttaattaactataacataaattttcataattaatttttagttataataaaaaa

SEQ ID NO: 10258 - DNA, 586 bp, Cannabis sativa
tgtctttatcttaaaatagtagtgtctaatatttttttatgtgtttcaatattgttattagtctaattaaattttgagtctcatatagtttaatataataacttttaggcatcattaaccaatcacaacacgatacgtttagaaaatactaagtactattggtgcccaaatacttaataaaaatactcttgtctttatcatatttattaacgcttttatatattgtattaagattataataatatgaaaaattaaagacagtgaggaagaatctcataaatcaaattatgattttttttttttttggtttttaaataataataataataacactttaaaaaagaaaagtatatattatcactgaactaattatgtgttaagaaagtcaagtgccaccttatagtccattacctataaaatgtttctctaaatatttcttgaacaagtgaataattattagtagttggtgtgcctaattagaaattattcttttatcataattatcataaattaatccgtattatatataagtaagtgattatcgatttctttctttcaattttggtttggcttgttaacaattaca

SEQ ID NO: 10259 - DNA, 836 bp, Cannabis sativa
aacaaaataagatgatggctaggataccaaagcaagcaaaaatgtagttagaaaatgctagatctacaattgcgaaaacattaggcgtttttaaaatatattgtaattcaatggtgattattcaattttgtaatatcttcacaaaataccaaaacatcttatcattctctaagaaaattaaaggagcaaaaacatatcacacctatgcatataaaaatgaatttgctttctaatgatcaattaaaatgaaaagaatatatagatttagtaatcacaacttactaaatttttaattggaaacttaaatcccatgttaaacttaaaccaagtaagatgaaaagatacatgcatattgttcccatgccccatttcttaatccaacaagggaggcatattagattgcagaacacattgctgatgagtctctctcattaagtgggttataaactgaaccagtaccagttggctgcaattgaccctttcttgcaggctgttgcatattgtacaaagtgcccataaattgttgcattgaatgtccatgttggttcttttgttgctattgatgctgagttccttgcataatttattagtccatattgagataagccattattctgctgagaaactcaatgagccaccggaattagaaccaacttttgtgtaggaggagctgttgaatacaaagggtgtatctacatattttggtaaaagattttttctatattattatatattaaaaattgttggcacccttattgtgattgaaaacattgatttttacagatcataaacaaagtttaggccttttttttataattataggccaaaggaaatga

SEQ ID NO: 10260 - DNA, 1085 bp, Cannabis sativa
gagctacgtgattataggaggtcggttcctcttcaaaaggtttttcaccgtatttggagaagcctgaatgagtcacgtgtgggtgctctctcaatgccaactggatatttaaatttaaatttgttgtggcagtcggttgaaaaagatgtgacttttgatttgggccaagacttaatgggccgaccacttagggataaagtgggtcaaatagatgctggatatacaagctttaatgagatggaatgggactgcctgggcctaaagaatagtagcaaaatgggtttgaaagtttatatgcaccaagggccctacacgctgagattgattaatcatgaacttcagagaagcaggccgattagagtcggcaagaaggagtcattatctattgtcagcaagaagaacccaacctagatcatctctgaatattttgatggcttcctcaagtctgtcaagccaaaaaacaagacaaaaattcagaagtgcaattattcaattctgggaagaattcgacccgagagaaagaaattattcaaaggcagtgttgaaagaatcggacaaatcccagtggaggacgaactagtaagcaaacgcaatgtcgtaacgtactttagaaaaaggaagtctacatccaaacacagtagagaagaaacaatgattttagatcgaatgaatggacaacattgaagaagtgacactggttaacaacgatcccatgacaaatgacattcttgatttttcctcagagagcgataactcagaagaagatgatgatccgggattagtagaagatgaaggagaagagcaagaggaaattatgaaggatatcaaggctttttggaatgatagttaaaagtctaaagagtgcccagtgagttatgaattgtgtatggaagtaggtgatgtggtggtagaagcttctgcaaagggcgagataggggctgttcaagaaaacaatttggtgagagccttggaggaattgggtctgaacttgataatgaatgagggtgaagaaaaataaacagcacaacaatcaaaggctcggaggaggagcaacagagaactcaaaaatctggcctttaacattg

SEQ ID NO: 10261 - DNA, 753 bp, Cannabis sativa
tcttttccaaacgcccatcttttatagcctcaatcggcccactagtgaaagccccagagcccaaatccatacccacattaacatcatttaacaacttcaaagggcccacgtcagcatcctttttttccaagagcccactttctaaaacctcatttggcccaccagtaaaagccccaaagcccataacattactaacggttgcatcgtttaaaaaattcaaagcctttgacccttcaattgatcggtcaccatcttccatcatcaaacaaggaaagtgaacagtagccttttccttgcgcaggttctctgtgacaccgcctaaccccaaaatgggcaaacttttctcagagccagcaggaaagctcttgggatgccactccatgcgcagaggcttttcgaggttgccagcagcacgtgatgtcgccatcaccggacgccttggacgacgactaaggttatctcgtttgcccttcggatcttccaccccctcagccaccgtcgctggtaacagaggagtgcgcccatgacttttaatagtatacttaattaagtcatttacatgcttaacagtataagaactatgctaaaaaaacacataaaattctattaatctagatgaaatagacaatcgtgccataacaaccatcaaaacctattgttgtaagctagaaccaagttgcccaatccaattcttccaatctgaaaagacaattggccaggtggtgaaaccaagccacttatgaaccttgcaca

SEQ ID NO: 10262 - DNA, 892 bp, Cannabis sativa
tattgacaatgtagttcgtattagtagttaggtagtttcttcttcagtctttttaccttttttttttataagaaactaaatatacctatttatataatgctgaaactaatgaaaaaaaaaatgtatgtaatatgtatatgttataaatttattcttatttaatattgtcaatcaattataattttgtagacttttttttaattgagataaattgttaattgtaatttagttaattattgtttattaatacatttacttattgtaaaagtatcattgcataaatcaaaaaattaatttcaaatgagcattgggcgattggcgactgtaaattttctcaatttgaagttttaaactttaaagtcagaattagcagcaaatatcaggttctttcgtcactttttgatcttccaaattaatagttattactatttgattgttctttgaaatattatattagttattgttgttgttttttttttattatgtctcttaaaattagaaaatatgagtttaggtataaaaagaagaagaaaaattaaggaattaactcaatctcaaggagaagctcttgataaatttactataaaagaaccaccacaagttttgtttataaatcataatcataatgttgttgatgttgaaatttatgaaaacatgctacctattattgagaatcatattgaaaatgatgatatgaaaaatagaggtgacatgtctattgaaaatgatagtgtggaaaatagaaatgatgtgcctattgaaaatgatattatagaaaattaaaattttgattataaaaattgtgatgatgattatttgaataattcaatcgaaattttagaggataataataataacaatgcagaaaaaacaaattcatttaaaaatttac

SEQ ID NO: 10263 - DNA, 908 bp, Cannabis sativa
caagaactaccaaccaagaccttttgcatatctacttcatggtagaactcaaacaaaaacaaattaggctcaagttctttcacatacatgccttttccatgctgccataagaggaccatcatattctaaaatgcatcaaagtctgaaactctgcatgtaaaaagttttcgaaccagaaaccatcaagtatcaatagcgacttcctccttttctaccccttctatcgatatacccacctcatcctcctcttccaacgatatctcaacccatctaccttcaatatcactaactgttgaactactagatgccatagccaaaggaaaaacggatacacaaaccaaaccacactctaactagacgaaaaatccctaacatgtcaaatttaatataaagaagagaaatttgcggctaaaatattaaatgtatatttatgctaaatctccctttttttaggtaaataatcaaatggtataagaaaatgaataatttttttagtaattttataataaaataaattgataatagtatttaatcgtaagtaagtaaggtcaatatttaggtggtctcattcttgtacaagaatcagagactagatagtggaattctgtcaaattcatttagagtttgaatataagagacatgaaagatgatgatgtgtttttatatgtttctatcatagttgatattatatggagagcaaagaatgacaaggtacataattgacattatatgtatagtatacattattatattgattctattgctcattattatacaaattatggtcactcccttttgcctcaattacaattttctcctagtgtcactgagtgggctcctctgctcatggattggatcaaacttaattgtaatgtagcggttagggaaggggttatgatgtttgcagt

SEQ ID NO: 10264 - DNA, 1308 bp, Cannabis sativa
aactagactacaacggattgttgactctagaggttaaataaaattatagtaataaataaccaccaattattgtcgtttgtaatgtgtgtaaaccaaattattgtcgtttttcaagtgtattattgtcgtttactaattgatgtcgtttttgaagtgtgtaaacccaaatattgtcgtttactaattgatgtcgtttttaatgtgtgtaaacacaaatattgtcgttttgaaagaatagctgaaaaaacatattccgttgccgggacttgaacccgggtctctcgggtgagagccgagtatcctgaccaactagactacaacggattgttgaactttgattatcaaaattatttattacttcaattaattagcatatagcattaaacgtctaccatttagtgtcgtttaccaagtgatgtcgtttttaaagtgtgtaatccaaacattgtcgtttttaacgaaaataagggaaaattgcgttaattaattcttaataacaaaactttatgacccattcctaacaatttcattttctaactttctttatagtttcttctttgggaaaattgcaacaaaagtctttaaaaatttactttgatttagataagtctccaactttaaaaaaaggacaataatccccaagtttgaattttgtaagtccgttggccatctttttagcagattcgttaattcctctctaaaatgtcacgtgttgatattaaattgcgacacaagtccctaaaaaaatccttttgagacagataagtcctcaatcttaaaaaatcgtgacaacaaccccaggttcaaaattttcgattgtccgtaggtacctaatttaactactccattgacgttgttctaaaaaaatgacacttgtaaattttatattagtccaaattataattttaatcaaaattaatttaaactaagcaaacaaaaataaaatattttaaaaattaattaattaacttttctttttatcttttctatttttttttatctttattcttcttctacttcactctcagtctaacatcatagctctggtttactttactaaaactctccaatttatattagcaagagcagtcactctaaaacaaattaagtaaaatttgaactagaaaagctaagatcaaacaaacggccatcaaaatccaccactcaccgtagatggggactgacagaagagattgagggagagggtcggagtaaagtagttgcttaagatttttttttttttttttttgcttaattgcttttctagattttctacatgagattgtgggatgggacaaggaagaaagt

SEQ ID NO: 10265 - DNA, 687 bp, Cannabis sativa
tgacattacacaagctaattgggcaaaaatcagtcataactgaaggtgaattgacttttggaacaagagtgatgattgccttattaattaatttcatgtcaagaccatgattaagaacccctaacaccatatcagtaaccgaagaaccaacaatatgccagtaatgttgataaaacatggtagacattccatcactgctcgggcttttatcggggctcatagtttttaatgcagcaataacttccatctcagtaaaaggagttgtaagcgactcgttgatagcaggagaaattgaagttgggatggtagctgtgacttgttctatggcagtcgggtttgctggtgtacaagcaaagagattggcaaaaaaatcagtgattatgttggacgaacttcttttgaagttatcttggtgccattattgtcaaagagagaggtgattctattggcagatttttgtgaggaagcatgagcatggaaaaatttggtattctgatcaccactacgaagccaatcaacacgcgatcgttggtgccaatattgctcttcttgctctaaaagttcatccaagatacttttagatttcttaagatcttcaatcattgtctgagatcttgtttgttggttgttcaaacgtgtcacttgcttttgagctttggtaattttttctttcatattgccgaaggt

SEQ ID NO: 10266 - DNA, 951 bp, Cannabis sativa
ttggcagaaactcgaaagaagaatgtgagagataaagaggacatgccatttcagagagaataagggccgaaatttgaattccttcgaagctttgtaaaatagtaatggcaaaatacgaggaaaatgctgaccttatatccaaataatggaaatcgttcgattatataatgatgactattgaacaattgtaaactattgaaaaaagaacagtcagattaataaatgttgaagtgatatttttctcgaagtactgaaccaccaaaatgaagcatgcattttcttttaaaaggaaaaatacgagcataccctatgttaatcaaaaagtactttttaaggggtaattgttatactcatacttcgagcaaataatatggtgatgacacgtattaaaagactagaaaataaactagctcgtgtaatggagcaataaatgagttcaataaactcgcctcaaataatacaataggtagaaatatttgaactcatccttctaaagataagggcgagccgtgaataataactgccactttgtgagaccagtgagatgaaaaaaatcaacataaaaggtctatctcgggatacacagagtacacaacagaacgacagtatgttagaaagggtagatatgaattttttaagagcttgcagctcattaattcacatactcgtgagtatgttgaaaggctaagggaaatacatccaatataattcatctctttgccacactatgatagtgcctcgcatttgcctctttcaacatcacataaggagaagagaagtattttccatattacacttagacccaaaaaagttatctttagaatgaagcatcctaagagaatcgtttatattatgagataaagaagtattgtcagcataaccgtttataaataaagacaaagaacagttgtagcagttatttattattatttcatatgataagtgtttaaa

SEQ ID NO: 10267 - DNA, 662 bp, Cannabis sativa
ctatgcttctataataatttactcgaagaagaaggtattctgcaataataatttatttctcccaatagatgcctggtcaacaaacttatgctaaaccaaatgatataaaagttacaattgattctatgaatgtcttattgtaatctaagtaatcaagatcaatccacacataaattgcaaaacccaaactctgcttccatgagctggtatgctatctaaaggggagatgatatagatagcgtatataatgtcctgaaaaatatatggttaaaaccattctttaatgttggtaaccaagctataagatagacatgcccattggcagaacaacaacaactagaaaactaaagcagatatgagagtagttgagtgttcattaggcagtctagttacagatcaagattagcctaacgttattttggggacttcgaatcctggaccacatacacactcaccctcaagaagcagctgaacctaagaattacaatagtttctcttgctcctgattgtgatctcaaaggataatgctatctgttaggttattagaaagacaattctactattttcaggtacacttttatcccctcacctttatccaatacatatcagttctataaatggcattatggcactaactttttactgtaaatatggtcaagttg

SEQ ID NO: 10268 - DNA, 557 bp, Cannabis sativa
aataataattcataagtactcttgtgacaagtgtagtttaactaaaaaaagtagtctaactcacatttatagagccaagtttttattaatttttttttcctaatttttaataaaatttccacgttaaaaatagagtattattattggatatcaatagtcttcagaattttttataagtagcgtttcacgattagttatcgatattttttaaaaattattttgttaaattatataaaacccgatacttaattacacctactgacactaaaaaaatactaaacaccaataatatttttttgacaattctcttaaaaataatatgttcactgtccacattttgttttaattaagttaatccaactttaatcactttgttcccctaaaaaaaagcttgatcaatttgttgatcaaaacgtttatcaacattcaacacatacctcaaatagctaaaaatgagcaaaaaaataatattgatattttaaaataaccatactacttttaaatctatactcgtatataattatgtcactacaacattcaagagcaatagcggcggg

SEQ ID NO: 10269 - DNA, 626 bp, Cannabis sativa
taactgcttgataattctatgttgcttttgcaaccaaaactataggtaccattctaaattaaatagttatcctatgcccaataattattgccccaaatttaagtaacattacaattagtggatatagttaaagagtgcggtgaattctcacttattgatcttgaaaccatgccacctagcagctattactaagactaatgactttatcagctagctagaatttagtaatgacatgtattgaaagttggtgtctatccttttttttatataaaggtaatatatgaaatttaatgattgtcatgtgcaccatgtaacaaaagaaaaaaaatcaaatgactataactactaaaaacagagtagtgaataagataataagatactacttacttgtaatgagatggagaaatcccttgaaagaaaaccatagttttagtaaaattaacttttgcatcaacccaccctgcccatgtgttgagtgctctctggaaagcgagcatacgatccatgtctttactgacctgctgccctacttgaatataatcccacctgcaacattacatcaattggtcacccaagtcacaaaaaaatagtgtgacatcacattgtgaataagacatagtttatac

SEQ ID NO: 10270 - DNA, 531 bp, Cannabis sativa
tatcatttataattgtgtataagtaatataaaattaagtaagaataatttagattgctttgaagaattatttaaaaaatatgaaaaaattaataactagtaaccagtttctatcctttttcaactttgtaggacaattttgaacatttgggatgtttctaatagctcccataacttcaaaatcacaaaattaatcccatttacactaattaagagatagtaacatccatgggtgtagggtgttgaattttaaaatatgtgatcttaaacgctataaataagtacctaacgtgtttatattgaaatgataaagttttctatcaacaaacacttattaaaaaatataaaatttgataattttcaaaattattttctaaataattcctcttttttcatattatatattgtatattatggtattaagtattaacccaaaataataagtaaatatttacttagagatgtaaatagcatagatatctataaagttacacaagtacaattgcttaaattccctttatttatttatttt

SEQ ID NO: 10271 - DNA, 634 bp, Cannabis sativa
acgagccagaccaagagcatacctttttcactacagatcaaggtatgtattgttacaaagtaatatcttttgcgcctaattaatgcaggtgcaacttaccagtaacttgttaacatgatgttcacacatttattgggaaacaccattgaattgtatgtcaacgacatgctcgtcaaatccaaacaagagatcgaccatgtcacacacctagactcgatgtttagaagcttgcattattacaagatgcaattaagcctactgaaatgtattttttggcatgagctctgggaagtttttaggtttcatggttaactagtgtgaaatggaagctaacctcgcaaaaataaaagccttattggaggtgcgatctccaactaagcccaagaaagttccaaagcctcattagtaaagttacaactttaaactattttgattcatgcttatttgataaatgtaaatgagtaaaaatatcaaattttagactattgtgtcacttttaaactgatgaagccactcacaagttggttaggaaccaactagatgatgtcaaattttgtttcaatataatatacatcagttcatggaaccaacgcgattgacagacatgttagtttttttttttttgagaaaaaga

SEQ ID NO: 10272 - DNA, 639 bp, Cannabis sativa
tgctgagccacaaaagtctaactcaccagtaaacacacctgcccctcaaccatcaccaactggtgtgatcttacaagctcctggcaacactcacaatatgacaactcgatcaaaaagtggagtttacagacccaaagcctatcttgccacaaatcaccctctacccgaatccctcacccctactgaaccaaaaacactcaaacaagcccttgcagaccccaaatggttcaaagccatgcaagatcaattaatagcttgtaacttaaaagtcttgagtttaaacccataacacatctctttgttctatatccttctctcactactaagttaggtttagtagccgacttttacacaacctgagttattgtacgaaatatcaaaacacatgttcaaaatagttacaggctttggatattgcgtcgcactttagataaccatttggtcgtattcccatgagttattaatttttaaatatgttgccttgtgatagtaagtatatgtaacttagttaaaattttaataattttttataatagataaaattaatgatgtaatagcgtgtgataattgtaacaacttatagtacaaatatatataattgttattctgaaacacttataaatacgggaagatctccca

SEQ ID NO: 10273 - DNA, 612 bp, Cannabis sativa
ctcaagcaaaactcatcaacatcagccatattaaaataaaaaaatagctagcatacttgatgcacataataaactttatttaagcttgaaacaaatgtctaattattattcaactatatcaatgagtatgccctgaaccaccttatatatgtatacatatatatttgctcagcaacattaccaccaaacccaggaaaaaaaattgtctggtttttgtataggtaaaaaaggtacataggatcttcctgcacaagaaaaatataagccaaagtatcataggtagtttggttttgtttactgtaaaaagttgttgggctactctgctatgtttgaaatttattctagtaaccatatcttctagtaaaataaatcattgtgcaaacgtgtcacaagtggcatggatctctattaacaaatttgttcagcaccaagctaactatatgcaaataagaaaatgataccaagcacttagattaaggcttagctatatgcacgtggaactaaaaaaagcaaaggaagctttttttcacagtgaaagagcctgctatgtctttgaagtttggttagcaaaatttaagaaaaatgttcctaacataaattttgaaaagcctg

SEQ ID NO: 10274 - DNA, 510 bp, Cannabis sativa
gtagagaaaaattgcaagaattggctcaactttcgattaagaacttgagacttgttttaagacataaaaaatatgtcattcattatttggatacaagactgaccttgaaatttaatgggttatagaaaaaaaaatatttttaggcctttatttaaaaaaatttataatattttttaaaatgtgtaattataaaagagaatttctttttaggctcttggactaggtgggtcctaagcacaggcctagctcgcctatacttagggccactcgtttggatgcagtacctaatggaatatataataatgattacaatcaatatagaattatatcattgatattataatcatatttgtacctattaactgtaactgcagcattatgactccaaactttgaattgaaagagttacaatacaaaagggaataaaacttgaactgcaacagtcatctttggccttggtcttcatctaagtatggatgtgactgaatatttagatcttcaatgccagaa

SEQ ID NO: 10275 - DNA, 594 bp, Cannabis sativa
ctcttaactccaggcaggcgattttttgggagccacagcgcacgcttggacttcccgaggccagcagcaccatgaagagtctccatcgctgggcgtgtcgatcgaaaagagaaagaggcgggagagcccctctgttcaccgtcaccaccttcttcggacgccgtcagcgacagcaaggctccaccgttcttcctaacagacgaggaagcagcgaatccacggggagcaacagtcggaccagagaaaacacttgggtaggaggataaagtggagagccaaggaccaaacattggaaaaggaattccgtcgctattagaaaccgtcactggcgaagtaagtttacatcctctttgttgatggccaagacacccacaaaagtagcataggatacctattttttcatatttaatttggatccatttcttgatcccagatgctacatcaaagaagcagccagagaatagtggtttctccacttcaacatcaacaagaaccttgagatatttaccccaggaagcaggattttcttcattcaaatccactttcaccactcttccaactaacccccctaacaggcctaatctaatcacagtg

SEQ ID NO: 10276 - DNA, 714 bp, Cannabis sativa
tacatgacaaaaagtgtagagaattgactctaccgaagaagaaacttttccatttctagttcaagaaatatacccgtatgattgaatatttagaaaattttaacaaaattttggcagatttgcaaaatttagatgttaaaattagtaataaatataaagctttgttgttactgaattcattacctaaaagctatgaacatttaaccacaactctgttatatggtaaagatgaggttaagtttataatgctttggcaaacaatgagtatcagaagaaggatcaacatgatcacagagactcgatgccagaagcattggttgcaactaaaggcaaattgaataacaagaaattaggtggatcgaataataggggcgatcaaaatcaaagtctagaggagagtcatcaagaagaaatcttgtgaaagacgagtgcgcctattgtcgtcaaaaagggtactagaagaaaaattttccaaacaaggagaagtaaaatgcaaatgttgcacagaaggccgacatcgaagaagattctaccttttcagtttcatcatcatatatgtattcaaacaaatggatccttgattttgaatgctcctatcatatgtgcctaaacagacattagttctcgaattttgatgaattgatggaggagttatcttaatgggaaacgacaatttctgtcagataaaatggattggaacaatacgattgaaga

SEQ ID NO: 10277 - DNA, 572 bp, Cannabis sativa
ttttttttattttgtttattataattacttaaatagtacctattaggtggaaaaaataaaaactgattagactacacaatttatattcaaaattaatttattttttattaattaattggtagagatatattttttagataaataattaaatacaaagtatatatctcattctcttttatttttcacaaacttcatttattcttcatctagtttcttgctattttcattctcttttaacaattgttattatttaaaaactctcattcaattccatcattattacaaacttatagactatattgatatttgattttacattaaaacaaacaaaagaaacacaaaggtatatattctaactcttatttttatatatattattaacattattatatatttttcatcttactttaatttataataattattctttttggataggatctctttcaagaaaagaaaatttcaaagaaaatacatattgaagtacctgttttggcttgcaattttttaggttgtatctttttttcatccttttttttcttttattatagtgttcctaaattaaaaaggaa

SEQ ID NO: 10278 - DNA, 840 bp, Cannabis sativa
ttgtggttgaatagagcttttaattaattaaggagtagaagagctcaatagtgtttgtggcgccgactggttcacattattacctgtattagaaggcatatatattgctatcagtgctgcctatcaccttctcaacatatcgcattacaattggctagcgatacttcttaaaaattattatattaaattatatgggactcgatatttaattggactaataacaatattaaaacataagaaggtaccctttaacaattctctatcactaactatgtatatattttttgtcagccaatatacctataaatatatataagtaaattaatcccagtaccaaaatttagatatgatttctttatataaattagttttagcagccgatatgagttttccttcttctatcaatcaacaatacatatatgtcccatcttaattaatccatatgtcccacacctcatataaataaatttacccaacgatttaaatactacataagatccatacatattttatgcataaatcagatgaaaaaaaaggccggcaatcaaatattctaattattaattatttattatatatattatttaaccttgatttaacggtattagtaaaattaattttatacatataaatattaatattatttgttttaatttaattcaacttacattaattttaaattaatttaaatatataaatattaatatattatttttaatataagtatatattgtgcgatacacgtaaggataaattagtgtattataatgcaccattacacgggcacaatgttataattaaatacgtaccgcactctatataaatatttatatgttttaa

SEQ ID NO: 10279 - DNA, 1342 bp, Cannabis sativa
ttatgtatgttagattgttaagttttaacttatggttttttatatatttatatatatatatatatttgatgaaattaacttaaatggtagctaaatagattggatagatccatttcaatccaatagaaaaccagtcaatgcactcaatggtttaaatcgatccaatataatacatctattagatcgggtaggatcggatgactcaatttaattagatttgaacggaagataaaattcaatatccaataaataattgaattagatcaattgggttcaaatccatttattgtgatgtaatgaaaacccacattttattaacaaattacattttttggatttcttaattttatggtttttaaggtataagtttgcaaaaatatcactttttctcaacaaactgatttttttggaattttaaattttatggtttttgaggtataaaaatgttattttgtggggaaaataaataaaataaaataaaaaacatgggaaaaatgatgtgccattgacgtgacaatgacacatcattgccatgtgtataatttaaattaacatattttcttttttatatttacaattattttacttatagtttgatgaaaaaataaagttgatttcatgttgcaataacatatagtatacgaaaatattattattattttattatataatatattttatacgtaagatcgaactgggcaataaatatatttggttaggatctacaataatacattatttaatttaagtgtccatttgaaacttaggtacaaataagtaacaagttacttaagtggtatttgcaaatatcacattattattagcatttatttcttaacatatgactttttggaacaaatgacataaaacaaacgatacatagtaagagatttaatttagtacaactcataatgtttcaagtatccaactttcttatcttaaaaaataagaaataataataaaaaaaaaaattaaaataaagtatccaactttctatttatttatgatgtcgacattgaacaatagcacttaaaacttattcgatttaataaatgtaacaatattttatatgaatcccgtgagctaaaaagggttatttaatcaatcatggttagagtcttagtgttagggttagggttagagttagagtaagagggtggttaggttaagctaagcaacaaacatgtgatgacaataaaagaatggctttagacaataaatactcaatgaattgaagcctatggcatatacttcttctttttcttttatcatgttattatgtttgagaatatgttacataggatgttgaatggcattgccatatcgtattagtagtgtccag

SEQ ID NO: 10280 - DNA, 810 bp, Cannabis sativa
ggatattgctattcctaggaatgatcttgccattattgatgatgtgggctaaggggtgggttcgtctttcaacattattactcttgtggaggaggcggatagccctcctccacaggtgccatgagaggctttgcttggaactgtagggggttggggcacacctttatagttctggaagttaaagccctagttcggtcgtgctctcctgacttcttattcatttctgaactcaaaagcgaccccgctcacttggtacgttctctaaaaaacttgcacttttatttttatattattgttcctgcggttggtggtttaggtggcctccttcttggaaggcgaggtttgatattgaaactgtctgtgtaacaaagaatcacatctctggactagtgtactcggaccctgtgcatcattcctggttgttgacgtgtgtttatgatcctccttacttcaatgaaaagaaattgttcaggaagaatttgatggatcttggtttcaattttggagggccatggttaatcctcggggatgttaacgttgtattgaagagttcggaaaggaagggatcaagagggagagatcaatttttgcctttcatttctgatttggtcaatagttctggcttaattgatgtgccggtcaaaggcgattacctcacctgggataaccatcgtgattgtgatgctcatgttaagtcagcccttgacaaggctctagccaacgctcagtggctgggcctttttccgaaggtagttgttcaatcgtggcacacgtgtaattcggaacaccgcctccttgtcatcagtactc

SEQ ID NO: 10281 - DNA, 1274 bp, Cannabis sativa
cccatgtatcataataaaaagtgacagtattgtactcaatcaataattaaaggctttacaaattcgacccactcaacccgtattgcattgatctccttattactatagagagtatctgacttaaactgtaaaataaaaaataaaaaatattaattataattatacatgcatataatatatacatataaagagaacgagtatagcacatagatcaattttttttattaagcattagataaattaacaattataatattactttcccaataaattagtaagcaaaaataaataaacatacataatctctaaacttaaagcaaattgcctggttaataacatatagcattaaaaaattaaggtagatggattagattagcttgaaaaggaacatatagattttgagaattaaactgcaaaaatatgattatatatcacgaaatcaaaattaccaagtcataaatacaagggtgaacctaaaacgaaactaagttataagaaaattcagtacaacattatatttgtagctagagccaccttaacagtagtattagtattcaagtattaaacaatactatcatgaatacctatttttcatttataaaaaagaatgcgactaagtatttaaaattaagtatataaaagaaaatgaatttatagctaatagttaataaatatcaagtggtcatacaagaaagtatatgcaaaaataaaataataacaactcgtttttgtacaaattgaacaatattaacaaaatgattattttttagaattcaaataccaaagagagaaaatctcataataaaatgaaaatttgcacatgaaagttgaattattaatatattatggtataatattctaatatgattcagatttcagttcattctcataataaactcccaaaacattggaaagtctttaaaattttaaacaaaatcaaagtgtaatctaacaagagggtctaagcaaactgtaattactgtcgacatgatcaatgtaatctttcaatatctgacttatacaatatgtattatgaatgtggaggtatttaatctgatcacttgttaagaaaaattaatccaaattaaatccatttaaatgatctgatgaaaaataataagtacatcttaaatgataattaatattgaccatattagttaaaaaaaaaggtaaaaccagcaggctaggctagtttggatctgtaattcctttcactccaaaaccaaaaatatacatatttatcaatgcgaaaacaaaacagggaaccatacaag

SEQ ID NO: 10282 - DNA, 584 bp, Cannabis sativa
ctttaatcatcaatttatattcatcattatattttatattttcttatatatccttgtccaaacataggcacatataaaagtttgaattaatagaacccacaaaatgtcttatacgttaatataatttgaaattcttacgaaaattagcaggtttcgatcattaataaatgagatcgacataattattacaaaataaaagtaagaaaattactttatgtattattttattttagtagttttttttaatgatttctatataagttgttatgtaaatttttgtataaaattttataaaaatacaaaaaaaaaatatattttaaaatataaaaataaaaaaaataatgtactaaacaagtcactaatatatatttttgaattaacgtgtttttttttttgaaaacatgaattaacgtgtttaaataaaatatatttatatatcttgtgctttattttttaataattaaattggtggtgtttgagttttatttttgacttgactaaaaggattatgttcgagttaaacatataataattatacttgaattatctcgacacgaaacgtaaatacaaattatcacccccta

SEQ ID NO: 10283 - DNA, 674 bp, Cannabis sativa
tctcaaaatatgatctatttccttcttctctccaaaataatgaactgacaataaccctagatttttggggaaatggaaatgaagagtcttgtagtcacattctccgaatggcccaaagaaatgtccaaaaacgttgaaatggctctcgccaaggacttttttttttaatctttttagctccaaaaaccccaatttcattattttagaatttaaattaagccctttttgttcttctagataattggtacagtatgtatacatatcaagtttgaatagaaatgttctttaataaattactgcgagtgtggaacttgttgctgctaccaaatttgatgtctataactatgtttaaaatctaaatagatgttctttaagaataaatttgtagtttttttgtggttgccagttgatatcagtgtttgtatgtgtttggaatcgaaatagattttctgtaatcagagagaattaaattcaaccattgatgtgtttgtatgtgtgtgtaatcttgatgccagttttttggttctttttcaattaaacattattgaattccaccattgatgtgtgtgtgtaacttgtaataagttttttttcttaaggatatagactcaatcgcctatccatgccatacccaaacattccacactctttgccctcaattcaaggtctcatca

SEQ ID NO: 10284 - DNA, 927 bp, Cannabis sativa
ggaatcgattggaaattgagaatcgtaagttgtgcacattcatttagactagaaattgaaagccctaatttccataatctgtactgtcgaagaacagttccatacaccccaaattatcacagaagcaaattaaaaaataaagtaaataatttaaaaaaatggaaaggagaaagaaaacttactcactttttgtagattcttgaagaatgcatttagatggtttcggtagattgggattcttgcaacaactcttcgaagctttgagagaaaaaaagaaatttggctctgatattctgagagttaaaatgactaaagagtgtcaaacaggcttaaacccttttttataggtgcttagatgggtaattcagtaattcaaaatttaaattttggatttccccctaaaaatgatagttaatactcattgaagagtacaaacattaggcacgcagtacctataactttcattccatgtctcgaagtctaattttcaaggcaggaaattaaaatgcccaagatattgaagatacagtcgtatcttcacatccttcaatcatatcacatcgaattaagacagagtatgaagactaaacatgtgccacctatccaaccaactcatcgatcgagtaattctgcatgcgagcagatggttcccacacaaacttgggagaaaatattatcccaaattccacatagggtgatgtggcatgtagtaaggtgacacgtggagaatatttcaaggtctggacgggaaattttccatcattgatctgaccaaagaattctatactcaaaaatgataagtttatgccttcggtaggaatcattcgaacagaacccgtatgtgattgtccgcacaaattctcattattcagtgatgtagaatcctgcgaacaagataatacagctgaacaagatcttcaatgatat

SEQ ID NO: 10285 - DNA, 1060 bp, Cannabis sativa
agggcataaaacccaacaataccagtgtcggagggcatcttgaacgaagggatcttggccaaactagcaatcctccgaaaagacactgccaagatctcacgtaggcaaaaagaggataattcagagtttgattgtgaagaccgggaatcctgtgccaacaacattctggaggcggagctccttaaaaattttaaaatgccttagttaacgatatacgcaggagacacggacccgaatgaccacatgtctcgattcaatcgagtaatgatagtcatgagggttagtaatgacgcaaaatgtttatgtgttccactaacattgggcggattcgctgaagaatggttcaaaaaattagaaccaggattcgtagattgttggaacaaatcgcaagtcaattttcaaagacagttcatggcagctaggaagattagcctcgaggagagtgccctacctaacatcaagcaactaccaagaaaaaccctaaagaacttcataaaaagattcaaagaagaggcctcaaaaaccaaaaaagttgatgatggacaacagctagcactactccaagctgggacatgaactggaactcctttttggaatgagctacagcaggaaggagctaccagcctccaagactttcaaaaaagtgtttaaaaatatatcaatttggaagaggcccaaatagtggcctacggcgggtattatccaactagtggactaggatacatgccaggaatgcaacttcctagagttgtcctccccgttacaccacagacaaatgaagtacagttttcgacgacccaaggatatactcaaaacctcactcttgcgcttgctcaatttaaccttggagcgccaacgaataatcccacctccgagatgactgcacaactcccaactcaatttgcaccagccacacgtatggtgggagcccccccaaagctcccggagtaagagatccttaaaaggtaacactcgacctaaggataagagacaaaggagaggttacaccccctagtatacacaatatacggaactcgtggatactcaagaacgagtgtac

SEQ ID NO: 10286 - DNA, 731 bp, Cannabis sativa
ttattctatttgccttggtgaatactatttttgtgcccctttacgtcccctattaaataattctttccttcattagtgataaaagcaactaccaaaagaaaagaaaaagtaaaaagttgatgtacgtacacaaagaaccaaatagtttggttttaagtagcctaaactaaacacgtacccttctatatattaccaatttgtgcatacatataattacaaaaattaatctcaaatggaagattagttttgatattctttcttagaaacaaattcaaattagtgtttacatcacattaacatgataccaaactttgtcacgaattcagcacatgcactatatatatacccattatatttatatttacatacactaaacacatttatagaagattattattattattagcatcatgataaaaaagaaaatagaaaaccaccccttccatccaaaccactcattgatcctcatagatgataatgaacaccacaacacagagcgttgcagcacatgtagtagaacaagtttttcatcaaaccatatttaccattgcgaggagtacccagattgcaaattcaaattatgcttggaatgctctaatttggagccaaacatccactatccagggcaccaacacaagctctgtttcatggaaaaagtcacagcaaccacggaaaaagaagatgaagaagatgaggatgtaatagtggagtgcaatgctgatgatggttat

SEQ ID NO: 10287 - DNA, 913 bp, Cannabis sativa
attatgaggtgtggatgatttatcctgaattgtagaataacactcaaaatctttgagataggatggaggtttggaggttcgggtagattttcttgtgggatttggagttgaatgttgcgtctgtgatgttgaatcagcattgatattagttacatcagaatttgtaggttctgtagatgtgttagagccatttgtgttttcctctgtatgaacctgttcaggaaaagaaatggttgtatgttgttctatgggatagtcggatacatgtgtgtcatgaattgttgtgctagggagaactgtgttagagaaaggatcgatgttgctgctgtcaatgttgagcctgtgaaaaggaaaaacattctcgtgaaaaattacattacgagatataaaaaattgattggtattaatgtcaagcaacttgtatccttttatcccgtggggataacccatgaaaacgcatgcacgagcacgaggggcaaacttggttctgtgagcagtgagagttgaggcaaaagcaaggcatcctatagtttttagatgctcataattcggttgtttgttgaaaagacattcgaatggtgttttattcttcagtaagggtgttgggattctgttgatcaaaaaagttgcagccatgatacactcactccagaactttattggaaatttggcctgaaaatataatgctcgggctacattgagcaaatgctgatgctttctttcagcaacagcattttgctcaggtgtttccacacatgtaaattcatgcatgatcccattcttggcaaacaactctttgaatactaactcaggcgcgttgtctgatctgaaggttttgaatatgcatttgaattgtgtttggacatatgacagaaactgaggaattattgtgttagcatcagatttattatgc

SEQ ID NO: 10288 - DNA, 530 bp, Cannabis sativa
aacaggggatcataaaccaatcccgctgaaggacgctacctagggggcaaatcttgttcagtatttcctaaatgacaaccttacatggaacttggatcgcctcaacaactggtttaggaaggaagatgtgaagcatatcttaaatataggtctcccgacccatcctcaaaatgattcttggctatggcttggtgaagaaagtggaaaattttctctgaaatcagcctatcgattagtgagaaaccgttccttcacttctcagtcgaactggatttggaaggagctgtggaactcccccttacacccgaggctcaagctgcttggatggcagatcttaaggaatgtcctccccactcgtcaaaagattgctggagctttccctatacagaataccatgtgtccgctctgtgatggagaagaggaatcgagcttccatctgttatggcattgccagtacgcaaaagttctctggtttggcagtctttggggcatcagaactgaaggaaccccatgtcgagactggaatgatt

SEQ ID NO: 10289 - DNA, 575 bp, Cannabis sativa
tcgaaataccaggttttttcatgccgcaacagtcataaggaaacgaaggaataatatttgggcgattaaagatagttgtggtaaagtgtggaaggacagaaaacatgttgctgaagtaataaaccatcatttcaaggagctctttacttcgggcaagccaaacattgatggaacttttgaagaattgttcattaaaagggttgacaataatgcaaatgccaactttgtaaaggtcccttcggaaaagaagttaaggaagtagtgtttaacttacatcccctcaaggcctcgggaccagacgggttttcaggttgtttcttcaggaagtattgggatatcgtgggagctaatttagtagcctctgttcaggaattttcactatgggagtcatgaatcctaaactcaacaacaccttcatttgcctcattccaaaagtggaatttcctatgagcatggatcaatttagaccgataagtttatgcaatttctcctataaggtcattgcaaaaatcttatccaatagattgagaccactcatgaatgagttgatctcccctttccaatctgcctttatt

SEQ ID NO: 10290 - DNA, 623 bp, Cannabis sativa
cattcaccaggggcgatcttcaatttttcctctcttagaaaatttgaactcagattatgaaataagaaaaattggtgaactgaagtatttttccctaattatatgaagaggtggcaatccgtgtgccccaaaaccagtggcttagattacatttgagaaagcacaaagttaatccaacagtctaaggatgaaaaggccagttttaatgtgttgcattggaaccgaggaattttcaagagtaatgtttgcctcggtatgagcgctgatatgattcagccatcaacattttaccctaagcaacacacgctttcccaacgtgcatgaagttcacggaccaagaagttaatgccacatgtaatccattagcagaaatacaaaggtcaataactgttcgtaattaaagaaggcataagttggaaagatcatcgccttcccaagtctcccacgtgtccacaacgaatcagatggagaattataagcctttgcaaccctcaagtttcggaagcttgggggcaaaatgttattcgtattttcatattagaggcacgtggcatatccagtttcaagctaatcaactagggcctgctcaaaaagccctaacaagataatgggccaggacaatt

SEQ ID NO: 10291 - DNA, 791 bp, Cannabis sativa
aggggaatgggggtcccctaaccactaaaaaaaggccccctctgaatgtttgccaaaaaagggaatccaacgattctctaaggcaaacatcgggtgcaaaacgtcctagcaaagaaggaaagaaaaaaaaagaaagtgcaaaagtcgcttcggacactcaaaaacaagcgcacgggaaatcaccatttttgactttctcagaaaaagaaaaatggcagtttatatataacaaaagcaattaatgacataaaatgaataaaaacaaggagcataagttgtcggacgccccacttcgggggcgtcatattaacatcggccataactggcgtttcaaggaatccaagcacatcaggcaaaaatacaatcatttatacttgccctaacaaatgaaaggagtggttgaacagaaacttacacaaaggcagcaaggaagagaccgatgacgtctagtggtaatattttgtctagcaacggtggaggaaaagtagaagaaaatctgaggcgtctggaattttttcgagtggctttgatagactagaaatcgcagggtggtgataatgacccagctgggaaaaatgttggcttttatataccattggggatgcaaggtagcattgatcaggcaccattgtacggtgaggattcacaacgattcgaatttcgtaatccaacagatgggatgaacgtgtgtgaagaggagaaaggaaggttgaaacgtttgagtacctttctgacatcgacattaatggaagggtctgtcaatggacgggaagcgaatcatggcctgtaaa

SEQ ID NO: 10292 - DNA, 617 bp, Cannabis sativa
agagattgcttcagcctctatttaggattttcccctcaaactattaccactatcaaatcatgctacttgaatttttgtctattgaaaattgctcccgaattattcacagtgctgatataatagagaccacatgggataaattttaggggtaaaattggtcggttatgatcattttttaaaattttataaccgaccatttagaaattataaccgtataaaactgatcgtatggttttgggcgggttttagcggtttttcagtttggcggtttatagcagttttggcagtttttttggtttaactattttttttcaaaaactgaaaccgactgctatgtcgaaaaaccgtaatcgaaactgactgccaaattcggtgatggcgtgaaaccgaaaattcgaatacagtctggtggattttggtttttcggtttttatgaacactactaataaaactcaacaaaaaatctatatctcaacactgttaatagttcgagaaaaattcaaatgtcaagatttggtagcggtaatagttcagagggaaaaatctttaggtagtctactttaaaagattataagattatagtacaataaattctgagctaatatttggactttgat

SEQ ID NO: 10293 - DNA, 558 bp, Cannabis sativa
ccatcaaaagtggagttgttaatataatttggaggcaaattaaagagcttcaagaggtgtgtctttgtagttttgttaatcatgagttcatcaagtaacaacagagaatatgctaacgaaattgagaaagcacgacgagaccttcgagcccttatcttggccaaaaattgtgctcctatcatgcttcgtttagcgtaaataatcttcttcttttttcttctttatcacactttacaaattcatacacaatttaaattgctttattttgtttgttaagtatacatcatcatttaaaatattttataatgtccttgaataattcatataaaaaaacatgattcaaacaagttgattcttggttgaatttgtttggtagagtaaatattcacaacttttcctaaattatttgtttgttgtcattatagttatttaaatatcgaaaatagaatgaactacttttattaatattaatttaaacatgtatcaaatctttaaatttttgtttatatcaacgctcgttaattaacattttacaaatataattaatataatataata

SEQ ID NO: 10294 - DNA, 533 bp, Cannabis sativa
atctgtccctggactactccccatcctggatagataatcgggatgcagatccagtgccctagatttcttgctcggaccaacatttcaatctcatcatttaaatactcacattcatttgtggtatgatccttctctccatggtatttgcatttcttattctagtctcgcatgttcctcccgcaattcgacatacgtaggggcttttaataatggaccatgttgcgcgttgccttataaatattctcctcagtatctattagacttgtgtactcagtgtactttgaatcgtactcctttctcgcctactttactgaattattacgactgtgattcttaccccttatcttgccctgtgaatgccccacactagagtcggggacctcagctttagattgttcgagagccacactacacctagtctgtgccgccacgtacccaaagaaatgggtctacatagggacgagaccggatgcagtaggcccatagacagttggggaaaactatggtcctgaaagggacatagatgaagcagg

SEQ ID NO: 10295 - DNA, 1475 bp, Cannabis sativa
tatttttaaaaacaaaactcagaagaaaaatgttgtcctgtcagtaagaagaaagaatcgactggaaatgaaagccaagaagatagataacatatcatttgacacgtatagaaagtcatcagacaaagaaaactgcagcattcctatctcttagcctctcatagatatatttttttagcatattttaatggatgatattacttactgttgaaggaaaaataatgctaagtataaatgtctaataatcatatccaacgctaaataatattttagatcttgcgtttacaaaagttaataattagactttttgttttattaaatgataaaatagattctgtattttttaaaatggtacaactagaattttgaactaattttttgtcaaaataaagtttaatagtaattcgatctaaaagtgttatgacaaaactatttacattttctgtatgtgtttgtattaggaattgtcttcaagttggttatattaaaaaaaaattgtcaaaaattaagcccagggtcctatttttaccattttggaaaatacaagaatcattttgtcatttaacaaaacagagggtccaattagtaacttttacaaaacacagcgtccaaaatagtatttacctatctttatatcttattattattattattattattgtaaaattaaaaaaaattaaccatttaataattaaataataatataatattattttaataatttttaaaagtgattaccattaaaatattttagatcaaaacatgccaaaaataatgtgaaagagagtgtttacaccaaaattaaccctaataacgtggacatcaatatttgatatgtggcaaaaaaaaataaaatatcttgggtttaagtagtccctaatcatagcaagttgggaggggcccctagccctgcgcctaggttgacttcaggagtttcgaaatgggtgtttgaattctgccaagttgttttcaactcactatctttcagtattttgtaccatgaagatatgaacaatccaagtccaaggcctgggagctaaaaacacacgaaacaacacctcagaaatcaacccgggcatctagtgtttcacccaacgcccaggttgacaacccaactagggttttactttttgggaccgtcttagtgaaattgggtcaaactttgtactgggacacgaattacacatgtcataaacatatatttgaggcatcagaataaaattcgttttaaccacctaaagcaccaggtgcccaagccaccaagcccctaggttgacattctgtcaacctggagtacttccatgcatcaaactaaggaactatcttgtgcattttcttcgtcttcataaaaaatgtggaaacaagtactttaagggaagaaacagaccgacatgggagccataaagagggtccaacacccatgttgacatctggtgctagtctagcgcccatgtcgatattttatcaacctgggc

SEQ ID NO: 10296 - DNA, 579 bp, Cannabis sativa
ttattatatttatatatactgttttagttctttgttatttgttttatgtatatgatcaatatctgtgtatatatatataactatatctgtaagtctgtgttgtcgcgagcttcaccggaggtctctgttttgatgagtgattttaattctctgttattcagtacccaaaatatggcatttaataagtaccttagcgtatatatagtatagaagttgtatgttattcttgttaaactaaaattaggaaattgaggcatttagtccagtggtgctgttttctcttaattaacatgttattagaaaataaagattggaacctttcattcaatcaattttatgatacaaaaattattatatatgagtatattattggaaatgtatatataggtatggttgttaatggtaaaacaatgtattttggttcaaaaagtcacaactgattctttgatatagttgttttttctttctttcttcatcttttttttataatcaagataataactccatcttgtttccatgtcaccacataagtatcagttgtaccaagtaagtgataatgctagtttttttttttttttt

SEQ ID NO: 10297 - DNA, 535 bp, Cannabis sativa
attaatagtaaatgaatattacatgttttcatagcattttttttttagaattagcttaattatatttcatcaaccaagtatcatcatcacagatactgaacttaatcaattgagtcttagtaaagccgatctagtctactacagcgaatctcaaaataaatttatgctttgaagtaattaatcgaccgtgcccatacctaaccataccaccccaaataaaaattgtaaggctttattaagcttttatttaattaaaataaaatatgttgtaaacaataaatattcattttagttgattaggttatatattacataagtgtgttcaaatatgatatatttttttttatatatatatatatttctaaaatttaggatcccaaaatatattaggttcatatattctcaaaatcgaactagctataaacttaattaaatattagcataaaaaagaaagtaccaaacacacacacatatattctcctcaactaaactatataaatatattcccagcaaaacaaaagaactaatgaattat

SEQ ID NO: 10298 - DNA, 564 bp, Cannabis sativa
agctggtagtattgataaagttagacactctcttcgtttcccgaatggtatagaagttcctaggcaaggacttggaggaggtcttatgttgctttggaaatcatcagtttctgtttccattaataatttttctactaatcacattgattgttttatagagattaatgatgggccctcctttcactttactggtttctatggacacccatctatttctcaaagacatcacacatggacaatgctcaaacgatgttatgatattgctcctttaacaccatggcttgtacttggggattttaatgaaatactctctcatgaagacaaagttgggggcactatgagaaatttctctcaaattgaagcttttcgtgctactgttactagttgctgtctcaactcactgccttttgaaggagatcgtatcacatggagcagtcaaagcaatggcagtggtcctcttaaggaaagattagattatggctttgttaatgatctttgggaggctactttccaagcttctacagttcatcacttggactattataattcagaccatcgcgccat

SEQ ID NO: 10299 - DNA, 1009 bp, Cannabis sativa
atgtctcttcaatgtctgagatatttaatgcttgtcttgaaagctggacctggaatcacacactgacggttatgggcaaaatcacgggttggtgaaaaacttggttcaatgattttagctcacagaaccttgttaaaggtttaagaaaaaacttgaagagaagaaaaagaaaaaagacagtttggactaaacccgtgctaagtacaacaacccatacttaggaggagttttaccaccaaaacaataccacaactggggcagcatcccactcctagagggttttcttcaatcaattagaaagtctctactagatgtagtatcctgctttcaaagagctttctgtaattgatgatgcttttcttttctttttaattttagagatttgaggagaaacacttgcactagcactttatatttataaactcagttgttatattcttgtgagacctcaagcatttatatcataatagtgcttaactctagcatgaaatagtttgaatgtgaaatttttcaacttaatgaacttaccagcactcgcactagcactttaggattaagaaactcgataactagggataatgtcaacatttcattaaactgtagaaatactaacttaggtgtacgaaattttttgaatgccactataacccctgactcccgtataccagggtaacacttgactcccctatatcgaggtgtatgtgacatacatggctctcgtgtatcatgattttttgaatgctcatgtgacgtgcataactcttgtatactatgtcttatttgcccccagtgatcaaggaaatactttcattagtcacttgccttaccaaatcccattgggctttcatgatcatgggtctcagggagttgttacatgtgtgatcactcttccacttatctagagattcgtgaattggaaatgtttgaatcacaaaagaaataagcgtagttacctcaagactaaccctacaagcttttttcaacgcttgagagcatcgtcaggtctgca

SEQ ID NO: 10300 - DNA, 1813 bp, Cannabis sativa
ttgtactgagggagaaggagccggtgattgagctaaggttgagactactagcattgctgccattgctgcaacccaagcaaagcttacgcgagccatttatagagagagaaaaactgagattttagagagagaaagtgattcttttggggactgagtgctctgaaaatagttgtattgtgttgtttgatgagtttatgagttagaggagtttagaggctatttatagagaagagtgagggacttaagagtcaaaatcggtaaagctaaaatgaccgttggatttccagaagtttcctttagggatgatctggcgaaaatcaatggttcagatttaatttgctttacagtcaattacttggcatgacctatacgaaaacgagtaaccgactgggtctggaaagacaaaacacgcggttaagggcattgagccgtttccggttttaagcaatatattaattaacctacacgtggcagaccatgagccgtccatgaaacgaagacaatataattttttaagggaatttttaaaaaatattttttttatgtttatttataattgtaccgtttaaaatttttatttgtaaatttttaaaattataaaaatacactttactcaataaaaagtaaactaataacgagaaattaaatttacgataattataaatcaactataaataaattataaaataataaaaaataatcagaaaaacaatctcctaacaactataatacaactataaaacaatcaaaaaacagtttattgtttttctaaaaaaaaaaaatttgtaaataaaaaaattttaaatgtaaagataaaagattttctgtattgaagtatttttgtaattttttcacaattttagtcattatgtagattttttaatttttttatcatgctgattttttttttcaccaaacgtaacaaaagaaaaagtatatataagctagatattgcccaatagagaccttccatgagaacatctctaatggtacatgttaaacctatatttcaagcagttaatattggagttcaacatatgacacgtgtataaaatttcgcaagataaatcagctcgcatattaaatggcctgatattcaataaatacgcattggaaaaagaaggaattataagtcctaatgatacaacaaccaacataatgaatataaagaaaatatgtacatagtgccttgggtaactcagaacaaaataatacttcgtcaagagtttcctaagaagatgtgttattaacgaggaaaagaaagtcaagcttataacgaaattgaatgtattttaacttagtttgcacaagaaatataacttgaaaaaacttacttatgaggagtgagatccttcatccacatttcactcttttggtaatcaacaagaaaggattaatccatctcagtgattcacgaggtattacacattcagtatacaccaatcatttgatgtattcttcgaggagagtaaagttaagttgaagctgctcgacgacgcgataaagatccaaatcatagaataatggctgttcatttttaaatactggttataaactgtttccacctatttgtagataaataaaacgttgggaatgtccatatttcataaactgctacatagataagatccgataaatgatatctaacccctataactagcaagaacgcataggtaaatgggacgatcaaatttcagacttaaggaaattctatcaatttgtatccatctttataacaatctcagaaataatatagactcgtggagtatatagaattaactacaaaactatgttaaaaaatctctcttttatt

SEQ ID NO: 10301 - DNA, 1901 bp, Cannabis sativa
agagagagagagagagaaaggggtgagaatagatcaattatattttctctctaattacctttgtttatttatctgtttatcgttataattactctccttatttatattactatttatccttatatatagtgttataaataaaacctttttaattatttatttaaaataaaagataaatatctaatttttgaattcaaaatttaaatttaaatataaatatctaataactgaatatcaaaatattagtagatcttttattttaataattatctttttaattaaataattatcaaataatgcatttaattaataattaaaagataattaacttaatttactttaaattattttatccaataaattaattaaaccaaattaattatgtgcctttatatgtcaccatacacatgtagaatgggcctacacgtgtgtgccatattttaaggtccaaaaataattttttaatttttctacaaataagatttatttatattttatcaataaataataattgattagttctcatgaatcttcttatttcactaggattaaaataaatattattttctctaaataatatattttccctataatattatgtagtaataatattatatttaactaattaatataattttatccaataaaattaaattgttaaatattattaattatacgattcataattgccataattaataaaaataataatttcacaaattactattttgctcttaagaatttatttctcatagaaattaattattactcaaaatctattcatcaaataaaaccttcacccatacagtgttgtatagaggtgactcggagaccattgacctatattttaaagctctaataaacccaatattaccatcaatctcatcaacagaataatctagtttattaattatattattacgccactataaatatagaattacactctttgacaatataaaattatatttatagaattcttacttgtactctattgatataatcaatataagtagcatgccctctaattattacttcataattagagttggtcaaaatacaattttacccttataattatctcttgattccttatgtaccattaattcaatgtgaacagttaatctataacttattaaagattcagatctaactattagtaattccagatttaacactataagggaactaacattcgatctgttaggaaagcttagatttcactattgtataacatgttcccaacaactcatattattaagctcccaaaacaaaatttgaaagaatcatcttctctgagaaactttaacgagtgaagcaaagaacttaatgaacacaaacatgagtttatggatacttagaatttcgactgatctactaatgatcattattgtgatatgataaactcttttcatggtaaatagcaagttgatgaaagatatttagtacatatcagtctagacatgcataatctaattatatacagtacctttactacatatccatccacatatgtgattcgaatcaaaatcacatacacacactagaagtatagtgtatagtaaattgtacttagcagttctatattaaagatttcttaaactttaatacactaccaacttattttattcatatcgtataatcgcaattttatttacatccttacaagattataccttcttcatatgaataatgaattttttggatatttaataattatactcttataattaatatatcatttatctgataattttatttcatatattctctaacacactatctattaattacttaattttaggtataaatcctaataatcttccacttacactaaaagtaagtgcatctcattgtataatttttatagacgttgtatcttattcgaatggtttgggctc

SEQ ID NO: 10302 - DNA, 550 bp, Cannabis sativa
tatggtgagatagtaattagcaatcaataatataataagtctttcttctccatagatataggacatgatttttggaaattgccaacgtgatatggcagccacatcaacatacagtgtgtgcctcatgggctgaatttcactagataagccaatgtcaatatgttacttgtaatcatcttatcagtggacaagggctaattagcaagaaccctaaacactataaatatacgaaaaatctttcatacaaaggagttagaaactcactccttaattgctcaagcaagatttagagttcagacattcttgtaaaccttaaggtttttccagctttcaagtaataatattgattcgtggaataaagctcgttaacaccctaaccatgtaaaaatctaattgttattttctttatctttgatcagtttctttagctttcacataataaattagtttataaaaatctcgataaacacttctaatatctcatactcccaaaaatacccttacatttcaaaaaaccctccctctttctaactctctaactctctcactc

SEQ ID NO: 10303 - DNA, 701 bp, Cannabis sativa
aaaattcatgagactaatcaccccaaaatccctactcattgctagagttctcaacctgttcgttttttgtgcttttttttttctaacttttgacaatgtcgcgattatcacaaaatgtctctaattcacaattaatatcgttaaatgtcgttaaatcacactcaagttttcacgatgattagcgatgtttagcaatgtgatgtgtattttttagtctcatatatcacaaatacattgtgaaacatctaaatacgcaaaacatcgccaaatattactaatcatcgctaaactttatccataatctcagatttggtttatcattgcaaatacatcgctaaatatcaataaatattgcaaaaaaataaaaaaccagaagaaaaaaatacaaaaaatgagagaagctgtgagagaaggcaacagcgggggcttacggttgggaatttgggtctgtgtgttcgacggcaagggttctgggtcggggtgatcaatggtatttttggaaggaaaggatatcaaaaatataaatatactattttcaattaggtagtatattgaaacactatattttatatttaagcatactaagttaaattctaattttttttaagattaatatttaaaaaaaaaatataagatagatagatattatcaaataatgatagagcaaacgaactaacaaattaaaaatgaatgaaccaaaa

SEQ ID NO: 10304 - DNA, 677 bp, Cannabis sativa
tttattgatagattctcgatataaaattatttagtaacatagttttttgtccttgatcaatttatcgataatatgttgatgctttattgagaagttcttgatacaatactgtttagcaacatgatttttatcctcataaaattatcacaaaatatgtcgatacttttgtagacaggttcttgatacaatattgtttagcaacaacatttttatcctgataaaattatgaataatatgtcaatacttcgttgatagatttttgacgtaaaatttcttagtaacaagatttttatccttataaaattattgacaatatatcgatactttatcgattggttctctatacaaaattttttagcaacatgatttttatccagagcaatttattaacaatataccaatactttatcaatagattctcaatagtttttaatgtaattatcaatactttatcaacaagttctcgatggtttaacgatacattgctgaaactattttaatgtaattttcaattacaattatattgaccattgtaaaaatattttcccgttaaaaagatgacacttttctaatagtatcaataaaatattctaaatgtctcaaaaaaaatatacaagtgtcaccataattatgtctcaaaaatatatacacaaccatcgatatcttaactaagattc

SEQ ID NO: 10305 - DNA, 606 bp, Cannabis sativa
aaaaaataaaaaataaaataaaagttctttctttatttttatattttttagttttcatctttttcttaagtatgcttgtgttaatatttgtagactaattactcacaatataagtatatgtatgctgattataacttataattttttagtcaactaatttcatacttaaaattacatactaaaatatattttttttaatttttttttataattgtatttgttatatttacaatatcatttttgtaaaatttttaaaaaattctaaataatttacaatattaaaaatagagtttataatattttaaattaaaaaaactttaaatttatttttagtattataaactattcaaaaatttaccgaaataatattgtaaatataatataacaaataccacatgaaaagaaattgaataaaaaaaatttggtatatatttctagacatagaaattgattaagttattgtaacaagagattgacaatcatcatttagtatcttaacaccttctcatttaatattatcattttaaataattgtttaattaggttacgtatgcatgtagttttacaaatcgttttatgcaacggtcagtataaaagttggaagag

SEQ ID NO: 10306 - DNA, 560 bp, Cannabis sativa
aaaactctgttcaagttaccacaaatgacataacatgcgatttacacccaggggaagttgatcacagtgaagccccaaaccgagtattacttggaaaactcttctgtgtcacaagattgggacgtaaggctatccaagggtcactaaacaacgcctggagctcattggaaggatggagttggaaagaaagagaggatggactcttacaatttacgtttcagactagttgggatgctgataatgttcttcttcgacgcccctggctggtctgtggttatctgctagttctcatgccatggccgtcatggctcacccctgcagaggttgtctttgaccaaacaccattatgggttaggctcaaaagcattcccccattttattggaataagacaaacctacaagaactagcgggtaaggtttctgcatcttatgaactaccacgacatatagagaaaaactttgaaagagggtctttcggaatgggtactctgagattcagagccattgtcgacattgacaaacctctgttttctgggttctacctaaggcgtaaaggtatt

SEQ ID NO: 10307 - DNA, 1129 bp, Cannabis sativa
atgggagggccacaactcttctcactaacaagtaatttaaaagagttggcatatacatggaaaatttattaattttagttaaattgcagtataaatacttaatattttagattttatatacttaaatactttatttatttttagagacaaaaatacttaattttacaattctcttccaccgttactacctccgttaactcataaatatgaacacgtagagggtccaaatacattacatttatttattattttaaaatttaatattcttaatatcaaaaactaaattctacttgttttgaaaaaaaaaataagagagatgcaataccatagttgagtaccaatgcaatatatggaaacatgattatcgaattgaagtgccaatatcaatgtgaaaattattatgggaactagtttttttttttctaaaaacaagtagcattaacttctgatattaagaatattaagttttaaaataaaaaaataaatgtaatgcatatgaaccctccatgtgtctatatttatgagttaacagaagtgatagtaacagatataaaagaattataacattagatatttttgtcttcaaaaataaagataaagtatttaagtgtataaaatctaaaatattaggtatttataccacaatttaccctttaatttttcataaggaaatcttataacaatacttatttttttgttatttttatatttttattgttacacatttttttttatatatttttactgtataaggttcttaaaaatattgtgttaaaattttaaaattacaaaaataatgtgtttcaataaaataaaaaaataattaaaaaaaaaaactctaaaacaacttaacaaaccacataaaaaataacggtaaaataacaaaaaataactacaagcaaccaaaaataacaaaataatgacccaattgcaatatgcaaaacaaaatcaactcatcaatatacttttgtattatgaaatttttttacttagttttaacaacttgatttatttttttatactacattatttttcttttcatagaatttgttgttacaacttcatactttcaacttttctttttctattttcttttttgagttactgacagttaaaatgataattaatt

SEQ ID NO: 10308 - DNA, 529 bp, Cannabis sativa
atatttttttttttttttttgagattttgtttattttatcatttttaaaaattaaactttactaactttatcctaaatattcttttttatttattattattgtttcgtatataatttggggaaatttatggtgcaagagagtgcaccatcggactactcaatctcactagtaaataaatagaatattattagatttcacctaaaactttttttttttttttttggaagaaagggatgccttagaggaaaagaaaagaaactaaattgcaggggtcatcgccaatccaaattgctgcttcatctaaccccaccgcctaattagccaaatgatgagccagggcatttgcagaacgactaatgtgagagacccgagcgttggggataagagataaagcttccttaatttagtaaataatgtcacctaaaactcattgtatatatttatgtaggaatacattattcaaatttatgtttggattacatattttaagagtgttttaatatatgtcctgtctattgacatggggtg

SEQ ID NO: 10309 - DNA, 671 bp, Cannabis sativa
tgtcaattgattaaggaatgtacgtgccaaatgaactaccttagctgctgaaagacgcttccccctccagaccaacttctggacatgccagaatgcccacaccaccatggcagcttcttcctacaaaccagtagctgcagaattcttccagccatttataattttaacttatgtcattcataatttattataatttcaattaataagattactactacataatattattattaaagttgctcaaaattatttaattacagatattgctatcaaaatgttaattttatatcattttttatttttttgattggtaaaatagtaattgtagaaattaattttttattttatttttatgttcatatataatatatagagtttgcttataattctaatcacggagccattagattggcatactataagatctaagggctcatcatttcatatctcattaaattaataatactttataataatattaatttataaaatgaaggacaaaaagaattataatcgttggtttccaattttaatttgtactttgaatttaattttatcagcttttattatttttcatggagtagaagtaattaagcttcacctactccacacgcagtctcttcccactttcatttttttttctctcagcttcatctacacgaaaaggtgaa

SEQ ID NO: 10310 - DNA, 520 bp, Cannabis sativa
aaggggtggtgtctataactctgttgtgggaatttgctgccatttttgcaggtttttgtgcttccatttagaatcgatctgctgaagtgaatatgcaaataaaattttaaaaacaaatggtgttttttcttgtgtgcatttagatgtcttcagctttttgtatgtatagttttagtacttacccttttggtctcttctaaatttgatgctgataatgattacattcgctctgttaagttcatgattttgacttgcattcaatttgttgtagtgacagaaatattgaagatgcatcatcttttctccttgtatagttaccaagtaggcaaagttttattaattctacagtaaccttctctggttttaatcaattcttttgttctcctcttattgtctttttgctgaattttctatttgcataattctattaattaagttaatcttaccaccatgacagaaacttgtatataaaagccacattgacattgcatatccgtaacttgttcaatgtattgaattg

SEQ ID NO: 10311 - DNA, 559 bp, Cannabis sativa
aaatattaaaatataattataaagcaagaataaaacttatatgtgaaaatttacaatagcactctttgaggttgaatccatgcacaaacgagctaacaacatactgtaaactccaaaaagatggtacaaaatagccaaaaaaaaatagcacaaactaaccaaaaatggcacaagctagctaataaacgtacacttaaactatccccaaataaattcaagctaaataaaataaaatatttttaaagtaccaaaattaatacaaaaatctttattaatacaaataaaactaaatgccactcatataagaatttaatagattttaaaaacctaataaaatatataaggtaagaataatttaaaataaaataaaacctataaaaaataattataaaacacgtttagctattaaagatatatataaatatagctaaaagataaaaaaatattataataataataaaattcaaaatccacccaacaaatgctcatcaatgacaattaaaattactaacgctaatcacactacaacctacgcacctcaactcctaatgaaggattg

SEQ ID NO: 10312 - DNA, 1269 bp, Cannabis sativa
attagttgtcactttctaaatgtagaaattaaaaatacttggctataattcttttgtataactgatttaagttatacatacttttatttttttaaaagaaaaaaaccaaatataatttttattcatatgaacaaaattttactatgggttaaagtttgaaagctactaattacccacacacaaaaaaaggtttaaaaaaatttccctaaaaaaaaaaaggtttaaaatttaccccactctatttttaatattcgaataattacaatctcattttttatttgatgttgtatgttataattatagaataaaaattattttgaatttacacatttttaacatatgaaattatttaaatttttcaaaaatttaccaaatatcattttgatattcatggtttttaattaaaaaatagctataattaaaaagagataattacataaaataatattttttgtaaaaaatttacatttttacgtttcaagattttttttttttttttacatttttacagtgctctataaaaacacataaaaacaacaagaaaactacataaaagtaataacaaaataacatctaaataacaacaaaaaataatatacacataacaaaaaattaaaaaaaaaaagtacaacataaaaatacatcaaaaaattgtatttgttgtaaatagaatcataaaaatcgtaaaaaaatatttaaaattctgtatactcgtatttttataatttttttattgttttggtatttttttttttaaattatccctattaaaaataccaaaaggtgcattttagaatttttcaaaaatatgtataatttaaataatttttttaaatagatataatgcctataagtttttgaggaaatttatagcacacaatcctaaagagatgttttgatagactcgttatctaatttgacattttgaataattttttaatccaatttttcatgatcgtatacgttgttatttaggctcgcttgtaaatttcagaaaaattcaaatagtttacaatgtcaaaaataaagtttcaaacaattgtttaccacgcacataagaaaaaataatcacacatacaacaaaatatttaaacctaatttttagcattattttctaaaaatttacatgtaatcttagatcactacaacatacacaatcataacaatagtagactgctatcatatatactgaaacagataaatagtctgtcgaaaagtccctttttagagtgtcatatagacttacctaaccctaagttttatttaaga

SEQ ID NO: 10313 - DNA, 738 bp, Cannabis sativa
aatatcactattcaaatagattattttgcctccaaaataggaaaaacatctcttttatcttctattttgaatcataaaaaaggacaactaatatccctaaaaagtaggtagataatttgaggaaaaatccccatcttacaggcttagaccttgtaattcatagctatgactctcttgaatattaattggttagaactgaatgttacagatccaaaacaactgagatttaatgagataaataaactaagtgtcctgtgagagacaaatgaggcgtgagtgagagagtgagaaatcaatagagcttgagggacttagaatttaggtcccttttctaagtgcctaagaccctttatatagttaggccttacaaaatatcactattcaaatagattatcatgccttcaaaatagagaaaataactcttttatcttctatttagaatcataaaaatagataattaatatccctaaaaaataggtagataatttgagagaaaatcctcatctttttgggttgctagagttgtcccgtagctgaaatcaagctgtgaattatccaaaaagattgttgtcgaccccaccattcaatcagactcccctttgattctctttgtttgtgctggtctgccttcccttttcttaggacctggctgacacataggcttcattggtcggccagggtctgtatggtttggccagaccctcttggctgggccttttctgccaattgtttttttcc

SEQ ID NO: 10314 - DNA, 1433 bp, Cannabis sativa
ttggagatacttggagaaaaatttgagcaattacaagagcccactgctatccaaagtagtgaagaaaaggatgaggaagcaagcctttcaagtttttcaacatttgtcgctactcataatgttgtagcattttcacagcaaaactgtctagtagttttatttgaggttgaattgtgttagagactattttaaagcttgatttcagttgtttatagcttgttttggaagtaatagaagctgtagcggatttgaggatgtttgagttttgagaactcaagctttgctcatccatggtgaatttcattgcatgatgttctagatgctttgaagttgtgcgttatgtttagattaactcaaattgctattctggaaagtttggtagcttttggttaggttgggagctagcttttggggcctaaaagttgtgaatttttgagcccttgctgtctaggaaaaaacttccacgatgggagagcttccgggatgggagagcttgggagagctttcaggatgggagagcttccatgatgggagagcttccatgacaggagaacttttgggatgggagagcttccatgatgggagagcactcaagatgcgagagcttctgggatgcgagatcttccatgataggagagctttcgggatgggggagcttccaggatggaagagcttccatgatgggagagcttccatgataggagagcttccatgatgagagagcttctggggatgggagagtttttgtattttgtccataacttttcactcaaatgtccattttggacgttctatatactgttttagagctttgggtaagctctaccatatggaatataagttagagccgaactatgtatttttcaagagtgtttttactatatatttcggtagaatgaccctagagtctattcatgcattaaaaaagtgttctagtgtaaacacttatcagttttacattgtgacatagggcatccgttcagtacgtgaatttttatttaggttgactgacacacttgaatcaagaaatgaagtaagactagcatagaatgtatatgtatttgtgtatgtgtgttatatgcatgttgtttatatgattcatatgctatcaacactattacagtagtggtattgagtgcattgatacaacatatgatgtttaagggtacaatctggtgttaccaacactagtacagttaggtacgtggtgcatgtggtataacactcagtggtacttgggatacaattcaaaccctacccacactagtacagtagtgctacgtagtgcatttggtatagaggtcgtacctttattaagaacattcttaatcatctgttaagccttgtgtataggtgtgtgagcgcctagatacaagttggggatatattgtatgctatatgcttttcttactgagtttgtcgactcacagtta

SEQ ID NO: 10315 - DNA, 642 bp, Cannabis sativa
ccgaaagtaattaatgtttaaataattattacacgtgtgaaataagttgtttgcattatattctttatgtacggtaaattttttcaaattttatcaaaagtgtaattataactattttgatactaaaaatatgaaagatacaacaatttatatacatatcatgtagattaaaggagaagtagaaaccctagaacgcaccaaagaggaagaatccgtgaaattcaaaacccataatgttcatttcgacttcaacatcctaataacaataaaagaatcaatggtggatgtttcctcaagctgcatggagttggcattaaaggtatatatgctttttttttttttcaatctttttcggctaataataataatacgatcgaactttgaattcaaagtaaaaccttaaagaatcattatgcaggtttctctcaatggttctttaaggttttactaatattcccaagtcgaaaaaggaaataaaataaactttgatttgttttgtagtataattagatatttcatttgtaggagaggagagaagcttataataaggtgggtgaagagaataaaaaaacaaaggaaagaatgaaatcaaatagtaaaatgctttggagggctttcgagtttgcatttcgagtgtataca

SEQ ID NO: 10316 - DNA, 678 bp, Cannabis sativa
caaccaagtcctactgggtaagattattagccgccacagatttggaaatgcatccattcaaggctctcttaaactctcctggaatgctattaaaggatggaaaaggaaagaaattggagatggcatcatccaattcacatttgcgcgcagagaggatgcattaaatgttcttgcacgaagaccctggtttatctgtggagctttaatagtgatcatgccttggcctgcatggttatccccagccgaagtcagatttgataaaacacattggggtacacattaaaagcattccccccttctactggaatctctctaatcttaaagaacttgcttccaaggcatcccctgtgtttgaactccctcccggcgttgaagacacaattggtatgagtacccttcgattccgagccacaatcgacattaacaaactaatgtttttgggattcttccttcggcgacaacgactcaaagacctgtggttacagtataaatatgaacgcctaccaaagctgtattttaagtgtggtgctctaacacatgaccagagtgtgtgcttcaaatctccaacaatcattaaggacgccaatgggaatttctacccaatgtttagagtatggcttaaaagtgatgcttcggagaaatccaccttcacaacccctcttgataaatggttccaag

SEQ ID NO: 10317 - DNA, 612 bp, Cannabis sativa
aaaaaaaaaaaaaaaaacttgaggcgcatatataaattagtattttttaagtaaatatatttcattggtataaacttaacattggaatttcatttattacaacaaaacaaatacaagatgcttcaatggaagtacactccattcatagattgccagtgtggatgcaacactcgattttctgatttcttgaacaatttttccttatcactcagaacgaattggttagccatatcactaagcactctatccatgaaattaaaattggggcacaaatgattagaggagaacagtaagtggcataaatagggagtttgggaagagagaggttaataaagaactggtttctttgtaagcacccacgattggggagaagaaagattataaccgccacagaaaaaaagtgggcagatgctcaatgaaaaaataacaggaagtgataaattttttttaactaatttcacaactttcataccaataacctcattacaatcttcaatacataattatacaataaacttgggggaactcattcgacatcaaaatcctaaaggttcccaaaatgaagtctctcctaataattaaaaatttccaacacacaaaaacaacttcaac

SEQ ID NO: 10318 - DNA, 890 bp, Cannabis sativa
  modified_base (163)..(173): a, c, t, g, unknown or other
tttcatgcgcccatcatcactactgtacttggattatatcaaggaaaatttacatggtattttaatttttgttatttttttacaaaaatattgtatatttttgacttttttattatgttttttttataagttttatttggcagtatactgtgttaagttttcnnnnnnnnnnnactggtgttttactgttattttgagttgttcagctttgtattttattggtgtttataaaaacatagtatttttaaaaatattttcgcgtgataatatttttataaaagttaactcaaatttcagtatttttataaattttccttatattaaccacacgtgttaagaggcaagaaatgaaagaattcgattcgatctgatcacgaaagcccatttggaaaaatctccaccatccgggagattgggctaagatttggggttaaatgttgcacctagtttagcgcctagggtattgaaagagtcattacagtttaattgaggattgatcattttaggcttctagtctcagattaggatcaactcgagcctaaatatactcacgaaggaggtgtcagggagcccttctagttctgggatgtatacacagtcccagacaacattggacgaaggtaccgcaagggccttgcttcttgactcgagaaacttcttgggagaaaatcccaactgacaaaagataatcttgaatcaactgacaatttggttataacaacgagaaaagggggaaacactgtagcatgtctaattcgtaccaatatatcaaaaccaataccttataaagtagtataaacataagaatctgcacacccactactctgatacagacttttcccatgcatttgattggtgcgtggtttattttatgcaccaatcacatcatt

SEQ ID NO: 10319 - DNA, 510 bp, Cannabis sativa
gtcacgagtttgttttagcattttctgaaattctatctcgttgatgctttccggacactttgatttatatttgcgagcagaagtggaagctatagcaagtgaagatgacgatccaatggcaaattggaggggctggcttggattgagatcagccataattgttgcaaaggcctgagagataggaacagtgtgaccagtggcctcagaagtcaccgtggttgcaacaacacgagcaagcgatatagaagcagaagctgctgcttgttcaggaatagacgcagcattgtgcataaggttatttgatcccgaggtgatcggaaatggcacagggggtgctgaccgaatgggagggctacccaaatccaccacatgctcattgcttggccatgtcgagaaggtcaagtgagaattagcaccactatgagcacggttaacaggactattttgtggagtttgtgtcatgtagcacccaatcggggtagtgcaaggttggtggagatgttggacccc

SEQ ID NO: 10320 - DNA, 620 bp, Cannabis sativa
atatatatatatatattgatacttcgttcatatctatatatatgacaaagataagaaaagagaaagtaaaataaatatagaaaaaataattgttccttaaatattccgaagtttctcaaagtttatcatttatcgtggcgccaccaaagatccaccttgttgtaggtcagtcgcttcactattcatgatttcttacaaaaaaaaacattgttattatgcttataataaacgaaaatatatatatacatgaagaattagaacaatgagaaagtgataaagaaaataatagagtcaaactaataataatgaaaaaaaatctaataatatagattatatattattatacagcttaaatcacaaatatttaaagacaataaaatattactagatacttacaccaagcaaatacacatatatatagagtaataaaaatagagtagtaagtgaaatgccatatgaatactaaagagtaggtttattgtaattattgaattgtgaagtaacgtataaaaactgaaaaaataaataatatatatatttaaaatgtatatattcattatttacatttacaatgcaaaagggtatattcattgactatttactaaaaaatagaattaatc

SEQ ID NO: 10321 - DNA, 507 bp, Cannabis sativa
ctcaggttcggctgtagcatgtgtgtttggcagttgaaaatctaggagactttctaatttggggctatcttaggagtataatataccataagtattaaaaaacctatagtacttctgttttgtgatgacatttgttggtagaacagaaggttttaatcttttttttttttgaaagcgcagaaggttttaatcttagttaccctatgtttgtataatagagatccctgcataaacctttttgtggccacccgtcagtatttttcccttttctcctaagtcaaaatgtctactaaatattaagggcatgtagttttttgttctttttgtcttcaacactgtaatccaaaataacttaaaaatatgataagtatgcggtttgaatatgatttagagattttttctgtcaagttcaaacaagaattatgattagttgataaaagtttactctgatgagatgaggaaactgactgttcagatgattaattcagatgatttggaatttggttc

SEQ ID NO: 10322 - DNA, 1294 bp, Cannabis sativa
ataattacaaatacatgaatgcattctttgctgagtttaggaatatatacacatattgactatatcgactatatttatcaggcctagttatctcaattggtttgcttactatatagtataggcaatcatcttttctttttctttttcactatgaatgtttgctatcattgaagaatctcaatatgtattttgagactatattatcgctgggagatgttctttggagtcttgagaattcagatccatgaatggcaatcaaaaaccagaattctcaggtgttctgaatggaaagaagcttaagtcccaagagagtagctcaaatggtcaggcatggagtttgctcccagaacgtcttaggttcgagtctcttgtggtacctacatagaaattgctggttttatgatttccaaatactgtagggttaggcgggtatcctagttttaagaaaaaaaaaacaagctcaagtttttgtcagtgattcaggctattggattttagctccagccattgttttgtgtgtttgagcttagttggtaaaatatagtgttgttactgggcagttggcacttaccaaccttcaactttagtttcccaatagacaagacagcaatggaaactttcatagttggcaaacgaagtcctgtgaaagttttactgagcttccttatgctgagaataagaatggattaaaggcctaaactagaatttatgacattctttatttgtgtaatttaggtaagaaaagagggtataattcgcattttagtttcttagtgaaaagtctttgcaaggcttccagcggcatgtatgtctttgctgaactgcattgtaagccttatattctttaatatcttggctcttgtgtgtatgtttagaatttagatccttactcattcatagtgaattttacaatgtcatctttagatcatgtgaagatcttcatataaagttcatgtgttgaatgagctttccctctcattttttttaatcaccattgatagttatgactggacttgactttgtgatttaaggcttttgcaatcttctttatcaaatttattgaattttaagcttttctgaaacatgcatttgtgcattgcaggattggagttgtttcaggcaaagcaatatttggacctcctcttgcagagtactggaaaaagaaaattgaggaagaagcagccgcgaaagaaaatgatggaagctcaacttgaacagttatgaatgaatttcttcaactagacaccattgaatcatcattttattcatttttttccaaccccaaaatgcatta

SEQ ID NO: 10323 - DNA, 612 bp, Cannabis sativa
aaatatatataaaaaaaaaatcacacttttgctattcataaaaaaaccatacattaattcatttttatttagtttatttttattcaagtaaaatttttaatagattgacattttccaacgagaaatgtgattaaacatgcttacattagtcaaaaaataacaatttaaactaaagttaaatcactggcaatgtaagtttatttttcatattttttcaaattacctctcttatatcaaaatgaagacccactcactctgtcgtgggtcggtggtgtgattggtgaattttgaggtggtttgtggtggtcggttgggtgagaaagaaaatgttagagcgagaaggaaagagcgcaagggaaagagagtttccattttagactttttaaaatgagaggaataatttgggagtatactgaaaagttggcacacaaaatatatactaattaactttaatttaggtagttaatttaaatctaatagaggcatctttaatcaaatttccctctcctaacacattgttaaaaatgcacaatactaattaggatgcataatataagcagtcctgaatgagaaacacctaagaacatgcacttattatttgcaaaaataaga

SEQ ID NO: 10324 - DNA, 728 bp, Cannabis sativa
ttaaaattacatttacatttggtttaattgcaccaatttatttttttaaaacaaattatacaaattttttgctgggcatttttcagtgccagcaaaaggtaaatttttttttttaaaaaaaaaggtattgtcagtgcagtttgatgtgccgacaatactattctgtgtatatcctcattcgtaggaaaattttgccagtgttccagcatagcattctcacgagtaatccagcttcacatgaaagttttgtcgacacagtatgttgctggaaaaactttctcgatgaggctcaactggcaagtaaatgtcgacgacacatatttcattgttgagtttatacgctggtgaaaacaacctatgccgacgaaggtttattttgcaacgaaaaactactttccttgacaaataagcgtcgacaactttcaccgatagagttcctcgctggtgaaagtttatcgacacatttagtagatttttgccagtgcaattcctgatacaaaattgtacaggcaaaagtctattttctcataatgtggatcagttacttttgcatgtaaatcaatatttgattagtatatgtatgaattttaaatttttcaatctaatcaaattcacaaaaaatatttatactttttgaattagattagattggattgagtttttctataaacacccttacatacaacctatcaaatggttgcttctgtttctctatagccattggaaat

SEQ ID NO: 10325 - DNA, 946 bp, Cannabis sativa
  modified_base (248)..(268): a, c, t, g, unknown or other
atactcagctgacaaacataaatttcaccaacgagagttaaacagcatgttatattatgaggattgttattaggcaccagtagtgtctagcacttattcgacatgtcgtgttgtgattggttagcgatactcactaaaagttattatattaaattacatgggacccgatacttagtttgacccatagcgatattgacacataagaggaggttagacaccctggtgtcctttagcatttctcttatatnnnnnnnnnnnnnnnnnnnnnagatgttatgaaatattatttatgtatatccaaattacttaatatttagttgtattttcttttattatattaaactcgagtctaattgtctctcaattgtccaagctgttcgaagtaacatcaccatggtttcgcctcttagaggaatggtgatggactatcgaaagtttttatctattttaaacaatgtttctttatttttcattaaacgatctgttaatataattgcgcacagctttactagagcatcatattttttttccagattgagtttttaacttttcaataagaagatattcctactgaattacaatattatctttttgctgatttagcaaattaataaaatttcaatttgtattaaaaaaaaaaaaaaagtttcactttctctcttcgtcatttttttcatatatattttatattatccaatattatgttataagaacttaaaatatatattgttacggtttatagtcaacataaattcatcccttttctttaaaaaaataaataaatatatatacgaataaatatttttgtttacttcgtctctgtgtttttacatatatcatcttcctcccaatgaaaaactcactgttcacactcaaatcaccacccaatccattggacatgcatattacaaatttctaaattcccaatacataattcccaacaatc

SEQ ID NO: 10326 - DNA, 771 bp, Cannabis sativa
gctgggtgaattaagcaaagtttcgttgttgggcgatgcctctggtggttgggatagagatttagttcaagccagttttagtaccaagaagcgacatccattctttctattttctgcctttcttcagatgtcccaaacaagttgttttggaactttgagaagtcgggttggtattctattaagagcggctattggcttgctctctgcaacttgggtctgggtcgtgcttctccttctagggattttttggttggtggaaaaagttttgaactcttaatctacctcctaagatgacgctttatgcatggcaagtgtctaaccattgggttcccacaaagatcaatttggtgcgccatggacttttatccgatagtttgtgtcctttatgtgatttgagagaagaaacaacttatcatgtgctttggggatgttctcttctattatcttgcaggaaaatttgtaagtttactatataggagatcctctagtttattgtaaggatttttttagttttattcatagatttattgacccactttcgaaggagacaattgagttggtaaacgtttttttatggagaatttggtatgagcgaaacaaaaaggtctacaataacactgagttgtcaccgtttcttgttgttacttgggcccatgatttcttagggaattaatttccaaaccataagcggtcgccattcatgtcgtcgtcttcttcgccctcgagggctatcttttttcttggccggaggtaagctctcactcaatttcg

SEQ ID NO: 10327 - DNA, 549 bp, Cannabis sativa
cagatctttgattgtcataagatattcattccttcctacaattgagaatgcaaatgagaatttttttaatttgacaacttaaaaagacaaaacaagaataaatattattttggaatctgtgttttgtaaaaattaccgatcagatcctttatttgttaaatgacaattcagaccttaaatttttcaaaatagtacaaaataaaataatacccttagctcaatttttttcaaaatggaacacaataataacctgacccataagtattatgaatagattgattaagaaagtaattgacaaaaattgcgggtactattttgtaacattttgacaaacacacagtttaatttatcatctaacaaaacaaaggttctgatcggtaacttttgagtccaaaatggtatttagttaaaagagaaagattgttacttgtttaaaatttaccagcactaacttcatagtgactactcaaagctctcattgaggtaatgcaagggatatcatctttttgtagatgaaaaccaggggaagtttgataaggagtatttgta

SEQ ID NO: 10328 - DNA, 647 bp, Cannabis sativa
atttggatctgtaggaagatcaaggaattggggaggacacggttttgtgccaaaaagaaatccatcatactcgtgggctcgaacagctggtatcacctgggatcgctagtatgggtagttttcctagttgaggttgattgttatcggagcaagtaacagtgtgactggggcttgaaccataggcacgacatgagctaaaatttcaacaggcggagcttaaggaggaagtggagtatcgacaccctgaccagcaacgtgttctcagcgagcttgactaacagaggaattggattgggacccagtagatgccatgagctttgataccaagacaaaaaataaaggaaataaaaaccaaaaagaaatgctctgtattttctctgtattgaatattttggtacaatacaattggtacagtacatgccttttatatacaaggattaatgaaaaaatctctaacacaaaaatattccttattattgagattgtgacaagtatatcagggttttcccaaaaggcgaggaaagaattgttctagaaaaatctaatggacaacaaggcacaaagaaaatattatgagtatcaatattttattttttaaacaagtttaaaatagaaacaaaaacttgcaggaaggccgttgttgagga

SEQ ID NO: 10329 - DNA, 1559 bp, Cannabis sativa
agataaattttcaacctaaaaaattagtggtaatagtctccaaagttatgtttcttcaaatgcatattttcaacctcttttttctttctagtatgtaaataattgttaagcaaaacaaaaaaaaatgtgtaaattatttatttattttttataatttttaattaattaattaatttttatttatattttttaaaattaaaaatgtgatttggaccaataatttatcaacacatggtatttttattagtaaacaaatttgttataaaagaggactaacaaacttacgaaaatagtgtccttgggactattactgatactttttgaggttgagaacttatctgtatcaaatataagtttttggggaattatcctgtaatttttcctaactaaaacaacaacactcccaagaaataaactagaacaaaatatcaagaaaacaaatacacaaaataactaagtgtttcaaattcaacacacacttaatttcagccaactaaaatataattaaacattttttatttttcaataatttttattatatataattaatataaataacttttttaatacatataatataattggattggatcggtttttaattgaattttgagattaacatccaataactgatccagtcaaattataatccaacttttaatactcaatccaattgtaattggatatccaatttttgtaatcggattagattaaatcgattggctcaattggattggatgttgcccactcctagtttcttatttctaataaatcgttcgtatatataaatatgctaattaatattacgtgcaatgcgcatatacttagttatattcatagtttttattttggttatatacatattttcagttgtataattaattttttctagatattattcaataaacaacaacattttttttatttaaaaatatttaatttaagtgatatttattaaaaaaaatacacaataatatttaaaatttgttgttaattataattttagtttaatcataatatttttaatttataatactttttatttttttagaaataacatatacgttttttattttttttagaaaaaaatatattaatagaaagatatttttttgtaattgcaaaaagtaacggcattacaacaatgattctttaagaaataaataatttttctattttattgaagacaataatggaaagatatttttttagatttgtagattgggtataaaaaataataatataaagatatcttttagatatgtgtaatgagtttatattttaaatgtagtgtaagaaaatgctcgcccgaaaatgctcacctaaagtctttttatattatatagtcacatttaatatgtgtatatttatatatataagatataagataaaagataagagagatatatgtagtaatttaaatttgaattgaaatattttttattatacaatcagatttaatataacaaagatatatatatatatatatatttatataatataatcatataaatgttgaagtcaccaccaacttttaaaaaaatctaggcttaaacact

SEQ ID NO: 10330 - DNA, 538 bp, Cannabis sativa
caagcccgtcttcatcttggtgcttctttgattagagaaacgaaatccggctaaataacgtaaacgacagcgcctttaggaggcatcctaattttttttttactgcaattttttagaaataattacaattacaattttttatttattttttagtaaactttaattttgtttttaaaatttattttagaaaaatatgtagaaccgtggaaatcatgaaaactagtcaatttgaaaaaatttagtagtgcctaggcatgaaatttcaatgtctaggcatgcaggtgaaaaaaaaataagcagcaaataagaggatgagaagaccacacacatctactcatcctcagaagggacacgggccgcaacataggaatcctatgccgcagcacctgtgtccaacaggaaaagaaggctagcaaaaattcttcacacgggccgcgacatgaggatgtccatgccgtgacatctgggcttcatcgaatagaaacataagaaacaaatggaggcgggccgcgaaatggaaattgagagttgtggcttt

SEQ ID NO: 10331 - DNA, 697 bp, Cannabis sativa
caaacatttgttttgaaggtattgtagttgttgagaaagttgatttgcttaaggagattgattatgggatggtaaattctctcttgagtacttttagtatttcaatgagactaacaaaatagaaagctgagaattgtgaagtaatcatttcaaagaacaaaatgcggtttcatacttgggcaagcaaacatttgtcgtttgttagtcgggttcaactcattcattcagttcttggtttgaggaactattggatgagtatcttcatcttgcctcaaaatgttacgaaggaggtagaaaaactttgtggatggtttttatgaggtcacaatgaaactcttagcaagctgcatcttgcttttgagaaaaaaattgcctttcaaaagtgaatggtgaaatcatcttcagagatagctccaactccaagtaaaatagaaccattttggcaaaatttatttgggctatttcaaaaaaaaataagatctcctttgggtgaaatgggttcataacttgtatttaaaagacaaaatttgcacaagctttacaatatggaagattttaaacatgaaagatgttttagctgcttgatatatggcgaaattcaacggcttgaaagttgtacaatagtactcttagacaagagaaggtgaattttatgaaggcagtatggtgtcgccttagcttgccaaaatatagattt

SEQ ID NO: 10332 - DNA, 590 bp, Cannabis sativa
atcctacttgaaagagtcatgaccagaaaaaggtcgtcggaatctacaaacatatgaattctgatagtgtagacataagctttaagaattttgaacacagtgtttccaacctgtttgatctatttttatggattttagagtctattttaaagggtgtttttacttattttatttttattattattcaggtttacgtttattttattcttgtttcagattttaatggtaaaatatatcatatgagttgaaaaaagaaaaattaaatggattttatggaattagcatgaattttggagttgtaagatacaataggcaaaaaattctaagttgtggatgctcaacacgctccatttgtaatcaaaaatcaactatggagtttcaagcccattttaactatgatccgttcactttcaggacaaatattgtgaataaaaattctagatcttttattatgctttccaaaacatcttgaattatccaatcccattatatattgagagacttatggctaaaatatcatcggtcattgtagcagaattctaagattgcaactatatttgaaaaactcagtggaagccacagcattgaag

SEQ ID NO: 10333 - DNA, 589 bp, Cannabis sativa
gaggaagatctatccaatattgatgataggtggtgtcttgttggtcgcttccttacgaaacgacctattgacttccaagcaatgcagaataagatggcagtgttatggcagccagggctaggtgtctacgttaaagaattggagaataatctatacctgtttcaattttatcacgaggttgatatcaaaagagttttggaagggagtctgtggacttttgatcgtgttccactaatttttgagcgccttaaacaaggagacaacccgcgatcagttgtcctaaataaattggattttttgatcaaaatacacaatctgaatgcaggattcatgtccgaaagagtagtttgtgatcttggaaactacataggcacatttgtgaaatcggacccaaacaatttcattggtgtttggagagattacttaagggtccgagtgaagattaacatcgacaggcctttaaaaaggaagaagaaactcgaaagaattggaggtatgatctgttatgcctatttcaaatatgaggatctttccacattttgcttcatatgtggtgttcttggtcattctgaaaaactttgtgacaggt

SEQ ID NO: 10334 - DNA, 614 bp, Cannabis sativa
taaatactacaatgaggcagtccatagtatcaaaagaaaagagttcaccgacgtggttctggatgaaattatgtaagtaacagcgtatacaatgaagtttgatcaacttaccaagctagcttcgagtattgtgcccacagactttagtaagaaagagaaatacttggcgggtctgaataccaagattagacatgatatggttatcactaccaatgaccccactacttagtcaagatggtgggaccaccacttttcctactcctggttatggtagggatggtggtgattccaatattgatcagaagaggaaaaattttccaacatcaggtggctcgagtcagagtaagcgattccgtgggaaccaaggtagaggtggatgccagactaacccatgtcctaagtgtccccgtttcaagaagcatcatcctgaggaatgcaaccgggagacatgcttacagtggattggtggggaacttcaagaaagactgccctcaattgagaaaggaagaacaaaaataagaggcaaaacccattctagctcaagtgttttccaatacgcaagcagatgctgcagctagtcattttgttgtaacaggtcagcttcctgtcaatga

SEQ ID NO: 10335 - DNA, 550 bp, Cannabis sativa
tacttcatggaattcaaaatacataaaaaaatttacttttgtgttgagatggtgaacttctacgaattaagacttttagtttgaacctgaatctgacctagtttggattaggttctgacttggttgtgtctgactaggttttgaccaagtttgaaataggcgttttttacccctagtcagaacatggttcgaatcaggtcaaaaacaggttcaaataaaagttcgtcgtctcagcttaaaattaaatttttttgatgagcttcatgatttgaaagaatgagaggaattgtgtatttcaaattcgatgaaatatttccatttcaaaagaagaaaaagagaatccacaaaagcattttcatgtttttggtgttcaagctatattttagaagtagttatgtcgttttaggcaggtcagaggatagttttgcgggacacagaactcacaaactaagggatatcataggcatagttttatgagttttacttctaatgctcttatactataaacaccaattaaattagtgacgctaacctttttctcttttttctt

SEQ ID NO: 10336 - DNA, 612 bp, Cannabis sativa
tataaagctggatttatatttggcaccttaagtaattgaattttgtggctgagctgaaagaactgaattctaatagatttttcattagtacttcaaaataattatggattctgatgaaaatcacctggctgttgatattttaatattctttgtagtttacagtatttgcttctagtaaattcgattgtgcctcaatttatggatttttttcttttaaaaaaaaatcttttgtgcaagttcctgcttgaattcttcttttaccttcaccattttgaatgggagttatccccatatatggacgtggttggcttgatcattctaactctgcttctgtgttgaaagtctctttccttaccatgaatgttaaccctgtaatttgattgaaattacctcttggactattctgaccattgaaagttcttagttctcatacttttctatgccttaatgcaaagcaggtgaggtcatcgggttatcatgaatatattcatttggggcatccagaaattgttctttccattgaggtataccataacaaaaaaagatggataaaggtatatcattttttcaacccacgacctcagtcaaaatgaattctggaaaatcaataca

SEQ ID NO: 10337 - DNA, 1187 bp, Cannabis sativa
taggagaatcaacatccacgagtatagagggattcaatgcttggagttggcccgacatttccaatggagcgcatcttcccttaaggacatattttgcgaatctgatggccaagatcaggatagctcctttccaggtaatcccctcatcgtataggctcatggctgggtggtatgtcttttgcaagatgaacaagttggaagtaccttccccggaggagatcctttacttttacagtataaaggctaaccctatgagggcaaacaagaagaagttgggctttttcaggatgggcaagcatccgtactcttacttcctagtcaaccacactgaccgtactcatgattccgagagtactggttcttttctttcgggttccctataaaaaggctgccttctcttcaacttacttcacaaacttcattgtgctcattaggattgctctattccaactaatacctctgtcttataagcttttggccgaatggtacatttttttgtaaaattaacaaatttgaagtaccttctccgaaggagatcttgttcttctacagagttaagcctcaatccatgaggaccaacttcaagaagttggggttttacaagcttgagaagtattcagatgctcactgccccaccagtcacaccaagtgttcccatgacctcaggaaatattggttcttttctactggcttcccaatgaagagagttcctactctcccgctcagcttccaaatcccaggtaagaacctttacacttgctttcttgatctatttctttttcatactcttttttgatttggttcaagtgttgactagacctttatgcttctttgtgtcaattggtagaaccaatgcctgggaccattgagaacgatgagttggccaagaaaatggtccagtacaaggccttcactgaagaccaattgaaagttgaggactaggtgaccacatcactactccgtgagcacaaatttattgcaaatttctagagcattgacaatgtcagcaataggggtcaaagccaagattcaaaggagatcaaggatgcaattgttcgtgacctagccaaaatcctcacgaaggctgcaaaagaggatcatctcctgtaagctagttggatgcttcatcatcgaaatcctctgacagaagttgagaagatctgagagaggtatgttgcagcatacct

SEQ ID NO: 10338 - DNA, 713 bp, Cannabis sativa
ttgtttttgtgtgttctttttttatacagttgtttgtttaatttatgtgtatttttattgtgtatattcgaagtttattctaaacaattttttgttgtatatgtgtgcatttgctatttttatactatttttaagttatttttgagtgatttccataatttgttttgtcaaacaatttttttagttgttttttaattcagatatattttgtatggtgcgtatttttagtttattcttaatatttttttattgtatgtgtgttatttttgtagatgtagatacatatatttagtttatttttctacacatttttttttttaaaaaaaattatttatactcttataattaacttttatttatttatactttatataattgattttttattcatttatacttttataattgactttttattcatttataaaaatagaaatatcataacttcaaaatgaaaagagcataacatcaaatgaaaacaacttttataaaataaaaacaacataaccttaaaatagatacaatttttgtaaaaatttaaaaaaaaaacgtaaaagtaaaaaaaataatgaaaaacacggcatacatgaaatttctctttttttagaatacaatactaagatttttttattttttaatttgacactatgtcaatcagattcatgtacgtaatatacatattgcgtatagatagtgttaattccatttttggc

SEQ ID NO: 10339 - DNA, 513 bp, Cannabis sativa
cactcaataaatgcactcagacatccaccaatagtgaaagctcggcactttgaaagggtgtgagtgaacgtctatcaaaagctgcggagtgcagaggggtttggtcagttgttacttgacacttgggaggtaaaaaaagagtgttgttaataggtttggtcagctcaacactttttataagcggcgccttatgattaattaaaaaaaaaacattactattaattcaccatattcttttaaaattattttcataaatatatttaattatatcaatagtattatgatatcgaggaaagtactaaacatcaataatacattttagccaataaaaaaagagcattactattaggcactactagcatcttctcgacatgtcatattacgattggttagcgatactgcctaaaagctattatattaaactatatggaacccgatacttagtaagaccaatagcaatattgacacataagaaagtgttataggcaacactagttccctttagcatttgtc

SEQ ID NO: 10340 - DNA, 574 bp, Cannabis sativa
catacaagcacactaagaaaccatacaccacccaaagataactccaaatagttaagattccttataataatctttcagttttttgaattaacaaataatatagatataagtggatacacttgcatataatccaaagaaagtaaaatcattttatcatcataacaaaaacattttaaaaccaaataaatgaaaacattcataactgaagtaatagaaaattaccattcaagaatgcattggagatgaaactcatgcttgcagccagtaacctgcatgtaaacattgggcaattaaaggagaaattctataccaagccacaaaagtttcaatataacaaatatagtttacatactgtagaagggtcactgtcacagaaatcttcaaggcatatactgcaagcatcatcacaagcctcctgtactccaccctccacaaaagccgctgctgaagtcaaatgagcctcagacttcacattctcttccattcccggtggaacctttaacatacgatagcatacaacaaaagtaaatttttattcactctgatctcttatcaatttgtatggtcaaacatt

SEQ ID NO: 10341 - DNA, 1049 bp, Cannabis sativa
tacattttccttggatgaagtagaagcaactatattctcaattcctaggaataaatccacggggtcagatagtttcagtagcttcttttttcaggacaattggatcttattggggctaacatatatgatgctattagttctttccttcaaacaggccagcttttgaaggaaatcaacaccacagtcttgacacatatcccaaaaattaagtgtcctaacctggtgagtgattaccgacctattgcatgttgtaatgtactttacaaggcgactaccaagctgatatgtgcaaggatcaaatcagtacttttggatttaattgtccaaaaccaaggaggatttgttcatggaaaattcattggtcataacattatgatctgtcaagacctcatccgacactatggaaggaaaactaaaaaataaaattgtatgtttaagctggatctccaaaaagcatatgataccattgaatgggattttattgaagagatactttatgcttttcagttccctcaaaagttcattgatctaatcatgatttgtgttcaaactcaaagttctcattgacgtttaatggctctttacatgggttttttgaagctaagagtgggttgaggcaaggggatcctatttctccgcttctctttgtcctatgcatggaatatttctctcgtattatgcagaaaattggaaagaggcaaggctttattttccatgagaggtgtggggacttgaagttaaaccatttgagttttgcggatgatgttctactcttttgcaatggagacttcaaaagcatctatcttatgctccaatgaatcagattattctctcaaactttaggtttatttcctaatccctctaaaattgccttctattgcaatgacatgagtgataatgatattcaaagagtacttgatgctttgggcttccaaaaacatggtcttcctttcaagtacttaggaataccaattagtccaaagagaattttagtagctaattgtagtatcttaattgagaaaatggtggctaggataagaacttggagt

SEQ ID NO: 10342 - DNA, 706 bp, Cannabis sativa
acgtatcatacaaatataaattttaaaaaatttcaaacataatttttagatcattaatttatttttaaaattgggagagttatcataattttagtatttcttttgaagatgaataatattcagcgcagctggttagccaaaagccgagaaaaatcattttcttttatgaccctcttataactctcacccaattacataggacaatgtgggactaaagtagtttactaatgatgataaatacgtcctctcctgagtattaataaaaagctataatatattttttatttaaattttttttaattataaccatttaaaagcagtactagttatcagaaaacccctgtctacttcaaaaagataaaaagaaaaaaaatcattcgtagaccaatattctgttaaatttttattctcattttacaataagtttttttttttcttttttctagtaaagataaatttttgtattattgatcttgctgtgaaaatgattaagaagaattcatgtttttgtttagagatcaaatggtaagattttatttttaattgagatagaaaaattataaggcactacaagtttgatcataaatcgtaagtaatataatctagttaggctgataataggctcaaggaatacaatatgaagattaatattgcacaaaatatccccatctcaaatcttataattcattcatttccttgtttattt

SEQ ID NO: 10343 - DNA, 523 bp, Cannabis sativa
ggttgaaaagttaaaaacactagcgaccaatttgaaaatagtgtaatccaagacaaaaatgctttcatttccaattgaaattttaataaacaaaataaatatattgtaatagattggacattcaacaaaaaaaatgctatttctttagtgaaaaaattgcaaattttgaagtattgaatctaaaaaccaaaagagtgttaattacaatttctacatcccaaatcatatgttgattattttttatagcagttttcgttataattacaatattatctctataattttttaaaaattccaaagagtttacagtacaaaaaaacagagtttctaatattcaaatttaccacgcatgttcaaaaaacttcaaacattttttcgacaccttaaattattcgaaaattttcaaaaatttacaaaaatggtattataattataacgaacaatgccataaaaaaaatattctcgtaataagaggttgacaatagcactcctttatattataaattggtacatttctgttcca

SEQ ID NO: 10344 - DNA, 1239 bp, Cannabis sativa
tgaattttaaaaggaattaatttcgtcttttaggtacctataaagggagacttaaaccttcaaggaatattttcatacattaaaagaaccagagcaaaaaattctttcttaattactctcaaatcttcgaagaaaaggtgttggaaagtccattgtgataccctctgagcagatcaaaaagcttcgaacagtgagtaagtcatttttcctttcactttatgcaatattcttttaatatacacattactttcttgatttcttgttgtgaatttatctgttcttgaactgttcttgactgaccatagaatagatgaaattagggcttgtaattgtgactaacattctattagacctcttgattctctaactgcgtatcatttttaacttgaaatcattcattttcacccactcgtgggatcctaaagatttccagatatctttcgaggttttgaacttctagttttggaaattctattcttgaatgaaaatccttctttttgtctttaatctgcttggttggcatattaaatctattttttaactttccattcgtccaactctcattttcttgtctcccattgtaatatctcaaaaatctaattatgaataattataatttattatgtaattatgggttaattaagtagtaatgagttggattctgatcttgctaacttaatttagcataaattataaattttcctataagtgaataattaagcgtaattgtaataactgcatgttagaatatggattagtgaaggcaattagcattgattattgactttttataattatttatgattttattatgttgtgggtcccatttctaaaaatgggcactagatttataatttttcaagatttcattaaactctaagagtattatatacgttaaatatgaattgcgcaatttttataatttttgctcggtgacaacagaaaatacaatggatggctgtttgagtcacatgggtaagtctagaaccattttcttagtaggacaaatatttgagataaataaaataccgaatgtaagcggggttatagttttgaactattttacccctaggcttagattggcttaagtttaagtaacaagggcattttggtaatttaattagtgagatgtggtggctgtttggaagcttgacagctggccatttgattatctcagctgaagtaaatgattttaggcattattcattttgaaagaaattaagaaaatcaagataacct

SEQ ID NO: 10345 - DNA, 643 bp, Cannabis sativa
taataaaaacaacttatctaatgcgatgagataggtaactcgaaattcatatagctggggaagtcattagtctccatgttatgtttaaaactccatagtggaggtacatagttcaagatgaaaagaagttgtgcccaagcatgatgctcaagcgactttgactcataggaccaaacatgttactcaaggccaacgcaaggcaaaatgagagctatatttcctcgttgatatggttgtcatcgccccaataatcaggagcatacatctgtaaagacaaataggggaggtttagaaaatctacatgagtaagaggagtgtgttatgccaaggtgttcacttcaacccaaatataggaagaagatccccgcggcccaaatagatcaggggtgtctcgagaggtatgacaccctaaaatttatttttttaagttatatgggagtccatatttaattacaccaataatagtatgacatcaaagaaagtactaagcagcaatggtaccttttagcaattctcattcacacaccatcatatatatatataagaaaaactaatattataatgtataacatttattattgggagtggacagtaaaagcactcaaacttttattattaaatagagaaaattcgtatttattgt

SEQ ID NO: 10346 - DNA, 552 bp, Cannabis sativa
aaagacaataatgttactgttgaatttaactcttcttgttgttatgtcaaggacaatcccaccaagacccatcttcttcagggtgcaattaaagaagggttatatcaactgcccaactcaaagtctctccccactcagtccatgtctcaatcgagtacaagacaaccttttcaatctttttcttgtactaagaatagctcaaatgtttcccttgtaaacttgtggcatcaaagattaggccacccctccaaaataatcatgaataaagttctgcattcattacatatacctactgctgatcctagtttttgtaatgcatgccaatatgggaagttacatcaattcacttttttgtcctctcaacacagcaccacaaccccgtttgagattattcacacagatctatggggaccctccccctacccgaccaatgaaggtttcaaatactatataatcttcatagatgacttcactaaatacacatggattttcccacttaaagtcaaatctgacaccacccatgtttttcaatactttaacaactatgttgag

SEQ ID NO: 10347 - DNA, 658 bp, Cannabis sativa
cttttactgtgacactttttatggtttgacacaggggaaaaaccacctgattttaggaatcgtatcagaatcctaccacgtgggtcagctttcgagaatataagtgttccagatgccctatcacattctgtcctcgaatggcccgtgaaagcatcttcctttagtttacacttgtctgctcgtcgagctttaattctcgatccaaaattaggatgttcgaattcgttcttgagtagtgacctcgatggaaccggacgcctgaagcctaggtattgttctacccatccttgacaggcgggtcgtacgattgatccttatggacccaataaatgggcctcgtttccttattgaacctttgttgtggctcacttatcagcaatctgggtacacaaataataaaagtgaaaccagctatattaatggtattaaatatttcaatattaactctaaaattaggcatacacaatcttaaattttatagtattatttatacaattatttatttacatgtgcattaacaacatatataaattagattaattaaaaccatcatctaatctaagataacttaaaatagattttaaagacatgtcacccactttataaaaaaagaaatgcttaaggtattattggttgtgtttagtatcatcctaattct

SEQ ID NO: 10348 - DNA, 602 bp, Cannabis sativa
gtttagaagagcaataaagaatttgtaataatcttagtttaaccagatttatgcatctttgatttggcttaaccaatttggttttatccatttaaacggttgaatgatattcctttttcaccaaaaaaaatcaaagaaaaacttttgttaattaataattgattacacaaaatttcaattacaacacatatacttttcaaatttatattttgtaaaaagaaaataaaatgaagaatcgcgaggggaagatgactacatcgaaaaaaaaaacaataaaatttaatttgaatttttatactttatttaagacaataacaaaatttgtacggacaaaattaaagaataattacagtttatgccgctaaaaataaacattcagtttatgccgcttaacaacataaaactttaggtacttataacgctatttacttttatttttattagggaatttctcatctcgtttcgacccaattatgaaattctttgtcctattttcgataaaaaaataaacaaaaatagagattaaaatattaaagggagataggaagctgctatcactccttacgattcccctaaaatttattaaggaaaacgatgtgctt

SEQ ID NO: 10349 - DNA, 562 bp, Cannabis sativa
ttgcagctacaggtggttcatccaataccctcctggacgtaataatgctagaggttacaggatttagaaacgtttctatcatatttaactctggtaatattttatcgatatttattcccttcctcatccattctctactcttagaacaatataaagtgactaatgctctcgtcaacagtaccactcgataaggagagtataaaactaatccacacgtagtgatacacctaaatgaaaagcaacgagggggtttgggaatcttgaatgattggtgtctaagcgaattaaatatgtagaaactatctctttttccgtttattagcaataattcattaggagtggactcaactttgttgattgtcgtagagaatgttagatgtaattttttttttattgtttctatgaggtaagaatcatccttatgtaattttatcaaaagtgaatacaagacttgtcgttactgcatatgatgacgagttactatgcgcttgaaatgttgagagttaatcaagtctcaccaacacttacaaaccattccacactgaaaactgagaagcagaga

SEQ ID NO: 10350 - DNA, 542 bp, Cannabis sativa
ctctctctctctctctctttgtcaatcgaagcagcgcctctttctttctcttaatggagctactactcttcttctccggtgaccagcaacaccctcactctctctccctcatcagtcctcaaagccccaatctctcttctcaggtcgactttttgttgcccaggacgaagccccgatatctcatcttctcagcgccgcaccacacttctcttccccctctttattttttcatcctgtggaacttctactctggccagatggccctgcttcggtcaccgaccacccaaatccaccaaagattcaaaatcccggccctcaaaaatcccaggtaccctctatgtgtgttttttttcttgagaaaattctctatgtgtgttgttttgtctcactttctcagatttactaataatataaaatagaataaaattaaatataacataatataatatatatagagttgggcttgtgcatgttcgtagatgcagtgggcacttcgagtagagctcaccagcctccgaattacgttatttttaaacgtactg

SEQ ID NO: 10351 - DNA, 1128 bp, Cannabis sativa
caggtctgtaagcaactatgagcaaagacatcacgaacttgatttgtgcaagagattaaaccgaaggtagccaaacctttacgggcacttaaaacgaaatgcactcgatttctgtaatcaaaattacttttagtactaaatacattttttacctctctcattagaaatggtctaatagcattattttttaggactcttttgataagtgtacaataaaaataacataattacaaaaaatgtgtaaaaaaaaaaaattaattatatacatttgaagacatatttacataaaaccatacaaattgatcattaatattattatgaattaatgagtaaacttactataaatagatttttataaatatatataacactatccttaacaataactacttttagaattataatacaatacaataaatattcacattgatattaaatatgtggacatgattctaatcatgttagtgatattcaaaatgatttttacttaataaaaaacaaaatctcaattaaacccagaatcaacattatactaacaatattttttatttagagtaattatatttataatataataatttagtatgcttactatagtaatgttttggaatttttttaatgatattataacatgtttattagaataaaaaaataattttatataataaacatactaaatatattttttaattataatataaatgtttatgatctattttaatatgatttattataaatttatgtttattttataatgtatttattataaaatatataatttattataaatataagttgttttttaaaaaataaataaacatgtttcaaaataaaattaaataaataataaatagtttgatatataataaacatactatctttttattatagtatacatgtttattatctattttagtatgattaattataaatatatgtttattttaacaaatatttaataaaaatattaataaacaagaatgtcttgataattttatatatatttaattacaattaagaaaaaaaaataaccgtacaaataattttataagttataaatatattttatatttacaataaatctatatcatttttaatagtatctatctttattatttataatattac

SEQ ID NO: 10352 - DNA, 678 bp, Cannabis sativa
tagttgcctacatgacacatccatatgatattcaatttgtttatactattatccacccaaggtaaaaatccatccatatccagttgttggaaaacacgcctattgtttgtggttttcacttttttcatttctctaaccgataatcttgactcaatattttacaatgaaggtaagcttagtttaggcacctcaattaaaaaaagaagaaagaaaaaacaccgtaagcataactactcccttacttttgcctacatgctactctaactaatcatttcactcactaattttaagaattgagaagagatggagaaatgtagtagtatattttacaaattaatagatcaatggaaaatgagactataaatcctttaataagactctaagggttcctttaaaatgccatattaagtcgtactatattgtattataataaattatattttatacaatatttttatgttaaactatatgtagtattaacttttataaacacctaaaaatataatatttttgtataaattaaaatttaatatagtattatataaaaatataatatataatttaagttaatataatacaatacgatctaatacgactgtccaaacgaaccctaaggagtggattcgagagtatttgtaatcctttcacttctgtgataatggcattatgttgtttttg

SEQ ID NO: 10353 - DNA, 848 bp, Cannabis sativa
atttactgtttttgttcatgtgaagtctctatctatctcttgacttagtctgttgtctttttcagttttttttttaattaacacagtacttatatgacctattccattttcatgcaacaataaaacaactacttatttggctttgttttatttcaattttttttttaaatgtccttttcaatatcttgttatatttattaggattttttttttttatcaagactaataattttttgtgttattataagtgtaagataatgaacaattatataataaagaaattatataattattctatacttgtatataaaataaatgccaatatttagagtttctgttaatgcattgattaatttttttttaattcatacaaggatattttttccatgtacaaagataaaaaaaaaattaatagaatacaatgaaaaattacattttaattataatattgaatataatacaatttaaagttaagatatattacaaagctcaggaggaataaatgctaataataaagatgaaattcatggctaaactaccactaaatattataaattaaaataaaaataaaaataccaaaaatctatacactaatctaacaaagccttgcaagatcaagaaaaaaaataataaaaaattaaaaataaataaatattataagctcagttaggatagcaccgtcacgatttattttaaataatcactaatcttgtctccaaaattacgataacaagtccaaatcgaaagctctaaagaagaagaggaagttaaggttaagctgatggtagtgttattattttgaaaaggttgaaaggagatgattgttgtactaagaagagacaacattg

SEQ ID NO: 10354 - DNA, 916 bp, Cannabis sativa
ttttcagggccggccctgctccttaaatatgtcggtaaacatgttatttgttttatttgaaagaattttttagcctaatttctttttattattattttttaatggtcatatatgttttagaactatttgtaaaattttaaaaaatttctaaataatttaaagcacaaaaaataaagtcaaataattataaccacatgcctatatgaaaaaacaacacgtgaaataaaacatttaaatttttatttttgactctcaatggcggagctagccacatattttagtgggggcaaaaaaaaaaaattagagtactaatgaacgaaaaatataatttttattagcataaatataaaaatatctaagagtgaaaataaaaaatataaattttatgaagataaaaatgaaaaatataattttttagggacaaaataaaaaaattataaggatataaataaaaaatattaattttttgagaacaaaatgtaaaatattaaaaatatgtatataaaaaagtaatcataaaaagttgagaggagcaaataatcccacaggttctcctttggctccacttgaaaaatgcacattttattgatcttaaagtttaaaataaattaagtttaatttaatattttcatgaaattaatgaaatacatttttatattgaaaatattttatttaaatttaaattattgttattttgtaggaatcaaagtgtgtttttgatgaaagaagaaaaaagtgacaaagctgaaaatatagaagaaaaagtgcaaaaaaaaagagaaatgaaaagaagaaaaataaagtaaaagcccatccaaaaggcccagtccgcctgccccatcagctccaagcggggcctttctattcgtccaacactgctccgtcagcgcctacatggcgccattctccccctcca

SEQ ID NO: 10355 - DNA, 1068 bp, Cannabis sativa
gagagagagagagagaagataaatgtattttctagcttatttttctaaccttcacaagataaatatctaatttttatttattaaatctaacttaaaaatcagattcctaaagcccataaaagacaaaaagactctcctagcaaaatgaccatttttcccctaaacatacaccaaagtctaatgacatccaagggtaaactggtcacatccaaaccccaactatttctcaatacttccaatgtctaaccatgatgccctgctattaaaaaaaattctaactgtatgaaaatgcgactctctaatggccctacgtcgcgttccaccgttaccgagcacaaaaataaaaaacaagaaattacacacataacataattaacacattctacatttaaatatatctccacaaatgcgtaaatcatgattaataacttaattttataattaaatcttaattatttaataatctaacatattaaaattaggcggtcattacaattatcttccgttaaaaggatttcgtcctcaaaatctaacttgaatagctctgaattttaagtaggcatgtcaaaaagatccatttagttggagcgggttggagctccgatccgatggataacctttgatctgaaaccttctgatacttattggatcttggatcagatccgctcccctccgcctaattttttttctagatcagacctgatccgactcgatttaaatttattttaaaaaatcttaattcaagactcgaaccccaaactcaaatgccttgggacctagaccctgacccggacccagactgggaccgagacctagaacctgggaccgggactcgagacccgaacctgggaccgggacccaggacccatgactcaggactgggacccgggacccgggacccgagactggtacccaggactcgggacccgaaccttgacccgaacccgagaaccagacccggacccagaccaggacacgggacccggactcagagccgaacccggaccggtactgggatcaagaccaggatccggtatcagacctggtctgggactccgaccccggacc

SEQ ID NO: 10356 - DNA, 536 bp, Cannabis sativa
gcaggagcttcaagaagttcttcttagttttgatagaaaacttggaagacttcaagtggttccaacaaatggaaacagcaagaatcccaatacctctggttcaggttcttcttctagatctggaccttctgctcattttgctcacaagcagaattccaacaacaacaatcacaacccaggaagaggctatggaagaggaaatggttctggtactcattctagaggaggtgctggtcgtggaaatggtagaggaggcagaaactctaaaccaacttgtcaagtctgtgggagatatggccattctgcagcctattgttacaataggtacgatgaaagttttatggggacagcacctggtggagatcagaacaaggaaaagaaagaccctgctgcctttattgctactccagatgttgtggatcatgaaggatggtatgcagacagtggtgctagtaatcacataacatctgatgctggaaatatgacacacagaaccagttatggaggtaaagagaaactgaccattggtaatggta

SEQ ID NO: 10357 - DNA, 693 bp, Cannabis sativa
tgagaagttggacagcggaattgaacctgatcttgaatacaagcctaccatgaaaggttctcctttaccaacttcaaactatgataggtatcgcacaaacttccccaagggtaatgcatggcctctgttaacccgtttagccaaaaactctcttatcactgcaataccaagtctgaaaaacaaggacactccacatcctcgacaattgactgatggagaatcttcttctgcaactgtgttatcggccactcataacattttgcaaagtaacttccattcctctgctgcagaacagaatttaattaataattctgtccaaggttccattttgccaaatgctcttactggtacaacttcttctgtggccaacatttccaatgatctgcccgtgcacgcaccaaaaaagggttcagcaagtgtttcaacaccatctcaaatccaagtatctgctgcaatgaatcgtgttacatctcagcctcaaacaagtgagatcatctctgatctgtctggggtttttactcctttttctgtcatccataatagtcctactgtttttgctacatacccaccacctagcagtacatatcccaatttaaaaatgaaacaacttcataccccactaccttccaagatgctgaatagttcgcagccaattgtgattactgatactgaacaagctgagggtaaggagaa

SEQ ID NO: 10358 - DNA, 673 bp, Cannabis sativa
tttctgaatctgcaagcatgaaactgtacttattacattacctttgcttaatttaaaattcatcattacatcgccaaaaatgttcttatttaaattcctcaacttaaatatcaatacgcatttgagctatcattctcagcttatcatttttttactccatattttcacctacacattgttatgggttttattaataaggaatattagtttaaattatttatgagtcattttttattcaagtttctcatttatttgcaaatacccttctaaattataaaattaattaattaattagttaatattggcttaaaagattaggttgtgggatgggtggggaagtaagaatattttcagagcttacaacatgattgtttgcatctgaagttcaactcttaattttttacattgtaattgaaatgcaaataatgtatgtatgtagttatctaaatctgttaattgttgaaatactttaaataaaggaggcaaatcacagcacagccatatatatagctaatgcttcacctaaaatcaatcccaagtactatttgatgagacacactgatgattatgatgatgagaatcagatgctgttcaagtcaataatctctcatgctcatgctttgagtgaggaattattactatatgtaggtgagtaaaatctttgcatcaaagg

SEQ ID NO: 10359 - DNA, 588 bp, Cannabis sativa
taataataacaataagagaaatttcccgtattaatttttttttataattttatttattgtattttaatgtctataaaaagagtattacagaattgtagttttataattatttagtaattttttataatacttattaaaataaaataaattaaattaaatatttaattatatgaatagaaatatcacatcttataaaagtattaattagttctttagcatttttcgtatacaaaagttgaaggtaataatacttaaaggttcgtttggaacgttatattaagtcgtattgtattaattttatgtggacaataataataacaataagagaaatttggcatattaattttttttttacaattttatttattgtgttttaatgtctataaaatgagtagtattatgagccacacatgagatttaatattagagaattatggttctataattagttagtaatttttttataatatttattaataaaataaaaataaaaacaattcttttttctcttctttctttctcagtcaaattagatttctcaacacttactgaaaaaatccaatgggtgaacctttacacaaatagttg

SEQ ID NO: 10360 - DNA, 878 bp, Cannabis sativa
acaaccttaaaggatgagtgttttgttctgttgagaatcatgacgttacatctcaaaatcaattggcaatgagtggagtagtccatgttcttatatataactcaattttctaccgtttattctatgtgagacaacgtccacaatatatgttctaataatatctacgttgtctttcatttgcagctcctttgtctgctaagataattgatgggatttatcaaagttcatcaattcaagacattaaattttattttatgagtttagtcattggtgagaactcttatcgttaaggaaaaaccctgtcaccagtggaaggaataacgttttgcgttgaaagaagaagaggccattaagcatgtttcaagctgtagtggtcttggatattattgagtgagagaaaagcaaaaaacctacccattcttgttttggttttatacatataccaaccaatatattttctgttctggttctcttttacaatcttaaagagtacattaatcccattgttgagtttcttttgttttttaatttatttttctatatatattacgagtattttttttagcttagtgaacattaatgaaataggtcttccattagagagaattggatattctttgttccgaattgtttgtagtgggcataagaaattggcaatccttagcggtttccttctcttccttctcactaaacaaaataaaatcatttcctcctcttatcttctttcatgtttactaaacaaaaatagtctaagcaaaaactttctttataaatgctataaagtctaaacttagtctgtcttactctaaaatagagaagagaaagttacaaatttatcaaaaatatcaatcaagacctcttccatgtcacctcccatg

SEQ ID NO: 10361 - DNA, 644 bp, Cannabis sativa
tgtttttatttcttgataattttttaatagggttggacatttcataccatttaatatttttttttctagctagatttgaaaaattaccataatgcaattcaattaagcttccaaaactaacttaattagattggatcggtttgaattgaattttaatttgatatccaaagttttaatattaacgtaagaatttacataaaaaatacataaaaattaaatatcagtgatctttcagtagagatttctttaatcacgtataatagggttaataaaaaattaataaatagcaagtaaaaataaagatttcaatttgatacccaaaattttaatattaattaaaaaatatacataaaaacataatattaatatactcgagttcttatggtttttagtaagaatttctttaatcagtgtaataggtttcatagaaaattgataaaaagtaagtaaaaatgaaatttgaatatttttttattatttataaataaataattgaattagatcgattttttgttaaattttgagagtgtaatccaataaagtccaactattcacatctaatgtgactgtaattaaatttttaattttttgtaactggattgaattagatcggttcgctatacttagattggtttggatcctgc

SEQ ID NO: 10362 - DNA, 512 bp, Cannabis sativa
acttttacctatgttcgtttcatttttagccctgtacgtgcttgtaaaattgactcttcactctgttaatgaacatctatggtagccaaattttcttacttcgattgaccatttttggctcttaagtcttaatgaaattcttccatgaaatattagctaaaatagattaaaacattaacaaaaaccagataaaaatattaaaaacagacacgaaaaacatatatctacgtacattttaagtgtcggttgtaaacgacactaaaattcattagtgtcggtttataacaaacacctaaactttaactttttgtctcagcggaataggtataatgtcattttaaattgacacctaaattttaattttttgtctcggtcgaataggtactgtcagttcataaaactgacagtataaatataagtgttagtttaaaattgatactaaaagtacaatttgtaatagtagtagtattcttagtgaaatttttctctatcgaaagaaaaaaaaaaagaaa

SEQ ID NO: 10363 - DNA, 734 bp, Cannabis sativa
tatttaattatatattttaatagacaaacaataatattcaacttaattatattttcatgaatatatttctttatcacatcaaaaaacaataataaattactaaatatatatacatatatatataatgacggtacattatattgatttattatatatatcaaaattaatacttatttataacactagttaattgaagttagctacacctatatattattgattaattttttggaaattttcagggggtcatggccaccctaccccgtaaaaagtacgttcgctttgtttatgggtattattgtcccacatgaaataaatgatagagtattaagcccataattctcaacatgagttactccactcattaccaattggttttaagatgaaatctcattattttcaacatgtccactcattaaaatgcatcatcaaaattctactttttttattttacaacacacttttacattatacaatatattaactatatatttttctctacatcattaaattaatattatttttatttttacattattaaaataataatttttgaacatatatacaacatacataaataaaatattattcatatattattaaaataagtttaaaaaatgcattattcattattcattctctacatatagagcaaattacattagtttgagtgtatctctattatataaaggagttgatagaggtatttttctttatcacatttagctaaaaaa

SEQ ID NO: 10364 - DNA, 607 bp, Cannabis sativa
ttaataaaaaagttaagattaagagaaatttttaacaaatcaaatattttagaaggcaaaatcaatagtatttaaagtttagaaggtgaaattgctgattattcattatgaaaagagtaataaaaatattttttctttttttacacagggagggagatttgaacttgaaatctcttcttcatgaggaaaaaaaataaatcactagattatgcttataactacgtcacttgtcatttcatagtctaacttatagactatagttttgaattcttcttctctagagttgttattagatgtttttttttttatttgaataacaagtatagtgttgtatataattgagacgtcgactctttttttcgtaagaaaattatgacatgttaagggtataaacctcgaaaaaaaatatcctcgcatgatagatacatgcgaaaagtttgcgatcgagacagagcaggcgcaggttatgcatcacaaaacaaatttaagtaaaagtgggacgtaattcgtttgttccaaagaatacatatatactagtaactcgtttgaacccactagttcttaagttaatagtatacgaacgaccaatacacaatcaaaatagtcg

SEQ ID NO: 10365 - DNA, 555 bp, Cannabis sativa
aattattgatgatagtacatgtattaaccagtaaattatcaggagaaaaccatgtctacccataaccgtaaccgttaatagttgcaattttctgaaaaaaattctattaatttattttaattttgataaaatggaattaaacaacattctaaattcttgcatcaaaaaacattctaaatgctttccaaactcgaaatccaatcatgtatatgcatttatttattcaaaaatattagataaacatatcataacattaaaaaaaaaaatcaacaataagcattgatgaaattctcacaatataaactataaatataatatggtaacatttaaatagaataaattaataaaaaaaattcaatatatatgtatacatctgggtagatacggggcggtgtatgctaataatatactcgtgcatgtgtggtacaatttttcccatttaaacaattatttccctcactattcagatcgaataactatgggtacctgtaaccttagattatattgtcatctctatatgaaatctctctctaatattttttttttgtttttttt

SEQ ID NO: 10366 - DNA, 838 bp, Cannabis sativa
tttttatatatatatattttactgtactaagttttaaaaatattgtgttaaagtttaaaattacaaaaatactgtattgtagttgttgtctaaatttttataaccatgacacgtgggatttagcagaggaggccaaaataatctttagctaattagtgccttcggccccagctccaaggagggactttcgtgaaggatgcatccatcgcaaggcaaggacgcatggagcgtcaaggagcctgacatctctagttcccgagagtggaaggaaggccttgtctcccgggaaggaaagcatcccacagaagccgaggactaccttaagcaggccaatgtgagttacgagaatacttaggataggtgttatcctcatgtgatgtcgcagaagatctctgtctgtacctgtcgaaccacgaaggtgacggtaacgctttttctggtacaacgtcagtctttatctcctatgtcaggccataatacgaggcatgggcaccaccgtacctgcccatggtccagcgaccatttacaagggcgattcaaaagaaagcaaagacctttgggtgacacgtatgctatgttcggacggtaccagtcatatctctacggaccgcacgatggagcgacacctacaaaatcgatagtcagatcccttatggtgggactggtcctgattaatcggtttacttatttcttgatctttaattaattggtttctaaaaatttcagtaaatattttggtgctttcattgagatttgaggaaagatttaaacctacattatttctattattacgatcctagaaaataaagagaggaatttgctcaaaaaatggagaaag

SEQ ID NO: 10367 - DNA, 556 bp, Cannabis sativa
gatgacaccatttgtttcattaaagcttcgatggatgaggtaatgcggctaaaagaagttctggattcttattgccgctggtcaggccaattgatcaatgtgggaaaatccagaattctcttatctaagaattgtaacttgaatattggccttagcttatcggagttcctgggattcgatattatgtcgggggaggaatcttttcttgggaatcctatgtttgttaatggtagaagggccaatgattttaagttcgtgattgacaaagtcagggatagattggatgggtggaaggccaagcttctctcccaagcggccagatcagtgcttattaaaaatgtggtttctgctatacctatatactctatgtctgtgttccttctccctaagaaaaccacaaattcgttggactctctggttcgacgtttttggtggacaggcgacactggtggagggaagttcctctctttattgcattgggggtctatctgcaaaccaaagagtctgggaggactgggttttcgtcaattccgtgatatcaatttttgcttaattg

SEQ ID NO: 10368 - DNA, 1001 bp, Cannabis sativa
aatatttgtacaaaaatatatttgtacttcaaaccatatttctatggccggtattcatgtttatatttcgacttattaaaaatcgacatagacttgagtccgagcttaacatgaaatgaatatttcgtgcttctaaattatatgttgggtcttatccttaaaatatgtaagtcctgatatatatacattttaaaaacttaaaaataattaaattgtttatataaggattgagtcgatcttaaaaatttatatggcaataattagatgtttaatattttttgtaatgtttaattttattttattttgaaaccatgagttacaatttacaagttcatgtgttaagttttatagctggctgacaagttttggcaagatcgtaataacaatttaaattaaaaaaaaaaaagtccaaattttgtattctaattttactttaattggcatcgttcgtatcttattgtgcttctatgcactttttctaagcaccttcaatcgaaaaaaaaaatcttaaaattcaatatatatatatatatatacatatttatatatttttaaaactggaactttcggttatgaatgctaaaaagaaatttaaaagtggaacataattacaattcatagtgagtttatattgaatatcatcaccttttatgcttgtaatattatacatcacatctttattaaaaaagaaatacataatacaaatttaattaaaaaacaccaaagagcattatggttaaggcataacattattaaactttgaaagttcattacaaacgaaatttatatttaaaaaaaaaatcaattatacatgagaattttttaagatgataataataattataaaaacaagtggacactttaaattatcttttaataattaacactttttcaatggtttataatgtgattattagatattattaatatttaatactataacaagataacgctttagtttatgtttttaaataatagttattaaattaaatataaagaat

SEQ ID NO: 10369 - DNA, 656 bp, Cannabis sativa
aacaaataaataacccgattttaataattatatatatagggacatgattttgtcctgtaattgtactttcacggaatgtattctgtgatgtacgacaattgttagatgagggagttatttgatctgatggctgatattgatctagggttaattagggttaaaaaataataacgtaccctgacactcatctaatgtaccttgagacccatctaatgtatcacagaatacattttgtgaaagtacaatcacacgacaaaatcatgtctaaaatcataaatattatgttgtgtaaattcattaaaataaaaacaaaatcaaacaaacatgactacaatcacatgtaaactaattatcaaaaaaaaaaaaaaaatcacatgtaaactttttagctataattataaacagatgaagattaatgcatcttacgaatttcaatagaaataattttaaaaactaaaaagtcatatatgtagatctaaaattaattactagaaattaagggtttaattagagcattagaactgctattagacatctgtggattcacatcttgtaaataattataacgatttttaataataattattcaactaaaatatatgacacaattaacaatactagggaagctttaacattgttagatttacttaccggca

SEQ ID NO: 10370 - DNA, 542 bp, Cannabis sativa
ttattttatattatcttttatgcaattcattttcttcaacttcatttcacttgaataaaaaaaataaaaattactaaatatacatatatttttttataaacaaaaataaaaaaattaccaaatatatatttttatattttttcataaattaaaaaataataaggaaaacagtatttcaatttttatatatatttagaaacaaaaaaacttatacaattattactcttatctttaatttgtgtatttatatctgcccgactgcccgagtattttttagattaaaaagtttaataggcaagtcaacttaagtaacaatttaagaaacccaagttatatttctcatcgaatcaaatttcaacttaataattaacattaaaaatacttttcaaataataaatatcacaaagtccaatttatacgtgtacgttgtatctaaatgtgtgaaccaaatttgtgtactagtaaatttataacaacgttttcctaatgtgataaagtaaaaccgaagattactaaaataatttttaattgtgacatgtgct

SEQ ID NO: 10371 - DNA, 591 bp, Cannabis sativa
tgctgccattattatcttttccaacacactaaaattgtgaccaaatgtatttgagatagggcttaaagaataaaaacaagttttatttatatattatgtaagtagttttctcgaataataataataataataataaatcgatcaagggtttttagattatgaattaggttttgtttctgtgacatgttggtttgatcatgttcgtttttttttttttcgtgttttgtttctgtctggttcttttatggattctagtagtatgggaactgtcaaagcaaggagctagtattgctttggagggtgaggaagaatatattttagctttcttggagagtattcaactggcaccaactattgacgatcgctggtatttggtggggtggttcttaacccaacgaagtatcgatttcgacgccatgcaacacctgatggcctcgttctggcaaccaggtcgcggactgtttgtcaaagaactgggtgataatcggtatctgttacaattttatcatgaaatcgatatacggagggtgattggtgttccagcgacaacaccagggagatgatctgttggttgtccgtctaactaatgtg

SEQ ID NO: 10372 - DNA, 654 bp, Cannabis sativa
tggaaactttgcatagacatatttctctccaaacataaaacaaaaaagatttgacaaaaataaaaacatatgatagatgaaattatttaaaattttaaccaacattgggaaagtttcacctccatagagaggcagctaattaataaatagtcaatgatcgataatgttgattaatttcttccaagcagggcggttggagatactttcccaccaagctttcacattcttcctctcactcactaaatgttccatgttaacttcattcactaaatatctaatccctggaagatggctcaaatcggctagactgaaagcgtcaccgccaaggtaattgctcttacctaatctctcctcatacacgtcaagaactttcgccatctttttctcacaatcgtgtaccagagccaagtttcccttctttcccatacttgggaggattaggatctgcagcaccagagtgtagactatgtcattgaagttgttggattctacttctacccattggtccactatggctctctcctctgttgtggctcccaataggtcggctccatgatcggcgtacttggctgcgtagtaccgtatgattgctcttgattctgaaattaataacacgacttttaattgtggataaccttaataaaaaataattag

SEQ ID NO: 10373 - DNA, 1043 bp, Cannabis sativa
cccagccacttccgttcctaaccgcagggcgaactgtcactctctttatctttgtggtttcctttgtagttgccagcagaagatactcattatatcttctcaagattgattctctaaccgtagcaatgtcaactaacttccctttaaaaagaagttcatttcttgccttccatataccttcaaacaaacaccccgtgaaacaaaggaattgatcatttagctccgttggaattcgctccaaggcccaaactagccactcctttaccgagattgcactcccattctcacaatagatagggaaaggactgctgaaccataatgctctcgcaaaatggcactcccaaaaaatatgaattgccgattcacaagcaccatcacacaaaaggggcaattcttttctgtaatgaaactaagtctatctctagtaggaatgcatcccatgatcactctccaaatcatcaccgaatgcctaaagtggatctctttcccccaaacctttttccacagcttaccatcttcgcaagagctatctccaagagtggcttcgtagcctcttttgacagtgaaccttccatcacccgcctcattccacacaatagtaccatttgtgccaaaaggaagccgagtaatgtttccaattctagttcctagtatgtccccaaacatatctttgagaagctccatgttccaacttccatcatgattagacatgtcagccaaggtagagatgaatggaaaccggggctgcactctgttcataagatcagtaaatttctcataagacagccatggattccatggtttcttccagatatccaccgaatcacctttcagccttttggaggggtattttgaatactagagacattatttgcaatggtggcaactgggagttaaacttagatatttatgccgcaaattactctttaaagaatagaataaagaagttgttgggagtgctcttagagcaaagattttgcttctctaaaataaagaactatttgaaagaactgatagagtgtatttcttacatgattctttaa

SEQ ID NO: 10374 - DNA, 614 bp, Cannabis sativa
ttgctggtttgccaattcctggccctatttccccagcataataccagggaccagagtcagtcgtggtgcatgggggctgctccacattgacaaaaccctttgtatgaggtgccaatggtacatctaccctaggcgacagaggctgttcattgggatcatctagttagcagggtcgaccagaccagttgtgttggttgagtttgttatgcttgccaggttggcaagattggctacatccgtaggattcatggaaattctagtggtggctggaacgtgaacttcatgatcagcaatcatggggtcttgaggaagacccagtgaagaagaagttatagttggagttctctttgttagagccatggtgattgatcggatcaatagacaacgctctcaatgaacgtaccaaaattttgaccacaaatttggcctacaggcagcagagtcctattcatgatcggaatcaccatgtgtaaacaattagaataagtaattaaatggacatagtaaattcgtagaggtgtggccctttttgttaatgggtaacgacttacttccctttttgttgtattgatatgagagataataccactcagatcacaagtgttgtgggttct

SEQ ID NO: 10375 - DNA, 819 bp, Cannabis sativa
aaaaggagagtgatgatgtcacttttatggaaagtaatgcaagatgggtacaacacccccacaaagatgaattagttttagtcgcaaacattggaggtgataatgtacatcgcgttctcgtgaataatggtagttccatcaaccttttgaatctgtaggcatttaagtagatgggactacacgagaaagatttgaagccgataaccttgagcatgtacatgttcactggagatacaattgagttgaaaggaatgatcaggttgcctataacgcttggtaaagcacctgtaacaacgaagtctatgacgaacttcgcagtgattgatcaatattcagcgtacaacgcggtgattggtttcccaatcttaaaggaaatgaagattgtgacgtcaatctactacctcacgatgaagttctctacacccgtaggtgtaggatcagtgaatggggtccaatccgactcacaagaatgttacaaatgagtctaaattggtgtaatcattggagatggtcttaaaaattgtgtaaaatttggtgcataccaatttaatgtaaaatttagtatattcttaaagtgaaattatgtgaaagatttcacactaatttagtgagatagtgcaccattaaagacactctaattcttatgaattttgaaagggaacaatgttaaagtttaataattattaagtgtaatacaaacacattaattattcacacgcgaataatatgagacaaaatacacacaaattttccaagttggttttcagtttttttttttttttttttaacttcaaattagtctctaatgttgtcaaatat

SEQ ID NO: 10376 - DNA, 1000 bp, Cannabis sativa
tgattatctagcaaaagcagacactagtgagttatttttaagattagataagaagtataattatcaacatgaccagtttaatctgagacggggccgtttgggacaaggtttaacttgatgagaatagttttagcatttcttggaaattgaaaatgggaatattaaagtataggagtgcaaaattactttgtttggttgtgtataaaaaaactatattactaaattctgatatttttataaaaaattatttgttattaaataattatcaaacattatataaatatatatatatatttcagtggaaaattttttcattaaaaatattaaattatatatatgtgagtagaagtataatgctctttgtatatttttaattccttacgttttgtttttaaatatcattcaattttttattccaacgccatataaatgtatgtatatagataaaactatatgtaatattttaacagagttcacgtgaaaaaaaataaataaagcagtactttgtctattccagtaatattaaactcaaagattggaaggagtggacattacttaaaatcaacgccatcttaagccacggtaaatcaaagcaccccagtaaaaaaaattaaaaaaaacaatacgaagtacaagttgggtttcatttttccattcccatgctaagaaaccctcataccaaacaccccctaaatgtctaaaaaaatacagattgaacacaccttgtatgacttaatgtgaatgccaatgctctactttgttgaataaaggatttcttcgttccgtgaccctaaaattctctgttccttctctaaatattctttgtttagatttgtcaaaagctctctttctttttgttttgatgacttttcaatagagacacaatgcctttcacaaatattacaataataaaataattataatttagtgacaatgttcattatgtaccatagaatagacaataactacattgtcatcatctcacaagtcaatattttaa

SEQ ID NO: 10377 - DNA, 572 bp, Cannabis sativa
gttaattgtgagtcaggcgactaacgctaaacatttgcatcaattttcaattgaatggtagagtttttttttttttgagaaaaaataatttattgtttgcgtcagtgggttccaaacacaaacatcgatattgtgtcaattatcaatcgatgtatttattcaattttatctgttaataaccgacgcaaatacccaaacaaatgcatcgaatatacgttggtttagtgaaccactacacaattagctgacctagctactagtcctaaaccgacaagaaatacccttttttgtagtgaaaactaaaaagaaaataggaagaatgaaaattttgtgtcaaaattatgtacctccccttgtaagttccaagcaaggtgtaatgagaagatttggcggtttctagatcaaccgaggtagggtttgggccatgcgaatgtgctcccatgtacacaatgtaagactacatgaacatcgaagacaattaaagacatttgagtatatagataagagaaaagatgtgaaaatgaattaatgattagaaaatagtttaggctttgtttaccttttgaatggct

SEQ ID NO: 10378 - DNA, 590 bp, Cannabis sativa
ttgaactttgtaaatatgtccgattttttgttttacttaggcctagttttaatatatatttttttttctagatcacatctaacactctagacatgcttagtcgaaaaatttccataagtggtcgaaatatttagatgactagtcaaaattttaaaatgaggtcattttgcgaagaattaacaagctaagtaaagtgcaaattgacttaaaaagaaaggctattttgccaatcatttctttgaaaatttataattattatatctctaaatacttttacaaataatattatataaataaatattaatttaaactttttattttataatttttttattaaactctctattttattaataacaaatttaaccttatatttttcgaaatggtacacagtaccttaagcttattttttaaaaataaaatttaataataatctgatcagaggtgttatgacaaagactgattacatgttctgtatctatttgtgttagaaattatctttaaattggttatatattaaaaaaattatcaaaaatttatcattattggcaaagcaatgttggagacttctcacttgtgaggatagtttg

SEQ ID NO: 10379 - DNA, 708 bp, Cannabis sativa
gtcttgccccatgttcttgatagcagcaatgatttcttcctcactaggaatagtattgagttcttcgatctcttggtttgttagggtcctggtgaacagatcatggggcatatcagtgggatgcgtttccccccgtttgaacaaatctctgaaattacttaggaaacaattagcaatctctggttgattctgaatccagtcccctccctcagtgttttttatacattggatgaagttccttcgtcttcggacaattgtcgaagccataaaaaatttggaacatctatcgccttcttggagccattgtacccgtgacttatgtttccagtgtatttcctctcgtagaagtgcttcattaaggacattctttgcttcttgaatggcatgccaatccatcggatctctactctcttcacacttcagggtagcagtcgcattgttaacttggagactaagcttcttaaaatgatttttgttccacacattgagtttacgacaagtgctttttattttcctgtggaagtttaccattgggttgtgatgtaatcttttagcccaggcttccttgacaacccagaaacaacgggggtcacgagcccacatgttttcgtacttaaagagtgtattccttccgatgacaccccccgttgtgtcgagaagaatgggtctatgatccgaggtggctgaggacaggtggtgtatcactgc

SEQ ID NO: 10380 - DNA, 528 bp, Cannabis sativa
aacaatgacatttaagtcatttctctattaatgattataatatccattttttctcaacaatctgtttaagaaaattataaaaaataaaatgttccgtataaaaaatacgaaaaataaccaattaaaaaatatgtatgattatctaaatatttcagtataatagttctataattgatgaagagtaattttgtagttatctatatgctcctgcgcatttttttttattgtgtcccttttgtcaacacttgtcgcactggttctgtttttttgtttcccaagttgcaataagtcttctttttctcagccttccagatttgattctttctctaagaggcaacactatgatgtcttagaaaaattctaatagattccattctcataggtttctaactgggcatactagctatatcttgatatgtttgcatccatgtttttgatgtgtagtagtgttagttgtatgtgtctatgttaaagtctttcatcatggcaactgcatggccacacggcatttcatctttttgaaatcta

SEQ ID NO: 10381 - DNA, 563 bp, Cannabis sativa
ttagatccacccatgtggttccctagttgattgatttgactactatttgggtggttgtgctgggctcctagaggtaattaatcaaaaatacccctagtttttatatttttatgctgtatgccagtttggccagtcagttagcttgggcattttgctcacgaggaatttgtgaaatcctatagtctttgaactcctggagtacctcccagaccaaggagacatagtatgtcattctctcacccctggtttggtactttttcaaaacctgattgaccactagctgagaatcactgtatacttctatgcatgcggccccaccactttagcgagatggatgctagctaggagggcttcatactcgtctccttgttagacacatcaaccagaaatgtagagaactctgaagtctaataccctcagagaatattaacctaattcctgctccaaaaccattttttagatgccctatctatgtatactttctaggttagaatagttggcttcagacgagtcaattttggctcttcctcattgttctctataatgaaattagctagagcttc

SEQ ID NO: 10382 - DNA, 705 bp, Cannabis sativa
aataaccctccctcctcttctttgttgtcctatttcattagtgattcaggtacttggaatctgtccaaactcagagcctattttgatgagtccatgattaatgatattattgaggttcctattattggtccttataataaagaagatatgatttgggagcgagagacttctagccttttcagtgttaagtctgcttaccatttggctctctctcaacagtattttcagtcttcctcttcttaatctgtttcaaaaaagttttggactaaaatttggacttctaaaacactcccataagttaaactttttgtttggagaatgttgtctaatgctcttcctgcagcttcctctctcttcaaaaagtgtgttgttgattctccagtttgtcctctatgcaaactcggaccagaaattaccaagcatgccctgctagaatactacagattgagaaaagcttggcgatcatccaagtttgctatatactataataattataagcatctcgatattaatgaatttttcctaggtattatttaggaactagataaagactatattggtattttacactgttttttatgggcactttggaaccaaagaattaataattttcacaatcagtatactctccctcccacagaagtgtatgattggagtgttaatttttttcttcaagtatttggatgtgcagcatgttcaagcacc

SEQ ID NO: 10383 - DNA, 635 bp, Cannabis sativa
tgataataatccagtaaaataaatgaataataatttagatatttattttgtaataaataaaaatttgatatttttatggctatggaggtagttaagtgtcgtgacggtagtaaccacatacaggcctcctcacaatatcgcttgtgtgcttctccttcttcctcttctcttctcttctctatttcatattttattttcttcttataaaataatatattatttttatttcttttaatgaataaatacgatttggatattttttttcttcataaaattatttatttatctagttttgatgaatgaattgaatatgaatttttctagaaaattaattatgaaaacaattatttggctataggcatagtttagtggacttttatttaatttttttttttttttcagaaagagaaggtcccaaatttaaattcctctttttaatgtcaaaaaaaataaaatgaaaactctcgttgacactcaaatattgatgttatttaatatagaaattattatatttaattatgtgtgatgtgaatgacatttttgaaagtgctaacatttgttaaaagagaatatatttagcaattctcttattataattaattaggagtggaagctttttaggagtgggattgaat

SEQ ID NO: 10384 - DNA, 618 bp, Cannabis sativa
tgtaaaggtatttacaataatctcatccatcaactatacttgtttaccgaaattttctgaaaatgaattatttaatataagaactaaagaaaaacaatcaaaagaaatagatcatgagagaacacttagggtttttacgtggttggggcagtaaagagtcttagtccacgagtcagttttattatctgttaggctagaaaagccaaaacaatgagtatagttcctctattctcttgttaggtttgtgagttaagaaatatcaaccatttgcatgaaggattcagtgtgtatttgtagagtcatagaggttatacttagttattattttccctcaaattgggggtttacaaatcatattgtactttgggcttatcgtatgacccagcccatgaggcagtgactgtatgctaacttggcatattgatcatggtgatagttgttcatgtcgtgttctttgattgtgaaaaattaattgtgtattaattattttatcttcaattatgtagttttccttttaactttgatattattctttgtccgagatccatagaaagtaacttccttattttgtgcggattggcaaataggataatatcggtggctttcaaatatatcttg

SEQ ID NO: 10385 - DNA, 517 bp, Cannabis sativa
tttttttttttttaattttggttatattaattattcttaaattagtcctctggaaacaaatattatttatttaaaaaagatcttttaataattagcaatgataatataaaataaatatgattattatttaaagtttgatgacagtttttaatatagaaaattaaaataaggactactcgtttggttataaatatatttaaataatcacatgataaatgagctttaaattattaattactaactctaaactacacgaatctcagtctccctattcatcgtgttcaagataatcatgattgtcaaatattttataatcattttggatgttcttcatatattgtatttattctttatatttttaaaacaaagaaatcttttagagaaaatctcttctaatacaaaacaatatatgtaataaaatatataaatggatgtgtaaattatttaaattaactattaccataaatgttacgattttttttttatttgaaacttacttgtaattaaattataaaaa

SEQ ID NO: 10386 - DNA, 605 bp, Cannabis sativa
taaaaaaaattccacgtgtatttgaaaacgtgtaatttttttaggatttcttctttttgttttgattttataaattaattattattgttttgtttgggaggtgaggactgaggagtgagtgtcagagattgtcgttcgtacggaaaggcattgccttgtagaaaagaaaaccttcatttatttattttattaaaacaaacaaacaaaccttcaaataattaattcattaatgtcaaatataaaagaaatgataataaataagcaaataagagggtatgatccatataataatattataattatttaatataaaatatgattttacaaaagaaaacctacaaaagtttgttaaaagttagatgcaattacaaatataccaagttctaaaacccattttaacaaatgcaagacaaaaaagtttatagaagaaaaacaataaaacaagaaaaccaccgtataacttatgaacatgcaataatgatgctaaaaataaaaaaaaaattagtgtatttttctttagggtcatataagttatttaaccacctataaatactttttaaaaatttaagtagcttataatacatagcaaatgcacacactctacc

SEQ ID NO: 10387 - DNA, 742 bp, Cannabis sativa
aagcaggctaaactgcgatgttagagtagggcttgatagcatgtgttcagctgttgttgctaggaaccatcttggtagggtaatttaggttcagacgtcccgtgttgcttttctaacgctctttgtggtgaagcggcgacctgctgtttggccatttcgactgccaaggatattggtgccaagtttgtgattgttgagagcgactcgagagtagttatcaatgcgttcaatgagaaggagtctcactgggttattggaaactgtgtctcattttataatagttactctcatttgttttctagttgtattttttttttaatagtagggactttaattttgccgcccataatgtaactaagtgggattttacctacaagaggtttgatattattccgttaacttccattccgactaacattttatgtaatgaccatgaggtctaaccagttttatttatcagattcgcttttctttaaaaaaataaaaatagatacaaatctatgataacactttcatagagtgtactatataatttcccttatattatatagagcattgttattagccacaacaccaaacaaataggtggtattttacaattaattaacaatattttttaaaatttatttttttaaattgtatgagattcgatatttaattatactaatattactatcagatcttaaaaaaaataccttttaacatttcttatgagctatgtcttaactaccccttttgatta

SEQ ID NO: 10388 - DNA, 691 bp, Cannabis sativa
caagacaagaaccgtggactcaatcattggtatcaagccaattaaattctcaaatgcaaaaaatgatggcgataaggagcagaacatggagcagaacacgcaagatgtgaatttatttcaagctcctatatcactgagatcgtcgttacacgccattaagaggaagatgaagtgagtaaagactttgaattcttcctgcaagcaaatcgacagtgttcatctcacattcaacaaggtaactctgcaactcctcctattctacgatctggtactgtggtgagaaatttagagacatcctttaagaattctgagactgttaataaggtcaaaatcacattagaagacattgaagatgaaattcatttttggagctcttctattgtgtgctatgttttaggggcgaaccctccattaactgtcattgagggctttatcaagagaatttggaacactaaggtggatagagtgggatcatttacttatggtgttttcctggtgagactcaactctgttgaaaccaggaatgttgagattctgaatggaggatatgtgttttttaacaataggccagtggtgatgaaagcttgggaccctaatgttaacttcaagaacgaagacattagatcagtccccattttggattcaaatgccaaatttagagctcaagtaatggggagagaaatctctattc

SEQ ID NO: 10389 - DNA, 987 bp, Cannabis sativa
cctaggtactggaaaaacaccccatacagcttacctttttcaaaaaatggggattcccactaggttaaacggttaaccgtttcccactacaaaacaaccaaacctttgtttgtgtgtcaaaactaacccaaaatacgtccaaacctaatcaaactttttggatcaaaataatatcataaatacaagatactttatcattcaaaacatagaaatacctccaaattgcaaactcatcattattgagtgtgttcttgagtttatgaactcaactcacccaaccaaagcttaataaccataaaaatatttaaattaacaattaaacaaacttgaattacacttaagaacatactttgaacataaccaacacgatagacaaaaaatatgcaaaatccccaaaaatctcaaccataaaccctaaaaatcatcaagaataattaaataatttaccacatggtttggatggctcataaggttaaagaaactgaacagaattgaagaaattgagctgaactttcctttgttttctatagtgagagagaaatatgaagtttatgtaatattttcctattttttttattttatctcttcgttaaccaagttaataaaattaatctaataaaactacattatatttcaacctaaggttttctaaaaaccccaaaaaagaataaaaacttaaataaagtaccattctacccttaattccatagataactaactttataacttacgggtattttggttaaagcgatctaccccgaataacccaaaaactcaaccataccaaaacatttgggtacaatccatatcttattctattaccttcgtgatttccttgcccaatctattgagtttccacaattgccaaaatcgaaaaatattttatttaaaaaatagtatatataatacccacatgctttaataaaatttttgtaattaataaattacaatcattttaacattttctcaaaagtcagtaattgtttc

SEQ ID NO: 10390 - DNA, 512 bp, Cannabis sativa
gcaattttgatggccctccgaaaaataagggagcgaaacatttcgaagctgcacattcaatctgatgttttggttgtagtcgatgctcttaattaactctggataccatcctgtgggatgaacgacttatccagtttccgtctcttgtttaaacatctgtaagcagtttgataatgtgctctttatccacattagccggtatgttaacggcatcgcggacgccttagctgtttgggctcgttgtgccaaggtgaatgctaaaggtcgtctttgaaaggtagcccccgttgtagttactactatgttttagtttactttcttaataaaatttacttaattattaaaaaaaaaaatgtacagtcatcattccaacagaatgataatgataataacagaaaattaatagaaaaatgtaacatgtgatatttatgctaggatgccacattccatatatcaataatatttattatttataagatatatatattgcacaatgtcaaagagaccaatgt

SEQ ID NO: 10391 - DNA, 540 bp, Cannabis sativa
tttcagtaatctcaatccaaaaataataatctaaattaaaattcaaaaattaaacaaataaaaaaatatacatttttttttacctaaaatagaggcggacggaggtgggtggctccgttgggtctcgccggcggtggtggttggaggtggtctgagagagagaaatgagagtttgagaatttaagatagagagtgagagtttgtactttgtagtagtgcaatttgagttaataaattaagttcttcttataagaaatattatattaaagattaataacgacaataagaaaaacaatgagaaaaatataaagcaagtaataatattgctacgtagtatagggtagggccctttcttgcataactttatattatcaaatgctttttctttggttactactgtttgaccacgtgtcatgcacgtgtgaatgctgtgaataaatttttaaataaaaatatgagtatgaatttaaataaatattattacagattatttttaaaaaaatatatggtttagctaaattagatgtcaaatttaaaaga

SEQ ID NO: 10392 - DNA, 638 bp, Cannabis sativa
tttattgttaagaatgagagaatctatttttactaattaaatacgactttggttggccattttttgaaaattctacaatgcaccttttaatctgtttttgtatttaaaataatttttttttatagttatttaaaacattttgtaaaaatatagtttaaatattttattatagatagattgaaaattgttttaaattttttaaattttataagatatattaaataattataatatacatgttaaaaaaaaattaaactaaaattcttattgaaacaaataaaagttacacattaagactgatcattttttttcttttggggaaatgctgatcatttttgacactgatataataacaaaacttaaatgaaaaatgggtttcgattgggaacatatttaataatgataccgagtttgtaattttttttttttatcatattacatgttggtgtttttttttttattttaatctctgacgaatttggtataattatactatctaatcacaaaatattaatatttttaagagtttttatattatttttgtatgcaattaacgaacacattagtcaacatgaaataagaatttatgtataattacaatccaaagttccaaacacactttggaaaactaataacaa

SEQ ID NO: 10393 - DNA, 549 bp, Cannabis sativa
tttattattatttttaaacaaataaatacttttattatttttttattttattttttaataaactatgcagttttattaatagtaatgaattaaggtgacatttgattcgaaggtaatgaaataaaatagaatgaaaaagaaataattttttttctatttttattttgtttggttgcatattaaagtattgaaatagaatggtttttctagctactattttagtaaactgaatgaaagaatattctaatgcaagatgaaaaaaagtttattaattttatattttttatgaattttaaattttattccattcttattctttctattctcatttatgttcttatgattttattcattcttattaaatgcaatctaaaataatagtttacaaattaatctgaatatctcctttattagaaaactgactaaaattagaattagaaaaatgaatcaaccaagacgtctaattttaggatcgtttaacaaataaaaccaaaataaaatcaaatagaaaaaattacatatcacagttaacctttaaaacaactatat

SEQ ID NO: 10394 - DNA, 554 bp, Cannabis sativa
gagagaaagaaaaactattaccttttactcttcataaaattgcaatagagaagtaaacaaaaatcctgtaaacaattcttatagaaagcgagcattgatttaataaaaaaaattgttcagcttttcagaacaatcacaaaacaagaaaacttacatccacccacaaaataaaataacgaaagtaaataaagaaaataactactatcaatacacaaccacaacacttaaaatcttgccaatcttgcaaaaaagaggcaaatttcagttccctagctagtatgaaaaaacaataaccttgtagctttggtctgtagttactcatttagaatttggctgttcctgctgaacgagtttgaggttcagtgggtaatacctgattcggctaatgttagtcagcaagcgtaggaatttgctatggagactgcagctatggccaatatatgggcagtgtggttggaaagaaacaacagagttttcgaagggactgaatgctcattagaagaggtatgggagaagattaaattttggattgccacttgggtctacaaaaccaa

SEQ ID NO: 10395 - DNA, 596 bp, Cannabis sativa
atttacagtgacagtgtttcaatccgatgtttcatcaggtggaagaaacttgattggcttgacttttacaccatttagatacccatctaagtgatgtccaagaactatggcagagaccatagtcttccacattgtatagtagtttcgatctaacttcagcgcaaagggctaagttagtgtgctagcgacaagttgcacaggagctgttggtgtgtacgttgaagcttgagcaataacaattgaagcagaccttgttgctgattcgtctcgaccaccacgaggagtttgttcagccatgatttgttacgacatcaccggtgaagtattggctctgataccaagtttgaaaatgagaaaaacagagaagaacatagaaaataaacacaaaccaaaatggagaaaatgctcagctcaacgattggaggctggctttgattgtatttatattcacaagtagggttacaaagaatcacacaatcattaccaaatagttgtacaatcattacaatgattacaagggaatattctgacggtaatgtcaaagtttgttactatgggaccacacacagtaccgtgagtgatcaggtgtaggcaga

SEQ ID NO: 10396 - DNA, 622 bp, Cannabis sativa
taaaatattaaacgagtccccgtcaagtcaaggagtgtcatcctcgttcccgactcgttaacattccctgcagcgcctcatccacatggaagaaatgtgtatccctaactgtttgtacctaaaagtaatgctaaattaaaattctatagtgtgatttttatttattttgaggatatttgcgaagaaactcttttaatatttgcattcgttacatatatggctttaataaaaagaatagcgacaatagtcttttccgtatttttgttgaacctgttagatttttgacgttaagtgatatactaatgtgtaatttttatataaaaaaaaattaaatagtttatagtgtcgaaaataaagtttaaataattatttatcacaagtgtaagaaaaataattatgtgtgtaatcaaatatttaactctttcgacaccctaaactatttaaaatgattccaaataactaacatgtatactgaaaaaataactacaatattctcatgaatacccaaataaataaaaaaatctacaattgtcccaaaatatatacattaacaacttaattcaaaacttaaaaaactacaataattttcaaattataatcaatctaataatatatatatata

SEQ ID NO: 10397 - DNA, 710 bp, Cannabis sativa
ccctgttcactggaatccgttctcgaattctttaacttcgtcactcaccatcaagctcgatcgagccaactaccttgcctagaaatcccaagtagttcccacggtcattggtcatgaccttgatgaaatactgtttaccagtatcactcctccttgcactcttatcaatggtgatcccaatcctctgtattttcaatggcgaaagaaagaccaactactcctttcttggcttcgatcttctatgaacgaagccattcttggcgctgtctcaaattataactcttccaatgctgtgtggatagctcttgaatagaaatttcctagtcagtctaaagctcgattacttcaactcaagggacaattttccaatcttcataaaggtaatctaagcatttttggctatgttgataaaatcaagtccatctgtgattctttagctattgctggtcattcaatcactaatcttgatcttattcttcacttgctcaatgtcctcggaacggagtttgatcctgtcgtttctggtatcacttctcgaagtgatgctctcacattagaagaagtccaagctcttctaatgtctcatgagactcggcttgaaagacacacatccatgatggatctttccacaaaagtggctgcaaatctcacatttggctccagacctggcccttatcaacatccttttgcctatgggagaatgcctcctg

SEQ ID NO: 10398 - DNA, 618 bp, Cannabis sativa
attagggtatgtgtagatcaataattctaccagtatttgatggtggttgggttgtggtggtaatagtatggatgaaaggtggctatctaacaatttttgttggtttaacagaatattttaacaatataaaaatattcagttaaatttaaagtagagttagttttttaagtatctataaatattaatattatttattttaaattaatattatttattttaggttaattgaatttatacatattttaaattaatttaaatatataaatattaatatattatttgtattattatttttttattgttattttaatattgggagtacattgaatatccaatattaataaatattgttcaatatacaatattaataaatattgttcaatatacaatagtaataaatattgttcaatatacaatattaatctatttattttaataaattatcaagtggttttttttatttatacaattttaaaaatacacatagcaaaaataaaaactagacttgtcttctaggaatacgctgtatatatgaccctccgacatcacgatactggaactgcttctggatacagactgtcaatggtggaagctgatcatctggtcgcggagctaagg

SEQ ID NO: 10399 - DNA, 861 bp, Cannabis sativa
atcaaaatatttttaaaaatggcaatacactacttttatacactctattggggatgcctaaaataaactatgaatgctaaaattgaattagtatatcatgataaaacttttattaagaaattaataataataattaaggtgaactttgattgagagaaataaaaatataggaatgaaaatataaataggaatagagtggaataaaatttaaaatgcataaaaaaattattaaattttttcaaatcttgcattgaaatggtctttccttccattttaaaatgaaatagtcattccaccaaaatggtggaaagtcaattctactggaatgatattctaatactttaaatgcaaccaaacagaagaatgaaataaaaattattttcttttcattccattccattacctcaaaccaaaccccacttcattataacttgtttactcttacaaaattataaccttaatttatatttagaatgtttattaaaaaaatgccatatatgtatctataagtttaagtttatttcattttaaacaggtgtggagattgctcttggaatactagttctagtttttggcacatggagactatacaaattcatagataaaagaaaagaaatcaaactcaagaaaatatttttcaaacgaaatggaggtcttttgttagaacaacaaatacattcaagtaacaacaatgttgatcaaattaagttgttcgattcaaaagagttagagaaagcaactaatcaatttagtatggacagaattcttggtcaaggaggtcaaggcactgtctataaaggaatgttggaacatggaaaaattattgcagtaaagaaatccaaaataattgatgaggccaaa

SEQ ID NO: 10400 - DNA, 637 bp, Cannabis sativa
aactaatagtggaaactactcgaatatgaagctggatgcatgttaaatttgcggggttggttttgtaccctattaaggtgagtttggtgggaagtttgccgcgtgaaacaaactattgggagaaaaaatattgctgaaattttgccgacaaaagtacaaataagctttatttaaacaatgtattttatgctagtaagtttttaaaaaatctttgtcgatgcaattattacttttgccggcgagcttgaactttgctgacaaattaaagttctttaaatattacgaaccttccccttcttccttgtttctagttgtttggactactacaaaattgactttttgcatcagttaacaagtcaatcaacactaaaaaccacaaaaagtttggttccaaattttgcgtcagttgcttttgatgctactttgcatcggttgaaaattcgatatttttagatattgcatcgattagaaattgacgcaaaataacgtcaaataaaaaccgacgcaaataaattttcttaaaaaaattagtaatatactaaatgggtcagtgctatacttatatctaaccctaatataccatataacataaaaccctattcctaacatagtctccccttcaactctctctctctct

SEQ ID NO: 10401 - DNA, 598 bp, Cannabis sativa
ctattttctcttattatattttttttcataaactacacatgacacattgtatatagcataaaagtttaaacaattttaataaattattttttttactaaataaattacggcgatttacttcttaaaacttaagaaaaccattgacaaggagtttcgaaaaataagaagataatttagtgagaaaatcatatagtggtgatggatttatttagaaaatgagaagagaccaaatcttgaatctctaaacaattggattttttttaatgaataaatttattgaaaataaaaaataatattgtaaagaataagaattaggaatatctcatctagctataactacataaattttttatctactcgaagagcctgtcgagttaattcatgtacaatcataatgaccgaccaataaacatgtattaggaacattatatgtcttttaatttttcttatagttattttgcaaaatatttttttaattagtatgtctagtaaattctaccttatgtaaagtatgttgtgaagattatattttacatatatatataagagcagtaataaataaaattgaggtgtgatgattacatatttttatattatg

SEQ ID NO: 10402 - DNA, 1117 bp, Cannabis sativa
cagtcccaattgttggccaatattgtctataaaacagtccaagaaatccgtccctacctggggctttatgggggttaatatcacgcatagctttgaatacttcctcactgttaaaaggctccagcaggtactcgttagtagctctggaaattcggttggggataatgctttggaagtcatctaattcctcctttgtagccggagtagatgtgaataattgtttgaagtattcacacgccacccgaccaatattccaattacccgttacccattgaagccggtcatctagtaagacatggatagtgttttttgctttcctattactcgcctttctatggaaaaactttgtgttcttatccccttcttttagccaaaccgctctactccgttgtttccaaaatttctcctccttatctagccagacattttgtttcctttccaactcttgcatttgttgccaatccatttcgttggtgcttttggacagcagtgcaattttatcttcacattcccttaattgccttgtcatctcttgcttctttgtcttgttccattggtgaagtgcctccccacaattacccagcctgttcttaagctccttcgcattagaaatctgcttgtcttttcgccacaccgaatgcacaattttcgtgcactcttcatcttcagcccaagcgctctcaaaatgaaatcgagttcgccatctaatcgcattattcgtctttagattgggatcggaatccatgaggaggagagggcaacgatccgaattagtgcgatccaaatggtgaactttcattaatggaaacatatcaaaccaatctgaattcccacacacacgatccagcctttcaaagataaggtcatttttcctaccattgcaccaagtataatcacttccttcataactcacttcccgcaaatgacaactgtctaaagcctttctaaaattgtggattagataattcggtttagggaggcctccctttttctctctttgatgcagaatctcattaaaatctccacccacaacccaaggccccgagtacattctacatattcttttcaagagcttccacgaatggactcgttgacttggatctgggtcgccatagaa

SEQ ID NO: 10403 - DNA, 608 bp, Cannabis sativa
aacatattaaatttttttctcatgttgcattaaaataatttttctttctatttcaaaataaaatagtcattctaattatattaaaatgatagaaatattattttattagactaacattccaatactttaaaatgatatttgattacaagtaaaaataaaataagaatagtaataagattaggaatagaatctaatggaatatttattgttttgtttggtaaagactataaaattaataagagaataaggattcatatgtttaggattatatggaatggaacagatttttattattttgaccaaattatcccatactcttctaaaatgacttttgatttatcaataccatcattttacaaatcacacacaaataaataattgttgacggtggaaactcatcaactagaaaatagtcaaaaattcaagattcaatataaaatataataaaatgaagataaatactaagaactttaaagtaaatctcaaagctttagaaaagaaattgtttacaccaaaagtatttctgacgatgtggacatcaatatgtctatagccctatgcttaagttgacttcgagaactctagagacttcgataactatctaactc

SEQ ID NO: 10404 - DNA, 669 bp, Cannabis sativa
tcagcttcgacagtaagctagagagactcacttccttctcagcaaattccaagcagatagataatcccactgctaatatggctcaaaaaccatataatcctggctacaactccaatcatggccgtgggagatctggaaataactacaatcatgggcgtggtaataacccgcattctggaatggctcgaggaggaggcacaagaggaagaggaagaggaggaaggcacaacaattctaaaccaacatgtcaggtgtgcggcaaatatggtcattcagcggccatgtgttacaatcgatacgatgaaaactacacagggcagccaccaaacagtgaacattcacaagagaagcaacaacaatttgctctagttgctacacctgaaaccttgaatgatgaaggatggtatgtcgacagtggtgccagcaaccatctgacatctgaagctggaaagattaacaacaaaatcgactatggtggtaaggacaaagtgactattggtgatggtagtaaattgcacatttcaaagattggtaacagtactcttactactcttaccaattcatccttagtcttaaaagatgtgttacatgtaccctctattgcaaaaaacttggttagtgtttcaaaactaacacaagacaatgatgtgtcaattgaattttttgctg

SEQ ID NO: 10405 - DNA, 631 bp, Cannabis sativa
cttcccctacccaaaggatgacatgccttgccatgaaggtctaatagtgagagcaaggagatcttggtaaccagtggcatgaggggcaagccaaggatctcaggctcaacaacagcccccatcagccaacctttggctagatagccacctattggggcatctctttccggccaggggagtgtactccatcctttaggggagcgtaccacgcaaaggccaatcttcaatcgtctaaggccgagaatgggtgaaaacacccaaaataacaatttgagaagtgggactgatcacttacatctagatccacgtaattctagcaactagtgtgatcttcccacattgacaacatcagccaactaaggagtcacaggcagccaggccctacttgctacagagctggccgaccatggatagatgcatagtgcagggttggccagccagagccaacatccttacaattgagtggtcggccaaggcctgtaacaaaacacaggtttggtagacctttaccgtacactctcccagattatggccgacaagactctgacacattttagcctgcaacccctccaaggaggaccagtcaatgaagtccctacaagaacaaatccttctatgcaagcacaattgg

SEQ ID NO: 10406 - DNA, 656 bp, Cannabis sativa
aaaaaaaaaaattattatgcattttcaggcataaaaattagctaaaaggttacaattgaaagttaacagtaacatttctctattaataatatataataagtctcttaattaataaccatgatggagatgataataagtattaagtttagaaaatttttctagtacattcttaaaggttcgttctcatagactttttatctgttttgacatttatttaaaaaatttaatctaattttttttcagcatacgttatagctatttaaaataacttgtaagtttttagaaacttctgaataatttagaatgccaaaaataaaatttaaataatattacttaaacaatcaataaaatatttaaactttattaattattaattattataatgtataggatgaataaaaagtctaccacaatactcatggtgtattatagagctacctataactcattttcaacaaataaaggattaaaaatgtctactaatgatagtttaaattgaatatatgacatgatcatgattcatgagacaatacttgaattgaactatcatatcatcaataaatcttaactttgttttttcttttttatatataaatataaatataagtatcaaaccttcttcaacctcataacaaaaccctctctctctctctctc

SEQ ID NO: 10407 - DNA, 799 bp, Cannabis sativa
tgaatggttataaacttttataatgatctatattaaaagttagtataagaataagacttttatatatttgatactagcaaaaaatggtggggaatgattttattgatatttaaaatttatatatatatataaaaaaaaattatgacagtgtttatatatcagataaaaataaaattatggtattcggtaaatttttaaaaattgataaacaatttatagaaggcacttttttatacacgtaaaagtataactatttttagtgtcacgttgtgtgtgtagaattaatatcttttgaaaatttattactagagaacctcataaaattataatatattaagtactttaaaggtgttcaatttataggggtttctaatattacttatttaattaaaatatagattcaataataaattacaccattatgtactttcgtgtatataatattataaaatcaattttatgacattatattcatctagctatgtagctttcatatcagtttttcttttataaggaagggaataataaagggtttaagtttgcatgatataattagatttaaagttgaacaaatcaaacataaattatagccatcacaaattactattaaaaagaataaatcttattacattatatattattataatttatatataacgtgtattatacgtatcttaaatatatgtgtggctataaatcaaacaaattaagcatgcaagctgtgtatgcattattaagccttagcaaatgtcttttttttctcagtgtttttcatagcaaaagttttaatactaacatg

SEQ ID NO: 10408 - DNA, 687 bp, Cannabis sativa
ccaacatgcatgatcaaatataagagggaacaagacatggatctataagaaaaacaaaattcctttttaaaaaataataaatataagaaacacagaaggcacaccacaataattacacaccgtgactagtgattggttttaagatattgcatggcgcaaaaattacactggagaaataataaaactaggctaataaatgtaacaatttttaatagttgttggctgcaatttggtcattcagaaatttctttgtattattaaatttgtaaattcactaataaaatagcatggagatcaggctgaattgacgatttaaaaaacaataagcatcacaagctaaataattagtcgtcttgtttgcagatcgtttaacaaagataatagaaacattgtttaaagaaaaaagtaaatgtttacaatcagaaataatcaagccaaatagaaatggcatttaaagagtatgacgaattgcgtgaacaacaacttgacaatcaatttcaacaataatttgagaaaaaatttaatgtttgatcaagcttataagaatctctttgactcccataacttctgtcataatcggttgtacacaagcaagtaacaactttgaattaacttaagtgacatttctttcatggtcacgcgttactcaactaatctcaaagctattattcacacgaacaatagaag

SEQ ID NO: 10409 - DNA, 665 bp, Cannabis sativa
aaggaaggaatgtctaaaaacacaactagtaacattccagaatccttgccattgaaggtgcagtcttgaaaaaacccatagccctcattgtaagagaagaaaattgactcaaaggtggtcccaggtgatttgagagaaaaactcaaccaaaaaactactgtcgagcagcgagtgccataggtgacaatgcatcactgcaaggaaggtccaaatcatgcaccgcaggactctcgagaaaagctaaacaagaggaggaaagagcttgacaaggaaatggaagacctccactgaagaatagcctcagttgcgtcagaggaaggtagctgggacgaggatgattttgacgatgagtcacctttccaagagaaatccaatccaaataactacccccaatttcaaagagcctaatatacttccatacgaaggaatcatcgacccaaaatatcatttggatgcctttgatgaaatcatgaaaatgaagagggttttacaagcttgagaagtattcaggcgcgtattgccccactagccatactctacgttctccaaatcttcgggagtattggttcttttacactggcttcctagtgaagagggtgcccacccttcctttggccttcaaaaccctagataagcactcttattattatttgttatttttttgt

SEQ ID NO: 10410 - DNA, 840 bp, Cannabis sativa
  modified_base (697)..(708): a, c, t, g, unknown or other
tattacttattgtatgattaaattattcggatttttcatctcccaccagctttcttggccttgttcgggatagttaaatttggcgtatttatctccacaatgtagggcaatttatattcttttttggttaaggaaactggtaaattagagaatggttatgtgtcattgtgctattattataagtcattaatgttgtatttgaaaaatcgaatcactcccgaaacattatctcatatggtgtgtgggcactttaagagattctctaatgatgtgttgttgtttagcattttcgtagataaaaattgtggttggccaacttggcacactaatcattttttttttatttattttttatttacaatagacttatttaaaatttttacttaccaaattttaacatctattaaagggtgtctttgtactttttaggctgttaaacttttttccaagttattgagattgttagatgggtaaatatcattttgaaccctgtattttgtaaaagttattaattgaattttttgttttgttaaatgataaaatagatactgtattttctaaaattatacaaataggactttgaactgatttttcgtcaaaataaaacttaataataatctgatctagagatgctgtgacaaaaatggttacattttctatatctattcgtggtaaaaattatcttaaagttggttannnnnnnnnnnnaaattattaaaaattgagctcagagttctatttttattattttgaaaaatataaagtccattttgtcatttaacaaaacagagactccaaatggtaaatcgtgtctcttgaactttgataaatgccaaatta

SEQ ID NO: 10411 - DNA, 606 bp, Cannabis sativa
aaagcttgctcacctcctccaaccccacgggctgagtacaatttctggccagcccatttaaaccgtggcccactaagcagtttggccttggaagactccattcattattttccccaatctccccattgtacattcggcccaatcttgatacgggcccatctcttttcctaacccacttaacatggcccattatccttccttcttcatagagctgccacatattatttaaattaagaaagttaattggcattaaatgagcccgcacacgtggctcctttagatctcttcacaatctcttgaatatactgtgaatagtaatcgacccccttgattctcgcactcttttattggaactcccaatcgccgccgaaccataaattgtgggataatgatcgttctcaatcatcgcacgtatactgtgcaacgtgatgtcttccttggaaattcctcgatcatcgtgtcatcaaaaacgactgcagccgccggcactgtgtccaccgaccgagaaaggccaatcaatggagttttgacgtttctgatcccgttgtcttccttgtgtcgcaccagagcatcccgtacatcactgctcccaatagtgtcttcctc

SEQ ID NO: 10412 - DNA, 772 bp, Cannabis sativa
ggtggaagagcatgaaacgtccataagaatggttcaagtctctttaagataatactaaacactgaatgaggtatattttagtcattgttattattaatgatttaaaattgaactattgatcttggatattaattgatgatcaacattattataatttataagatattgattatattttatgattcattaatattaaaactaacatatattctctgcatatattgaaacatttgtatgatacatatagtgttacaacattagcactgcagattatccgtcataaataaatgaatcatgacattccttctctctaaaaaaaactatcttaattgggaatatgagttataattattatctttttatacacatatatagttttcgatagtactcgaccagattagaaaaagagaagaaaaaagaaagcacacatcattacattttgacaataataacacgtacccactaccagtcatgatttcatgcaacaaattgtataatgattcactaaacagtaaccacactctgatccattaattatatatgtacatattttttcgtgtttctgctatgctctctcaattcgtattatccccaaccctccatgacttatatatagcaatgctaaagaatatctataatattcagcatttttatcaagtataattaatgagatcttatttattttaatttaataaagattataaaaaacacattaactaattataaaatactatgtcataaaaatactaaaaagactggccggttgaatccc

SEQ ID NO: 10413 - DNA, 699 bp, Cannabis sativa
ataatgatttgacatttaaaggtcaggtatctacgagagtttcagaaatataaaattacttaaatatttattcaaaactgagagttaaacatatgtatttaaggcacaaattactctaatttttaacatttttttcaaaaatttattactcataaagtatttttttaaaaaaaaaatcaaatttttacaaacttatacccttaaactcttaaaaataaaaattccccaaaaataatatttatttacatgtacgtacgatggtgtactaggtgatatctataaaaattattacttttcatataatggcttgaattgaactgaagtagcctttattttttaaagtataaaaatgacaatccctataaactgctggttcaaataaaattaatctagcattttaaaaaagactttggatttttgttttgttttgggtatagttaaaaaaatataataatacatggtatacaacctaaccctattaattaaacttgttgtaatgtctcactcaataatagactaaagctttaacctttttgtttcgagtacatatatatagattataactaataactattgtgtataaacaattaatgcctactaattaatatctcaagtactaataaatgatgacttttacacaattcaattaattaattagtacaataaataatttatattaagcaataatctaaaaattac

SEQ ID NO: 10414 - DNA, 702 bp, Cannabis sativa
aaggtaaagatagatgaataaaacacaatattggatcctccaattgtgttctccactttcagccgtctttcttgtcttactccccaaattcgaatctccttccaaaacctactctcctcacctttttgggtcgaaacaggaaattgcctaaaatagccaagcaccgcgatcttgcttagagagtcacgactcttatttttcttagaaaacgaggatttttaatttttcccaggaccgcaacttccaaatgaaggtcgcggctcttgattttttttttctttaaaattgcttttgtatcttttggtgagtcgcgacttttgatgttgattcttgaaaacttgattttttaaatccttcaacatgcatcgagtcaagaaattcaatcccaagattcttttttgcaaaagttgataatttcatctgcaagaaattcaaaaaacaccatgttttcaccaaaaagcgaaactctcattatcttaaacttgaaattaacataaaaacaaaaataagcttaaaaccaaacaataaactataaaaacaataaaaataagcttaaaactagactctaaaataacctaaaaatagacctaacacttcatcttttatgttggtgcatgcctaacattttggaattaagacaattacattctctagaatcacccttaaaataatatctttctaattaattattattattattat

SEQ ID NO: 10415 - DNA, 644 bp, Cannabis sativa
aattaattaattaaatattaaagtattgtgtgtttaagaagatgaagtgggttctctttttattatattatataaatattattattgaatattactgatatttaatatcttttataaggtgatactatatgattctattgagtattgtctagatgtcatacaattgattagcaatattttttaaaatttattttttttaaggtatatgaaatttattatttaattacacaaatatctatataatactaaaaaaaatataagacaccaataatattttttaataattctcatattatatggactaggtaaggaaaagctctcgaccttatttattgtcatcaaatttggtttttgtttgttactagttactacctacttacaaatagattggatttgacctttcaatttcattctttattgaattagggtttattttagtttttgaaagttagttgttttattttgactctccaatttgatctagttctttcaaagtacttagaattttttcattatttatttattaatgaactttgttattttgtccgaatagttggaaatctacagaagttgagaccccatggcagaatttacgttctagcagcagaaccatgcgaagcaggttgaatgtcaacttagtcgca

SEQ ID NO: 10416 - DNA, 508 bp, Cannabis sativa
ttttaaaaaaaaaaaaataaacaaggaaacttttaaatggttaatataatatgtgattgagttgaaacatttttttggtatataatatggtaattgaaatttgtacacttattattattattattttagtatgagatatccattataatcaagggtatctaataaatgaaggtaataatcatgtatgagatactcactataatcaaagaaattatgaccatttgattaaaaatcaatggttgttatttgtatttccgaatagttagtaattggatcgtgacagaggcctaatatggaggcgagactcattccctaggtccacgaagaccataaccacagtccgtccaaatcgagtgaagccagacgtgatgaatgactccaactatattgattcttgaatacgaattcagagatgccaatgtcgaatcacccatttaacattaaaagggaaaactcatctagaacaagataagatactctcaggagatgtccaggaacagaatgaaaa

SEQ ID NO: 10417 - DNA, 671 bp, Cannabis sativa
aaaacagaaaataaaattgtgtttaataaattatattttatttaagtcgagtttgagttcaggtttcgggtcgggtctaggactagatctggatctaggttcgagttcgggtttgagtctagatctgtgactgtgtccatgttcggagtcgggtcgggttcaagtctggtgtccaagtctagatctcaaggtccaggtagaaatcgaagtccaaaatattgattaagaaaaaaaataagagtgattttacttttttttattaaaaaattattatcacacactcaaaccttctttgtatgttctaaaaattcaataaattatttgaagtgacaaaaaaatatcaatagtacttaatattttataaaagtgtcctattagtataaataattatgtctcacataatttaatataacaattattattgaatatctctaattatttagattgtactaaatatcactgaatataaatgctcaaaaacaaaatgttaagcttgtagcatgttagaattctaaaattatcatatattatttatgctatgtttgaatgtttaattttagtgaggaaaaaaatgtagagaatacatatatatttttttttgtaaatttttcttttcttttttttttttaccaccaaaattaaacttccaaaaataactttaaaaaaaatga

SEQ ID NO: 10418 - DNA, 515 bp, Cannabis sativa
ccgccgcaatcacttcattaactacttcctctcggacaggtgaagcagtaaataaagtagaaaaataaatgctcacaacattctcgacatcctctttttcatccctccaaatcccccatcggtcaacaagaccatgaattgaattcttcttcttccttcccgaggccttatggtggaaatactttgtattccgatcgccacatttaagccaaagggcccgactacgttgacgccaatacttctcatccttctccatgagcacatttagtctcttctcatgttgcttcatctcaagccacctttcaggctgttgagcattagacagctcattcaataattgttttgccttacttaactcctcatttaattgcttctttttcctcaaactccatcttttcaaatcaatcccacatactttagatttccttttaaatcctatggctgaaacaaccggccccccacaatcccaattattatgaataatctccttacattcatcctcctcacaccaagct

SEQ ID NO: 10419 - DNA, 870 bp, Cannabis sativa
aaattcaaaggatactacccagttgtaggcctaaactacactcgtagtgtacaatatccgggaggggtacttttggtgccatcacaataagcaggaggagttcccactcctagcatacaatttcaatcacctttggcttacttgcaaaatcccactgtggctctggcctactcagagtacgaagtaccaacggccgggaatgtagcttctggttcctttgtccaatactttactcccacaccatcttttgttgcaagtgcaacactgactcatcaaatagcgtgaagcaaaagatcagctaggggaagtacccagaccaaaagctgaaaagggaagaaagcatccgggtatgagcagcagtatactaagtacactgagatggtggacactcaagaatagttgaatctggcaaccaaccagaatgtacattactacaaacctccacctatgcttcgggatcgatctaaaaaggaacctaacaagaggtgtgagtaacacaatgatattgggcatgaaactaatgagtgtaaatccttaagggatgataatttgatacgattggaccatctctatgactgggttaggaatcgtttgctacatatgcaagagagaccaactggatttcaagtgccacctagaggggtagcacaagcacctaaagctcaagtacctcccatggtgtagaatcttgtgcaactagatggactttctagatatcctcgtagacccaatgggaggatagctatgatttttggagggccccacatcaaaggaatgacttgcaatgagctaaaatgttatgctcaagcattagatcgtgatgatagaatatgagaagtaatttaatttcatgcttagaggctccgactc

SEQ ID NO: 10420 - DNA, 1004 bp, Cannabis sativa
cacggccgtgggcatgcatgttttcttgaaaaaatatatgctttgattcttaactttttattattatattttttagaaagaaaaaaaaaatcagtaatatgtaacactgatcccatctccattaatgacttatatcaaaaccacttttttacttcaaaataatacataaaaataatcttcaattgcaacataaaattagtatattcaccataatgtgaactctatataagtgaaaaagacagatatatataccttcataattattgatgtatacatatttatttatttttgttattttcaagatttaagaattattccaatatttttaaaacaaataaaaaaatataatataatgataaaaatattctaattaatattatatatttttattatacataatatgataactatagacgagctaataataataattaatatttatataacatcagtattaatttaaagtgtgtttagaagtaattatgtaattattagagtagtaattatattatatttttaaaataaattctaaatatcttatttaacgaaatagttagtaattacacaaaaaataatattatttaatgtttaatagttaatgtttaaaatgtaaagcttttagtaattacacgatgtaattacacttaattctcctagagacaagagaagagtgtgtaattaaaacccatcaattacctccagttactaaatatattatataaaattgtgtagttacttccaattacattataacttttcaaatgagcctttattatatgagtaaaattattattaatgattaattaaaaagaataaaataaagattttttggagtaagtttaaagttgtggatcggaaataaaatagtaaattgatctatcgaaagttataaaaaaattgtgaggtttagctcacttagtcaacaccacaaataattatcaactgtcgaaaaatcagttaattcggttggacttcacctaactatccgagagctgtaaataaga

SEQ ID NO: 10421 - DNA, 687 bp, Cannabis sativa
taagggatccatcaatagaatgttgctgcgaatttgagtaaaattatcagagagccccatcaagaaggacatgatgtattccatgtgatgatgttcttgcagcttctttactcctccacaggtgcatccgttgcagctgcaattcggcctatagttggataattcctcccatatagttttgagtttagtatagtacatactaatggtttggttctcttgtcgaaggttcattaaacctttcctgaggttgtatatgtgtggcccgttcctttgatgaaaacgtatcttaagatctgtccaaatagctgctgcagactcatcatataacaggcttgaagatatttctttagagacagaattaagtatccaggatatcacaatattattattcctaatccatgcattgtaaagattgaaattagtagaagaaggtttaggaatagaaccgtctaagaacccaatcttgtttttgacagaaatggcgagctgcatcgcacgactccaagagatgtagttgtcctgtcctgtgagtggttgagagacaagaatgttcccaggattgtctccatgatggagataataagggtcagatggatcttcaagaggatttcttgaacttaaggcctgaatactttgattgctgttatctgtgatgtgctgtgaactaggggatgcgattggagtgga

SEQ ID NO: 10422 - DNA, 795 bp, Cannabis sativa
aataaactgtacacaatatatatagtatatatatacatgtatataaataaaaaagtatatatatatatatattatatatacatttaaataatcaatatatttataatacacatataatacatagaagatatattacacatataaaaaatatacatagataaaaaaaataaatatacacagatcaaaaatacatatatacacaaataaaaaatcatatactgtagatatatataataaataaattctgtacaccctaaaataatatatatatatttatacacaaatttatatatacccaaacttaattatataaacagatctatatataaatacaaattatatatataaatttaaaacttaaaaacaatatatatccctaaatcttttaactaaaataaaatctgaaatataaaacaaaaaaatacttacatgaaatgtggccggtattcggtggtggtggaggtgcgtcgtcgtggtcccgcgtggtgcgtcgtggtggtggtggaagagggtcagatgggggaagaggctgaagggaattagggttagaggaaaaaaaaggggaaaatgggggaagaggctcagatgggataattaaagaagcattagcgagagatgctccgctgctaatagttaataaatgttttatattttttttattttttttattattattagcggcggggtcccatgctaatactcctctgctaataataatcgaactgaatgggcaagattttttctgcccactcattagcggcggacctcgctgctaatactattagcggtgggcaa

SEQ ID NO: 10423 - DNA, 1868 bp, Cannabis sativa
gaagataggcttcaaattggtatctcggggttcgcgcaaccaagcagatactcccagttgtattaccaaacttgaacaataaaacaggcgagcaggaactacacagagtatgatcaatccaatgttagaaatggagctgatgagttcgaactgctcctcccacgctcgtcttttatctcccattaaactttctgactgttcatcaagcttcagtatacttgttttgttctgcttggactctaccatttcccatagtacaactctttcaacgtcacgtgtctctctatgagaaaatcccatagggtggagaagacaaagtccattttgtcggtccactcttaccctccccatggcacaacagaccatcccttgccatcctttgcaccatttcttgggaaaatttggtagccgcggttccgttgccgaccgtccatggtgtatgaagctcgtgagatagagaggtcgttcatcaaattccaaacgttcagaaatttgggattcctccatttgatgtggaccccaaataattggcccataacacttgaataatgggctattttctttacttaggggagttgtacaaagtatgctttgggcccaaattgaagtaagtaaaatctcaaaattagattggcccaggcccggatcccacacagtgagaaaagccctagccaaagcacgtgaaaggagcccttcctgcgtctctttcttctccggcattgtttccagcagctgtttcttctttggcgatgtcaggggctgctcgtgcatctccgactttgcaagcttcgttgctagaatggatcgctgaattctggatatattctttactgtttttctagagatgatcattaattgagaattgtgattcgacactttaacttcccccatttttgttggagactcgagatgattaacatgttgtttgttgccatgttgtccgacatcatcttcatctccatcttctccttcgcagttcaagttcttctcctgtaccgattcacatgtctcttccctctccgactccggtgtgcgtcgatgaggctcaggtgcgcatcgattggaactcgaatcagaaacaaaaatggggctatagtccatatggctcacccgagtatagcacgacacattcccaaacgatttatgctcagctcgaagtcgctccatctcttgccaatctaccaccatcaatttcggtggtggttcaccctcaagctgcaccatctcctcctcacgtctgcaagcttgtcgggatttgttatctgtgtgctcacaacttatctttggttctgctagttggtgttggaatggacgtgttcggggttgttcgcctctgagaagtgacgtctccttacctcctagtggtgggaattgggcgtgggggtatggattcgggtgtggggaaggttggggaggacactggctttgaggtattggcgatcgaagaaatcgaatctccggttcgattgtaattgaggaagatgatccgtccctgtttactgattgaggctgaaactccttgatggcagtagccatcatcgatggaggaaatcgaacctctggttccgtcggagttgaggacaaagagctatccccgtgcacgaatcgaggacaaattttgttgctggcggggactatctccaccatctcttttcctgctgcaaagaaacgggttaactgagccatcattatctctggcacgcgctgaatttcagctcgtgttttcgaaacctctttttccaactgagatctaacgtctgaaatctccttctgaatttctgagcgtaagacttccattcttacacccagtagctccatattagtgtccttctcaggtcccatggacttgtgctctgataccatttgat

SEQ ID NO: 10424 - DNA, 625 bp, Cannabis sativa
atcctatgaatcaactggggaagaatcctgatgatgaaagggtccttgtgtgtatgatggcccacgttggcccagatgcggcccaagtgattgaaagaccccaccatcaagtgtgcaaatcccgtacaccacaccaccacccagaacctttaattattcctgggcccgtgggtagtatggaggaaattacaaacaagttgagtgggcctattcttattgaaggatcgggccttgtggacagcaatgaaaaatggttccatactaatacctctcctcaattgttgggctcgaagtcaaaaaagagaaaggccacgggcagtgtgacgcctatcataacggcaaattctgaagccccccctgccactcctacgcctgagattcatgtcacagttttggagaagatacgggaagctccatttaatcttggtaaatcgacccccaggaataactcctctggttcaaggaaagcgaaaggaaggaaggtttctagcaacaagaagggcggcaatgacaagacagtctctgagaaacccagcaatgaggcaggtatggctacttcgagtactttatctgagattgagaaccaacttgttgatgttagaattgagcaaaattttcaattggg

SEQ ID NO: 10425 - DNA, 866 bp, Cannabis sativa
tgaggaatacagctcacctcattaatagttttattatctaaacaagtttcatactttctcattcttaatttagttagaaaaggttaattataatttttaatttcttaattttaaaatgtacttaattgtatcccaaattttcaaatcgttaaaaattcatccgaactagggatggggagagtgtgaggtcatgtactggcatacgactctactcaacttttaataaattatttttttgcataattttttatatattttatatttccctataatataattttttttttacatttttatctttgtaaatttgtaattttttagttgagcattgttattgggcgtcagtggtacccaacaccttttatatgttgcactctataattaattaacgatattctctaaaaattattttttaaaattatatgagacctgatacttaattacaccaataagaagaggatgctaggcaccaatagtgtcttttagaatttatctttttagttttatttcacataattttatatttattttataaaaaaattatttttatttttattcgcacctatttacttatatccctaaaaaattaaagtttatatttttctttcttctaaaaataagaatttttttattaataggttacttttacataattttttttgcccccacaaacacttactgccacttctgtcactgctctgaactattgagattattcaatgcaagaattttttttatctaattccgtttaattttattaatgtgacgaatattcatatattaaatcgtgttttctaaacttgtattcatctaatgtgtctcttaataattaaagataagtttttaaatctaatattctcaatatt

SEQ ID NO: 10426 - DNA, 604 bp, Cannabis sativa
tcctcatcagtgagagaaagattattctgtatagaatgtaaaagaggatccatagtaggttggaaaggtaatctatgtaagattgggaatgtagcagagatcaggagaaaggaaagagagttgattctcgaagcccagaaagtagttatatggaataaactatctcagatcaaaagaaaaaaagaagaacatggaagttaaagagagaagaaggtggttaaaaacaataactgcaacagacctatgaaagacacttatgatataaaagttaacttaacctggctttttttaaactttatcacaaatatatggcagatttaagtttgagcactttttataaaattaggtgttttttcttttatttttatggtatatattatgtcatatttatatttatgttataattacttccaaatatcatatttatcttctttatttgttttattaaaaaattgaaacgagtgaaggagggtcctttctctttctccattcagctctctgatcggctcaactatagctgccatcccccattgcaactctgaccaaagctccaccgtcgtttacaactcactatcttttcctcttcatttgaccaacggaaaag

SEQ ID NO: 10427 - DNA, 518 bp, Cannabis sativa
caatacatatcaagaacagattctaattatttgtttatttataaaaatttcatctaactcaattgtaaagatttttgtactgtatatcatcctgggtaatttatttgactaattaaggtacgatcaaatttgcatgcctaaactaaatcaaaggtctctaataataaatctgatcaacatttgacgataacgacttctctatcaaaaagaaaacgacaaaacttctcatttcagagtataaattctccatcttatcttcactgctcgcagtgcacacatgagctggtctcaagaaccatatccttctatttatatatacatatacatattatataaacatatgccaaagtcaaaaaagataaaagaaaaatatatgcaatgacaatattagtaaaacgaatctggtgctcttattcctttaaatccagcaagagattattgtgcatcaacaagcattggaatatatgtgtaaagatatgtatattatactagtgaaaagaaagcacttgaccgacaaa

SEQ ID NO: 10428 - DNA, 821 bp, Cannabis sativa
cagcacacagttggagtttatccgagactgcaccactagcagccaaatcccagcagttcttaacaatgtcaaaacacataggctcctttaaccaagaattttcgaacttgaattttttattaacattcaacacttgtttcgcttcagtttccagccacaaagggcagtggtccgatgaagagaattcaagattaaaaagggtcgcaagagagaaaacctgagaccaaagtgagttaaccaatgctctgtccagccgaatttcaatccaggtgctagtacctttgcctttttcccaagtatacggatgtccaaccagttctatatcttccaaaccgcattcatccatggccgattggaagccatcaatgaaatgtttgggatatcttcgactgcctcttttatcttcatgtctaacaatgttgtttaaatcaccaattacacaccacggtagattcgagtcccttgctaaaaaccttagcaaattccatgtttgatgtcgttgggcacgcactggctctccataaatccccgtgagacgccaactgcccctctcccgagactcaaccaagaatttgatatgattttgtgagaagcccatgatacgtccgttttcttgatattttcaaagaaaagccaagcctcctgcactttcttgggcttcaacagtaaagactccctcaaaatccaatagccggcccactctttccatttttttatcactttttgtttcacataaaaagataaagttgggtttcttttgagtaactatctcttttaggaattgaacggcccgttggtcccaagcccccgacaattccaac

SEQ ID NO: 10429 - DNA, 509 bp, Cannabis sativa
ttttctttccagcagtaagtatgcactttatgtcctgcacaaaaatttgaagagtaaaatttagacctatgaagagagacagagataagacaagtttcatccatataatacatgattgctcaagctgttgtcctcttaaaaataaacataaaataaaagtgaataaataattttcatgacccacatcacagataagaaattatacaaagaataccaaataacagttcacctttggagaatgtcattcacttgttaagcattactgctaaacaaaataagattaagtaaattcataaagcaatatcctaaaaaaaaaaaggaattattatatcccaaagaaccatttgcttaccttaactgttctctttatttcaagcaaagcaatatgactgagttcctctccatttcatagcaaagcatgtgataattaatttcattataagaaaatgtatcatccatggaattaaatattgaaattttcacctgaattctctagagttcaagtacag

SEQ ID NO: 10430 - DNA, 960 bp, Cannabis sativa
gaagaagatgagatttaggtttagttagggtttttttttattttcttttcttttatatttttttttaattttaattttaaatcagttttttattttatttttattttatttttcttttaaatatttatgtacgtgggccaataatatagtgtcatatggacaataccctatgtacacatgggtagtcaagttggcaattaacaaccaaaaataaatagaaatggctaagtgctaacaaaacttgagtttaaagggttttatcatcaaaatatgagttttagaggttaattattagcgaggtgatactattgggagttttgacgcaatttactctttataatatatagtaaaaaaaaaaatttgtgaaagaacgtgacaatttggaaatagcgcaccaacctaatatatatagggaccttcttctattggggctccaaaaaagactccatcgatgggggtatctcaaaggcaatcagaacgtatcacatcatttaatgaagttgtgttttatttgagcaagaaacatcagattaatattattgagcatctttatttttatattatttttattttttgttttgttttgttagtttctctctctaaattcttcctttctctctctaaaattttatgagctcttttcgtttcacaaaccatcgataaatccaaccaccacctccatcgatgaacccaaacactacctccttcaatgaacttaccctattatcaaattctcattttttttctctttttcatcttttgtaattaagagatccataatagattaaatagctattttttgtgattctattcttaaaggtccattttgggaagaggtctaaaaatacaaagaaaacatggatctattgacctaaaataaaagtggaagaaaaattctaaaataaatattgggataaaatctctaatccctaattaaatcgaatatatgaatgtcaatta

SEQ ID NO: 10431 - DNA, 996 bp, Cannabis sativa
gaaactactcatcataatcagatggaaatgattaatttgtttcctaaattagaatttcttcagcttgatggcctttcatccctccaaagattttgtagtgcaacagattcatcatcgtgtatggtatttccactcttgtcaaagctaataatagaaaaatgtccagaaatgaaggcattcgttagctgtcccacacaacccttttattctgaaaaggtaatatttctaatttatacctataagttaagtgtatattattatttcttttataatactttttactgaaactttatatacaaaaattacaatggaaaacatattttagagctggttaatgacaatggaaacctttacatagtgaactggaataatacactatacacaatatacaccagtgatgttattatattgtgtttaaatccaagagcccaatcatcgtatagaataaccaatgaaatcgtgaaatcaaccaatgtcttacttttctttcatcatttccactaacaagtggaagaaaaaaaggaatttctttcatttttctattttaatatactgtcattttaatacctaaattattatatttaattatttatagaattaattgtatatttacgaatttgacaatattattattaattttacacacacaccgtcttcaagtgagctattgtgtaggagcaagactccattttggatgaagaaaactctgtaatttttaatatagagtagatttatttattcaattattacaattcatatatttgcaggtttgttttcctaacttggaggatttaaccatgaagaaaatggagatagaaatgttatggccagaacaacttatgttatcatcaacatcaagtttttacatgcaaaacttaacaaccttagaagtgagaagctgccataatttaaagtatgtattctctttctctcttgctcaaaagtttgtaaacttaaagagtataaaagtcgaagattgtgaggcaatggaagaca

SEQ ID NO: 10432 - DNA, 613 bp, Cannabis sativa
gatgttggatctgtaagaaaatagagcatcttagatgaccatgtgtggagaggcataagacggtcatgtatctaaaaactatgttttaggcataagaaactttttttgtgactaaaagtcttatttagtcacaaaaaaattatattgtgactaaaagtttgtcactaaaggcaactattttttgtagtgagagtttgttataagttagtcgagagagtaagttagtggtcacattagtttgtccaactatgtttaactaattcttgatactactccgatatataatattgttcatattaagctcttaatacaactcttttttcactatttgatgatctttctctcattcttttctctgttctttattttctatcttcttctacatttgttaattgtttctgtttcatttaggctcaaagattcaatataaatataaatatagaccttttcttaacgaaataaccttacactttacaagttactattacctgcctagtgtcacgggcttaccttttcaggcagcaaaatacccgtgcggtacctcgacttctctaagccaaggccatccttcaaactatccgagaaataatgagctcatttttcacgcgaccgt

SEQ ID NO: 10433 - DNA, 638 bp, Cannabis sativa
ggatgcccaagtctccatgggcagttcaaaggcgctcccggctatctggtctagaagttcggcggtaaaaggtgtgacctctctgccaccttgtatgccagcgtcttctccatggcctcgacctccatactcagccccgtacggggtggagtctgcatgtcttccaagattttgacattatagattgttggcaaatgaccgccctcctatggacttgtacccttttggcctcgaagcgccccttcaaggccctattcgcctccctctccttctgcatatcaagatggtagaaaggaatcacgttcacggggaaggtgaaccccaccgaagggaccattgatagggccaaaaggtaagaaggccgagcctagccctgcttcaactaaggatcacaaaactgggggaagtcccccatctcagaggtggataccgcaaacttctgcctcttcctagtagaattgccacctgcagctttggaagaactcgctccttccattgcagatttactgtacctgccagaagtcgaacaacaacaaaatgggtcagcgcctggcatgatcccagaacctttgaaggtgatggatgtggaaccggtgttccagaagtaaaggcaccctcacaatcccctcaaaattcta

SEQ ID NO: 10434 - DNA, 526 bp, Cannabis sativa
caattatggaactcggacatcagtaacctgtcaaaaataattaaagagatagataaaaatttaattggaagcatttgtgggtgtcagccaaagagatttcaatgctcaagtcagtatgattgtagtaaaaaataacaataacagaaaataaatgaaatgtaaatagtagctggacggatgagtggacaagcggacgaacggactaaaggaacaactacagtggtgaggcttaagagaaaagtttagaaagacaactgtctacttgaacaagtgagtagtgtgagtatcgaaatgttcaatctcctgcctttgtcgtatggtttctttaatggtgttccctcggtaccgttgccctccatccacgtcacccattagactcgttcaagttggttgattccctcattttacgggaatggtaaccatgttttttactggttcaatatctacttggttccactcgtttggttgactggccgaactcggacccggttgcagggtgatcagcttatgtcccataggctcactt

SEQ ID NO: 10435 - DNA, 563 bp, Cannabis sativa
tgctaacaaaattaacataaaaagaaacaaaaaggttaattttgatgttggtcattattttcaaaaatggcaaacacatgttaaaatgttcaatttaaaaaatagatggtaagggtgtaatttataaacctaaattattaacagtatatttgattttgttttttaaaattattgaaaagaaagaggagagagaaaatatatattttttttaattttatgtatttataaaaaaaaaaaaagaaaaaaagaaagcatggaaatagattaagaagaaaacatatgcacgtgaatttgaaaaaaaaaaagaaaaaaaaatgaaaaaattgatattggcgtagaaatagattgagaaagaattctgccgattataaatatgacttatataagtaaataaaatataaactacgtattaggatgcaattaatttataattttatatatatttaaaatattttaaaaatgttaaaaaaaatttccccatgagtttctcgtaaaccaagaattcacacattttatatagaatagatatatatggtatatatcttcaattatcgaataacaat

SEQ ID NO: 10436 - DNA, 1330 bp, Cannabis sativa
tatatgttatttgtttttactctatttgttgaaaaactaattttatttttaatttatgtttagtgttttagaaactaatttcttctttattttttaaattataatcagtttaaattattttgtgtaatttatttgtatttattatgttatagaaccgaatttattttaattataacttgtttgtgttattctgtgttgtttgtctttattcattatgttatagatacgattctattttaattataactaatttgagttgttgtgttatttatttttattcattatgttatagaattaattctattttaaattatatatgagacatctaactctgtaactttttcgacaacgacacaattttgttcattttttaatgatttttccaacgatgtaacttttcgagcgccaatatcttcttcaacaattttctagcaatatttgttattagagattgtatcaaatttactaatagtttttttttatttgtcatattttaaactttgattatttttaaatctcatatctttttacattatttatttatgtcatataaaagtaaactacattaatttttcccatatttatgaaaaaacccccataattttaacttaaattcttaaagaaagctattttttcccactttttaatcaatagttttttcaaaatgtgctaaaggtcaagaaaatatccttatggtataaccacaacataggtgtacccaccataaaaatgttatatatttacaattataactatcaaattgtatatgccaaacatgttaaaaagcacttctcatactaaaagtacttctaaaatatactatccaaacaatcttgaaaaagtagtactttttcaaataagccttctatgctctcactaacattctaaaatcaaacaccaagcactaaatattaaatttgattagtgaattgattacttagttagaaagttagttaggtttttggttgtcggttagttagttggttggtgtgtttgtttctcttgtaatctcagctggtatataagctgttgaacaatttgtatcattttagttttgatgattaaaagttctgttgattcaattctctcttcctctctttctttctttctttcttcattactctgtttcaagctcattcgagctaatatggtaccaaagctagcaagctcttcttcctgattttggatctggtttgttgttgatgtgtaatggcacgaggtggaggaaatcaagcacgaggaggagtttatactcgtgctaattgtgaatctgaaaacaattctaatgactcgaacatattctctattcttggagaaaattctcgatcga

SEQ ID NO: 10437 - DNA, 819 bp, Cannabis sativa
aaaatctgtaacaatgagtctcctaacccatcccaagataattttttaccatggaaagtgccaggaccatacactcctgaaaaccaccatttatttccatcatccacttctatctgaattttaaacataaaaatctcatactaaagaataaataaccttaattcttctcaagtcccaaactataaaaataccaccagatcttcctaccgaaggcaaaacacaccattctttgtatatggatattcaaatacttcccataaactttatttcttcttataaaaatataatgtcaagactaatctcacaaatagcttctttcaccccacttctcttagaggctaagcggatgactctgatattccaaatcagaatcttcatgatgggtctatcttcttcccactatcatccttaacttctccataattaatattaaaatgtgaattcaaaaaggaaaacaagaagaaacataactacccacacaacataccttggcaagcatttcctatggtaagttttagggcaacgtctgcatacagcaaaccgcatatcttttctatcctctccttgtttgcaaacacaacacttatgaattggacaagtgcaagattccccattggaaatctttttctctaagtcttcagcagaaactccatcgtccggactgagcaaatttgcaacacaacggggatggtaaaatttgccacaggttgccaaaacacaacgaaacacctaaagcaattcatatcaccaggctcatatcaaacaactagctatgtttgcacagtttgcataaagaataaataaaacaatcccaacaga

SEQ ID NO: 10438 - DNA, 828 bp, Cannabis sativa
tcatcatatggttttaaagtggaacatttcttacacatgtgaagatgactccccctcttgatgatgggcgtgacccaggtccgtataacatggtatcagaatcaggcccacaattaagaacatgtgctatattccagttaaaatagatctcacatgtgagggggagtgtcgaaaatgcgctctggtcccatgaaacatcacatgtgagcgaattaaaaagggacctcacatatgagagggggagtgttataacatagccttcccaagcaacacatgtgactctttatgattggaacaacttgttgagaccatgggggttcatgaggcgcttagttggatcatggaatgtcaatgacagcaggttgtgcttgaaattgattgtttaatagtggtgtaagccttttgcagtttcattttagtgattttatttgattgtgcaagttatcactgtaaacaacttattattaaattgaaaaatattttcagtttattttgttaaacgatcagctaatatgatagtttttccgtattatatcatgattgtatttttggtttgtagtctattccaactaatttgatagttaaatttaatagattaataaaatttttgcagtttccattaaaaaaaaaaggcaatcctttccaaagagaaaaaaatagcatttatttttatgaaaaaagaaaggtgtgaatatcaatgcaattaataaataaaacattttccttttgtccaagaggaatcggtgtgctttcatttatgtaatgactccaattgtcttagatctattattgatttaatctttgttgttttgttttgtttctttactt

SEQ ID NO: 10439 - DNA, 562 bp, Cannabis sativa
gaattgaaagagtgaatgaggaaaaatattattgaatgaatgaatgaaaaatacagaggggaaccggctttatatacaattgcaagaaccaagtcctaactaacttaactaacactaaaaccgactctagagttagttgaatcagttagaagaatagattcaactaacaacaatcaaacagtaataaacagtagtaaccgaacaaccaatatgaacagaagggtaataaactgaagtcttaatatccccccctcaaggtggactgtataggttgtatacagacatcttgttgatgtgagtagtgagtgttgttgagggcagtggctttgtaaaagcatcatctagttgtaggttgctggagacaggaatcaaacggatggtggagttgttgatcttatcacgaatgaaatgacaatccaattcgatatgtttggtgcgttcatggaaggtggaattgttggcaatgtgaatagccgagtggttatcacagtaaatgaatgtaggagctttttgtggaacttgaaagtcttgtaggagatattgcagccatgtaagttcactg

SEQ ID NO: 10440 - DNA, 574 bp, Cannabis sativa
cttttaacagctactaactcacgttaacatcctccattgtttattcattttaaatcagtttaatatctattgggacccacatatatgaacgttatatttttttacattaatattaataagttttattatgtttttcaacgacaaatactaaagggcatagtggtgttttttacattaaaattaattaatatgttttattatgtttttcaaacgaaaaatgttaaagggcactagtggtgtctatcactttcctatgtgttagttcaattaagtatcgagtttcacataatttaatataataatttttaaaaaatatcgctatttaatcacaacgtgacatgtagaaaatgtgctagacaatactattgactaatagcaatgctcttttcaaactttttttttttctctttttaccttcccaatgaataatgatcactaatagtaaggaattttctattaaaaaaatcactactaaataatttgtatttaattctttttttgggagaggctttttctacttgattgtgtaggttttttttggcaaggtaaataattgtttggttgatgaaaaaac

SEQ ID NO: 10441 - DNA, 591 bp, Cannabis sativa
agccagagtattcaggttacttaaattaattgatttaggtcaattaaagagttaagtttgaaaaagccctaaaaataagtgataaatttcaacaaaaggttcaaatcccaaataattaattagcttaggttaattagttattcgaggttctaaagaaacccttatgtaagaaattttttgcaagaaaatatctaagtctaagcatttaatcgaaaaactaaaggttcaggcctttagaaccagaatctcacgaggctggaaatattaaaacattgcaaattctatgatataaacataaatatcagaggaattaataagatggtttcaaatacttaaaaatcccacgacaatggtataaactattatctccgcatacgcaaagaagggggacctttgttcgccaaaaataagaaaaaagagaaaaaaaataaagataatgtagtttgagataagcaagattaatcaaggctgagtagagtcattcaatggttgcacatcttgagctttaatattagatggggcctccagcatcacagattcgattaaaataggtactttagaagcaggaagagcatagtcatccaccttttc

SEQ ID NO: 10442 - DNA, 1387 bp, Cannabis sativa
ttcaaacaatcaaaattgtctaaaaaaagttgttatgacaatgatataattctaaatgatattcgacatcttttgtggttccaaaaccaaatggggttgctcatttattagccaaaacagttttaaatttgaaagcttgtgcttgttggaaaggggggttgatccctttgttgtgagtgttgttttacaagcaaacttgtcttttcatgtgtagtgttgcttctatttaatgaatttctctttagaaaaataattaaatgtttattttgttctttaaaaaaagataattatattgtatatagctaatttgggtgcactcatttccttacacctaaaaaaaaaatatggagtagtcatttaagtttacctaaatttttatatcttcaaatgtaaaaatttaggtaaaatttaaatgaatacccaaaattaagtatatactaaaggaggaagactcttgggtttaatcccacacttaaaggaggataagatctaaactaatctaattatatggagtcaattaaattcattttaattaaaaaaaaaattagatatttaattacaattaaattgtacatgaaaataattagattataattagattgaatcgattattattagatttaatgatttgtctcttgtaagttgagtttacaaggttcagtattatcctaaaggtacttttcttacaactgaatttagaaataatctaagctttatttgaaaaagtaattttgaaaatcaacacttaattaaggctggtgcgagatgtaatattggccctggttctaaaggaccattattggctccctaacaagaaaaatctgtttgttacttctgatctggttgggcttgatgactgctcagttgataggttgatgactgtagaaagtcaaagttgggatgcggagctcattactgatattttttattcaagggattgtgagattattctcagtttgcaacatagttctgctggtatggattcttagcatgctcatttaatatttatggcacttatttggtgaaggatgcatatgaatactagcacaaagaagattgcttacaggtggatgtaaatgatgtggctatgtggaagtttgtttggaagctatccattttccacatcagaagccttgttctgatgcaatttttgaggaagcagcgatgctcggctaggcgatttggaatgcccgcaatgatgtagtttgaaaggggaaagtatgctacgtcttctgatgtggtgctttcagcaagatcagttcttaatcagtggaaggtttctcaatctaaaaaatatggtcctttgttttttttcttcgggtttggacacaggacttgagcattatactgaactaggtttgaacaagattaaggtaaatgttgatgg

SEQ ID NO: 10443 - DNA, 657 bp, Cannabis sativa
tagtattttgtaatatttaaaaaataataatttagtttgcttttattaatactaaactccaatgacgaaagaatttagaggagtctatctgttgaaaaaagtgtaacatgattatctaaataacaatgattgtgtactcaaataacaaatatgtggaagaatttgaattgtttaaataataataagatttttcccgtatttatgttctcttattaatcatataaaaattgattgtgagtatccaatttacggaaaaagatgtctttctaaaccacggtaaacacaatctatttaaattgacattagaatttaattgatattcataccaacactaatatattatgtatgaattattagtgtaagaacatatgtataattcgacgatagtatcgagttgctagatgctgtgatgttcacagatattacagaaaatatattgtcatgtactgcaattcaattaaagttgtattcgattgacgtaaattttaacagttaaatacatataatatattttcacaaataaaagaattataaatcttatcttattcttataaaaataatattaaaaactatttttccagaaacatagattgtttgtctaaaaaactaaaaaaaattatcagcaaaaaaatagagaatctaattgtaagtatatcc

SEQ ID NO: 10444 - DNA, 935 bp, Cannabis sativa
attcatcaacatatatcaacgattggcaacacagctatcgcaacaatcatcgtcgattatcttctccaactccggtgaatttgtcatttggaactgatcttcttctctactgcatgaacctgaaaaattaatgcatatataattgcatagcataaaacaaagaatcaaacaaaattatacagagaaacacaattttgacaacgattgtgagcataatcaaaataggtatatacactcaataatcaaaattatatataataataattatatatgaacatattatataagaatatatatcatgtagaaaataaatgaaactctgcaatttcaaatacaaatataaaataacaaaaaattcaatataaaataacaaaaagaaacgagttaaatcaagagaaaaaaataagtatggacaaccttatataaaatttaaaataaatatgacttcaaattaaacagtattagaaaaccggttataaatattaaataatatcaatgaaataggatataaaaaataacaaatataataaacaacaataaaagaaaataatcaaaatcataacagataaaaaatatatataatagaaaaaaaaaatagttaaaaacttaaataaaacaatcaaacataaaatttatgcgaaaccggttccaaatacaatgttataatcagattttaataatatatttcctttaaaaatacaaaaagtaatcaaagtcataagagacaaaaaaaaatataacaaaaaaaaatatcagttaaaaacttaaataaaacatttatacatacagatttgttttcaaataaaaattataataagattctaatagtgtttttcctttaaaagtacaaaaagtaatgaaagtcataactgacaaaacataacagaaaaaaaagagttaaaaatttaaataaaaaatcaatcatacataaaatt

SEQ ID NO: 10445 - DNA, 824 bp, Cannabis sativa
aacatatctgtatacttttttacaaacttcatatataatttgcagcaaattatttatttatatgtgaaagtaattaaattattatttttgcaacaattaagtacccaattactttcatcatcaaatctatttataatttagatatttttgttacaaaagcgcaataatttattatatttttgaagatattctcggattatcttcttctagtgaaaaaggtgggtggtaaagaacaaacttttttttttttatgtttggtattgtgcttcatgacatttaccgtgtgtaggatttttttccttttattattatttcattgtaagcggactaataatgctaatactcattcgcttgcacaactagctttctctcttgaatcactgggtgtttgatagcagaatttgtctaattgtttagcgtaatgtgcatcttttgtttgagtggtttcctctgcgatgttataatattgataaactgtttttcaaaacaaaaaaaaaatataataataccaactttataattttggacacttttgcccgaatatacatctatcttatcgtatgtgttgttctaatgaaaacttttcttgatctattaggttgctaaaatcagagcaattgaaatcagctaaaaaactcaacgacataaaaggccgtcttttggagctaattgaaaaccgtaacagatctgccagtgaggacctatgctttcttttctttattcgtttatttatttatatgtttggtatctaactcataaaatcttgtttgattcagaaaacaaaaaaagcagtactgctgacagatatcaagagttgttggaaa

SEQ ID NO: 10446 - DNA, 618 bp, Cannabis sativa
cattagttgagtttatacctctatgcatctttccagactcaaaaaagtcgactactgcatcacaaaaggcatcacccacagactcccaatagtgtttaaaaaagagaactgacattctgtccggtccaggagccttatggttattcatagcaaacaacgttctccttatttcatcacgagaagggcaaagagaaattccttctagctcttcctgggaaagtctagccgggaaaagatttctacagtccaaagcttgcccaggacccgaccccaagaagattcctttgaaaaactcgatgaactctcgtccaattgactcccggtcattaatccatacattgtttctatccataatgctttcgatagcatttcgtcttcctctaatagcagccgaaaggaagaaaaatttagaacatttatcaccatgcttgatccaatcaatcctcgccctttgtttccaataaatggccttcctagtcaaagactcgttcaataactggcgaacatcacgttcctccttccagtctcgccctccagcagggagcttctggaggcgatcaagcttctgctccaagtctttaattagacaatctagtttaccgaattgagtcctattcc

SEQ ID NO: 10447 - DNA, 857 bp, Cannabis sativa
tagaccttaactcagaagggttatgtcacattacaccattctgaaacacaatcagaaaaaggacaataggccctagcaaaaactatgagcaactctatcctgatataattgtggatgttgtgtttagctttgtagacagttgatgggcaaaaggaaaaactggaagaacagaggtatatatatagctgtttattgggttaagtattgtgtgttctctttccaattccgatcaattaagccttttgttttatgttttaagggatctaatgaacaagtacatacactatgttcaagagttggtcaagtctgagcattagatgcatgttaacttcttctggatatgaacaaaaggaagaaaaaaaaatatgcaagtgtccttaatcctagtattactctctgactatattaatcatggaagacaacaacctatccttagtatcatatattcactaattttacttactgacagttttgtggccaattaccagcatttaatgatcgagatctaataattatgttttatttggaaaaacatgcaaaacaaaattaattgtatatatttttaagataaattaccaagtcagatagcttaatgtaggatatcattattcaatcagggtcacaaaataatggtggccaagatatattgttatcaaatacaaaaattaatattttatatccacacaaaaactggcagaattaaaagtggaagttcagaaaagagaaaaatgctgcataaatgaaatcaattgcataataatattgtactgctatcgtgctaagggattagtcacatttatagagtacatttgtggaatcatttggccatgattcaattccttccagataattgagct

SEQ ID NO: 10448 - DNA, 838 bp, Cannabis sativa
cttaagaaaataatagatattaaatagtagacagatagattttttaagttgttcaggaatgaaccttagtgcacgaatcaatagtattagcctctttgggaaaacaattagttattacaagtatttacaataatgatctctcattcttcttgtttctcggagagaaagctctctaggaatttcagtagagtgactgtaaatgaaaaattgttctccctttgctcaaagaaaatggaagtatttttaagcatacatggggtaaagggcatatcctttacctacctagggttttgtagtcaacactctactaaggtcagtactgcgaaaggatgatttgaccattggcttgtaagaaccttcttcatcgaatgttgtacagttgtagtgagggtttttgaacaaaccaggacacgtgtcatgcaaaggtctctcctttgtaatatactctctaactaggccgttgggcaaaaagcatgtccagaggtgcgtatgcgcactaccatggcctggcacatgggagaagatctgatcctctatcagaaaaaagtgtaatcgtctcttaacatagattttcgttaacgatattaaaacctattttgtgattggtttgcacagaattaataataaaaaaagaagaagaaaataacagaaagctttttacgtgattttgcagttaaaattttgcgtagtccacgagtctatcttattagatttctctaatgcaaactagggttctttctctcaaggattttttgtcccctttttcagtgtattctgcccatatttatagttacttagggaggcagttaattataattagattaatatcccacaacaa

SEQ ID NO: 10449 - DNA, 510 bp, Cannabis sativa
ttttttttaattattattttataattgcttttacgttgttgtttatatgtatcttttatggtgtatattttttgcttattccacattattgttttgttgtatatatgtccatttattttgttaactttaagttatttttaagtggttttcagaatatttttttattcaacaattattttttagttgttttatttatgtgtattttttatggtgtatatttttagtttctttttcataattttttttaattgtatgtgcgttgctttgtagtttagatgcatatgtaatttaatttattttcacattttattaaattacaaaaataatttttttgtttaattatatattaaccatatattatattatataccttattttaaaattataagattttattgtttctattattaatataactaggtaaataagccgcgcttcgcgcggtgttacccaatatttgttatctatttatatatatttatattcattgagtgctataatatagaacat

SEQ ID NO: 10450 - DNA, 907 bp, Cannabis sativa
tttacttttaccttttatcatttctatccaactttatctctgtataccaaggtttatgataccaaggaagaaatagaagatgatcgtaaataaaactaagagacaattacaattacaactttatccaaaacttacaaggatagaaaaaacttaaataaagtattataactcaaaacataaaatacaagtaaatttaactcaaagcacacacacataaatataaaaataatatataaatctattctatataaaatgtgtctatataacataatttttggtttatgaaaaattattgggtgacttttttttttttaagttttctattaaaaaattgcagcttttttttttggcaaagaataaaaaaattaaaattttactctcatataaactaattccccaactaaatataaaactaattctcctaataaaactcactttaaatctcaaaaaataaaatatatacatataaaaataaaaccttacgatcctaagctaattctcaaaaaaatttggtccgacgataacctcatcaccttaagtcacctctgctcatctcatcacctactattactctctctcacacactatatatatatatatatgtataatgtatgttatgtatgtatatatatgcttacactcatcagttatgaatttaggaaattttaatcccatcatatatatatgaatttatttatagctatgttgataaaaatgaaagactaaattaaactctgattgaatttaaattaatatttatttttattgtgtattctactggtaaatttgttttcaacatttgattattaatctttattgcacttttttttaattttcaaactttgtctctgtttttatagatttgttatacatatataatgtttacaataatattatacataaacat

SEQ ID NO: 10451 - DNA, 1093 bp, Cannabis sativa
atgacatgtattaaatcgtgcctttctaaattttataagtcgttaaaaattcttcacagactattaacattgttgaataatttaaagacttctataatttcttttagttttactaatttagtaattatccatatatcaagtcgtaccctctgaatattaaaatatatgtatcaaatcgtgctctctgaactattaaaattgttagattcaagaatttttatctaactccgttcaatttaattaatgtagtatttatccatatactaaatcatgtcccccgaacatttgatatgtagtaataaattgtgtccccgaactttgatatgtatcaaattattacttgaatttttatccacgtcaagcatccattagtaaaattgaacggaaattcttaaatccaatgatcttaatagtttgaagattaatgtgaggggctgtttttgaagacacaaatgaggttggtactagtttcgtagcacgcggttgtgatggtcagattcttgaggcattttcaactgtttctaccgtaagttgccagcccgaaattgcagaaattctaagtgtcaaagaggcgcttagttggataaagaggaacaacgtcaaatgtgatagttgagccggactgcattttagttgttcaagccattcttaactcggtctctatgccttctttttttggtttgtttgttcatgattgtcagattattttatcttctttaaataatgtttccattagttatgttaaacgatttgctaacaaagccgcgcactgtatggcacgtggtgcttgttattggtcaggtcgtcttttttctgagagcgatgtttctcttgctcttcagtccattgtattagcagatttatctgtctaatgatttactttatttaaaaaaaaatagtttgaaagaaatttttaacacctacaaaaattgagggtgttacatgtaaaaagttcataagttcatagaggaaaagaaaaatgatcacaattaggcttagccttttgtttatatatatagacttgctatagtatatatgttggaagtacagtagtatattagatatttgttataatagtagtgttctgctcatg

SEQ ID NO: 10452 - DNA, 860 bp, Cannabis sativa
tgatagtcatgctgcagactgagattgttgagatctgccgtgatgtggtctgtagcgccactatcagcataccaggcaggatcaactaaagtctctggagtagctagaagagcagccttggtactgctatcaccatttgtggactgaggagaaggaggagcatcctcttcatggcgataccagcagttgacggcactgtgaccaggtttagcgcagatctggcaaacgatctttgatccattgcctttaggagatccacgtgcgcgtccacggcctcgagtcgaaccacgacctcgattagggctagagccacggccacgatgactgatctgagcattgtttgcagtaggtgaaacctccatagctcccggagtatgccagcgatggagacgattttcttggctcaacagaagagactgaacttcttgaacattcaggttgccttgactcagaatgctgttgataacgccatcgtattccgctggaagtccgttaaggatgctcatgatgagatcgtcgtcaggaacgcgagaatctgcaagaagcagagtatcagagatactttccattcgagcacagtattcagagattgatagtcctcctttcttggatgtttgaagttgatttttcagatccatgatccgcgctctgcttcgagaagaaaagagtgtttcgagagcacgccaggcttcgtgacttgtctgacatcgaacaacttgactgagaagtggaggagtcagggaagacagaatccagctgagaagaagttgatcttcacgatgccacaaagcatgctcaggattgggaatgagaaccgtatcgccattttcatcagtgatctcaacactgcgaggtggctg

SEQ ID NO: 10453 - DNA, 527 bp, Cannabis sativa
aactaagtgggaggaagaattgaagcgttttccattaacgggaagggttttgaatcttcctaccaaatccattaccaggaacaatatgctaaggctagcatcaatggcgggcgaagttattgaaatacaaaaagaggaggtaacaaaaataacaatgaacggatttttctggttcaaggtttgggtttcaatagataatcctctctgcccggggtttctctttccgaattctggggcaaagatatggctaccatttcgatacgagcgactgccgtatatgtgtttcagctgtggacgaattgggcacgattttaggtcatgtgagaagcatcctgttacattcttggatggcaatggaagtagttctcaggcctacggggcgtggatgaaggttgaggataaaacaatggggctgaaagagagaaaggctgttacagaggaggggagaaattggtctgcagatcgagttgcaggaggtgatgaattcagaaagattcctgaagttccgaacatcaccaatcggaact

SEQ ID NO: 10454 - DNA, 674 bp, Cannabis sativa
gatatcaaacagaaaaacaaagttacttctgttcatattgacacacaatatttggaggacaaagaaactattacgccgagaaggctggaggtctcagttagggtacatgttcagtcaaatttaaaatttcaattggttgctacattttattgtttgttctgttccttttcgttatttctttacaatttttgttcattctttttcacgcaggaaattcaagcagctttacatacacttaatgaagggtcaagtatcgaagatgcaaaagcggtttgttcatctgatgttcttgagtggttttttaaatggaaggtctgtattcatgcaagtatttgatttattcaactatctccagctagttatagactttatgctatttgtttttgtattctttgtacaattataatctaatatgccaaaattttatgcttcctttacacttaaagatgtcgaccaatatttctgaaattcttttagtggaaagctatgcatttataataattagttttcttaataaagcttataaaatattttcttattttttattgatgttgttagtattttttttcacttcaggatagacttggaatatatctttcaccatttttacatgatatgcactacacatcttttggtcgacactttacagaggtggagaaacttgaagaggtaat

SEQ ID NO: 10455 - DNA, 681 bp, Cannabis sativa
gtttcatagctgtcgagcacccggagttgcttactgaatgagtcagggatccttccatgcatcgcaccgctcccactcaactcttcttacaccatgaaaaagtttttgctggttataataaggataagttgaatgtgggggacctagtcaggaccgttaactgcaggagggccaggttgatctcagaaggccagtcggtggacgacttcaaattttccaatgttctctgccttcatattcgcaaccctaagatcgagaaagtactccgagaagaaatcatctcctccgcagaagacaaatacaagaagtataaattgaagaaggaactagagtaggcctatatcaatgcccaggctgcttcaaggaggatcctccgggaggaaattgggaaagaacaggcgcccatccgccctaagtttcctttccgtgttcctaactccggggctcttgatgccagcacttccggaacttgtaagtctccattgattattcatcacgttccttctattcaagattacgctggccttaggccagtggaatttgatggtcaactgcataagtatcgagtacccgcttcacggtggggttataatgcaaaaaaaatttatttttcccaccttagttgtttctagggccagtcccaaattggttctggtcctcctgtaccaattctcttggacc

SEQ ID NO: 10456 - DNA, 911 bp, Cannabis sativa
tatctattttggtaaaatttattgcatagtatataagctgttgagaaattttgaacgtaatttgaaactctttttttaaaaaaaaaataaaataaatattatttaaattttaactcatataataaacacttttttcactacataagctaatttaaaataatatttaatgataataacatctttattgagaagttatgtatttatcaatgcttttataaagaaaaaaaacattataatataaaaaaaaattgtcaatttttttaatttaggttatacagtcgtataaatttaaaaagtcatataataattaataattttactttttgtttaaattataatattattattatttgttataatgttatattattaactttttaagttatatacattcttgttagttattattttttgaaatatttgatttatttattatatcgttatacttttttatcaatttacatttataaatactactatatactatttaaaataatttctaaaaatattgaactaaattgtactataaaaataaccataataacctttataaattcaaaccaatcactatgtacataattatatatattattacaaaataaacaatatatataaaactcttgattttttgaaagaaatataaaaaagtgactacaatacaagaaggattgaagtaccttacaccccatcaccgatatatggaaagtcatctttttttttaaattagatgccaaaatattttttatttatggtgtgatttgttggcttttataaaattgattttctcaccttatttaagtgattttattgttctttttctatcttaggaaagattttttttttccacgtgtcattttatttgtttagaaacttcttgtaagttgtaacagaagaaattctcttatggaaag

SEQ ID NO: 10457 - DNA, 554 bp, Cannabis sativa
gtgacaaaggggagggatcaggctgagaaccttgattacggcagcgtttaagaaactgtctcatggtgagagaatcactgtgccttttaggggtggaagcaggaggtaaattttctttgttagcagcagccgtaacagagaaagggttaggagggaaacccgaaaatgtagtggaggttgagggagtgtaaattggctgagaccgaggagataaacgattatgaggagggttaggagaagagataacggatgtcaatgagggagggtaagtagctacatggtaagttggtcgtgatgaaaagccaataactggagagtagatatcaatcaaagtagtttttgtgggtgagttactgtgaagggatggagtaagtaattgagtagacttgcttaggaaattggtaggagcaggaggcagtggggaaaagggggtggaagattgaggattatgttggtgatgaaggattggagtgttgtttggcagactagaatcagaggtcgttgatggagattcaaagccaataagcgattttggttgaggcttggcagcagag

SEQ ID NO: 10458 - DNA, 603 bp, Cannabis sativa
aattgactaaaggaaacacatgtgctttaagtctataaatattatagtaattggcggttgaatccctttatgttttcattttggtatacttaattcttttttttttttggcaatactcacctatgtgaggaaacataagcaaattttcatccaatttgattgatatctgccagctcgttctgacacgtgtacatgtggcatatttttattggtgcaaataattttattggtctggcaatgtgtacatttggccagatgaatttggcagataacagccaaattggacgaagactttaaatttgcttaagtttccttacataagaaagtattaggtccagccttggcatagatgggctaggcctgtgcttagggcccacctagtccaggagcccaaaaaaaatttccttgtaaatctacacattctttttttactaattttgaaaaatatcatattttttttacaataaatgcccaaaaatatattttttttatagcccactaaattccaagatcggcccttgggagtataaaccataaggaaattttgccgccaataaagataaaattgagttgtgagacattattgtggttttgttatccatg

SEQ ID NO: 10459 - DNA, 562 bp, Cannabis sativa
atgtttttacagatctataaaattaaattaataagtgtcgaacgtaccttccagcacttctgaggagataggcaatgtcacagataggtatgtcgacaccgtaggggttatcgacagtgatcttggccaggtactcgacggagtttaggctaacgtgcttgagatccacatccgtaacactcgcctccggggtcttcacgtgcgccgccaccttctctgccataaacgccttagccttctccaagaacgacatcgtttttcctcttcttcggacacaaacaaaaaaacaaagagatttcttttttcttcttcttcttttgacttttcctgaattgaaatgaatggaatgagattgaataattcaatatatattaaaggaatcagtgtgaggttttaacacgtagcttgtggcgatgccgcggttcggacacgtgagaccatacgtgtcgcacgtgattatcacccgcgtttgcagatctgggatttgtatatataatgggaacgcgtttggattaagatatatatggtaactaatggtaatgggacgacgacgaagacgata

SEQ ID NO: 10460 - DNA, 549 bp, Cannabis sativa
tctcaaccctctgaatggctttcccctcagcctcctccgcagtctgttgcaactcaagatggtgcttcacctttctctctagagtagtctcgctaattatttgtcttggataattttagcttgtttatcgtactctagaggtacaatggtaatattttgtcgttctcttaaccatccagcttggcctatttaggttgacttccaactctttgattttggtaagagctgtggaatgcaagtccttgtacccgtcaccagggtccctctctatcttggtctctttcctttcacaggtcaaggaattatccaaagagtcagaaaccttttgctttacagtagcttccatcttggtgttggcctcagctaaagcattggtagcttcctctcttcttagctcggcattggcatgctctgtcctcagcacctctagatcataggccagttgaatgactaaggagaaattcctctcggccatcaagccaacctgtgaaggaaaatataaaagtaaatcaaataatggagaaacacaaagtgttaattcacgacaaa

SEQ ID NO: 10461 - DNA, 695 bp, Cannabis sativa
ctaaatataaatacaaaatttattttaaaattttaaatatataattattattaaataacttaaaaattaaaacattacatattatttattatacaatatactaattattatataactaaaaaaattataaaaataacattactatactaaaaatatacaaacacatatgataaaatataaaatataaaaaaaattaataaattaaatgggttacggcggagagtgtcctccttgttcccgtcccgtttaacattcggttcggggataaaaaatgatccccgtcctcgctccgttctccatttaaattgaaaattcctgactccttaggggcaggttcctgcaaggcccatcctcacggagaaatgtgcatctctaagtatttattatagttacgatataaattttttaaaaattccaattagtttaccgtactgaaaatatagttcttaatatttcaatttactatgtatgtttaaaaaattttaaatttatttttgacacgataaactatttaaaaaatttacagagataatattgtaactataataaaaataactctaaaaatattttagtaactatttttaagcacaaaaattaactgagaaaaactctaataaaagggatgagaatatcactacttctagaaaaaatggccaaatctaatttattttatttattttaattggacagcgcgt

SEQ ID NO: 10462 - DNA, 562 bp, Cannabis sativa
ctttagagtccatgaacatactcaagggcctcaaaaacgcaaggcttctgatggtcttcttttcaacccatccccaagtaaaggctctttctctcacgatcactccaaaccgtcttccccattgaaggatagccaagtcactgcagaaagtgtggagaagccgattgaccatgggtttgccaaagtggaaaaaggagtggaggtggaattagattttctccctccatcaaataatttctaacctggtttgattgttgaacaaggctctaccagtagcaagggaagcaggggtcgcagtaaaggtaaggctgtggttacttctgaggagtctagcgagaaaaaacgcaggggcaggcctccgaagaaacacccaaatatatcagctaccccgaaatccttcaagggacgaaaacaatcaaaaattaactttggaaaccagacggtgaaatataacccgttggagggtagaagctttgacatgaaagtggacttgaacaaccatttcattgcaactgagaagacgccaaagccaagaaccggttgcaccattacagaggtggac

SEQ ID NO: 10463 - DNA, 645 bp, Cannabis sativa
ttttggtggttttgccaacttggaaacgcttagccttgataataccaatttctccggtaatgtaccaacacaactctctcacctctctaaactcactcatttcatattttcttctagaaatagtatctttttggaggcgtatgtcttgaaaagaatgcttcgaaatttcaccaatcttgagaaactcgatttgtatcatgttaacatgtctaatgttccactagatcataacttttttgctaatgcatctttgtctttgatgtttcttggtcttactcattgtgaattgcgaggaaaatttcccgaaaatgtctttcgcttaccaaatcttcagtacctcgatttatggaacaacaatgatttgagtggttctttgcctacatttaattggagcaccccactcaggcacttagttctttcacacacaaaaatctctgttgatttctcattcttgtgtacaagggctaagtcattgcaagttttatctctaagaaattgtagttttataggaaccccatatcctgcaatgttgactaatctcactcaattagtacaactcacttctttatctttgcatttcaacaattttggaggtcaaatcccattgttttatcttaatcttcaacaactcatcgaattagatct

SEQ ID NO: 10464 - DNA, 530 bp, Cannabis sativa
ccgtaacactaaaattacaactaattaacatataggaaaaatatgactccgaaagttaaaaaaacaataaagtcttcatatcaaaaaatatttcctaactcattcgtatacatttgagttatttagtgttaaaacaaacgatgtagaatcttaaaaaatacttcttacagttattattaccctttatgtgcctagcaccattgtatataagattgagtattgttattggacaccagtagtacctagcatttttagacatatcgttttacgattgattagcgatactctctattatactaaattatgtgggacccgataaaaggcaccagtactagacaccactactgccttttagcatcatctctataaaatgacgctgtataattattatttactagctttgttgattaccaatattggcaaaagtatacattattggttgaaaatgtttctaaataaattaattttcttgtgcccatgcacactactacataaaagagcattcctgtcggtcaaaatgttagtttttt

SEQ ID NO: 10465 - DNA, 811 bp, Cannabis sativa
ttttattattttgtggatgctattttttgtaacatttgctctattttgattaataaatttttttcctttaatcaaattttttttaaagtaaataaattataataaaataaataatatttaaatatgttattctttttattttgtcttgaaaaatattttataatttatatttttaatattaacattctaaatcaatttaaattttattgagtttcttaatttttacatgcgaaaaaatatagtttaaaattattctaatttatttttactaaatgcatataaatttatatttttgagaaaaaataattaaaaatatataacaaaataaaattttaatataacataagtttttatattataataaatgggtaaattgcggcaaaacccctaatactttcattttacttgcatttaacccccaaaactcaaatttggacagtaaaactcccaaaactaggaaactttttgcaatttacaatttccatccactttaggtgttaagtgccatgttagattatccatgtgtacctttacgtggacacggtgtacacatgatataattttattggtccacataaaaaattaatttaaaattaaaaaaattaaaaaaattaaaaaatatatattttaattttaaaaaaattgaaaataattaaacataaaataaatttagtttgagggtataaattgaaaatgataaaaccctaattggaaaccctaagtctctttctctttcttcctcactcgacacccactctcactctcttctctaaccttgtgcgacggccaatggaacgacgggaccaccgtg

SEQ ID NO: 10466 - DNA, 568 bp, Cannabis sativa
aagccacgactcttgatacttatattctagaaaatttggaacgtttgagaattttaagaattttttgtattggctaaacaccaatttggtaaaactttaatgatcttgtgaattgataggtggagaaaatatggatatgcagttcaaagaatatttaattgaacttagaattgtatacactgtaccctaggcactccataacacatccttaactagtgtttcagtttctgggaccgtcttagagcaaagtggtcaaaacttgtataaagacataaactagacacaccacgaacatatttgaggcatcataatcagaatcagagcaagttaatttttgagcacccggggcctcggggccccgagcacccaacacctaggttgacaatctatcaattcgggcactttctaagtgtctgatcggagattcaacttttgcattaaatttgtcttcttcgaaaatggggaaattggtcctttcgttgaagaaatactaattcttgggcacaaataacaaggccaagacgcaggggttgacacctacggctggccctgcgcccatgttgacatt

SEQ ID NO: 10467 - DNA, 847 bp, Cannabis sativa
tgagcttctgtatcagcaagttagctatggaaataccaaaggaatcaaatccctttgccgagaaggtgcacccctcgaggtaaaccactaaattcaattcatatattgaggaagaacgatcaaagcttattttttttttattaacaatgaattttggattgggtgtgtgttacatctttcaaaaacattgttttctcttttaataaattattgctggtaaatgattaactcatttttttttctttaaaaaaaatccaactctcaatcaaataccaaatcaagcgaataaatctcatttgaaaacgattatagattttctttcaacaattgtgagaaccgcaaattctgcaaatgtgattgataatccgccaactttttttcactttttccctttttttattttgttttaatatattctcaacaatttttttttttttttgcactctaagtatatatatgtatttgtattcctatgttcgcaaatgcctttgagtttccatattgttttcctgtaatcaatgtgagttaagtgataatcctttagatgaattgaagttcaccagataaacattcaccaggaagagattactttaactttttttttatgatgtttatgagaaagatgcaaaaaaggtattcatctgttttttaagcttgtgcctctttatcactgtataaatatatataaatttatataaagaatttttcataaattattagtgtaattggcataattaatatcgtgtgtgattttttatgaacccaacccctaaattttatattttctttgcttgggcataagatataagatttcattctgaattttatttgaaatttttgcttcaaa

SEQ ID NO: 10468 - DNA, 631 bp, Cannabis sativa
tcttctagcttgataaagccatctgttctatcaaggaaatcgttcatggtgtaaactgccttgacacgaaggttagaccacataggactcattttgagtctggctgcgagtgccattacccttgcatcatcgctaagcctcttagtcttagcatctgcctcgaagaaccattagatgtagtccttgaggggctcattttcctgttgcttgacgtctaccaagtcattgggctcgatttggcactgtcagatggagcaaactggttgccaaaaccatccactagacctttccatgagtcaatcgatctagggggaagcttgaggtaccactgccaagacaagcgtgtgtcagtgtgacaggaaagattctacacctgacgtcgtctcttactcctggtagatcagtcatggatgtgggacaatgtatcttccttactggtgtatttgtgcaaggaaaggttcttgaacttcggagggattggtagagctttgatcctatcagagagcggtgagcattgctctctgttgagttcgaactttgatagctttggggccatgattccctttactaaggccactaggttttcgaacactgccctgttgacaccattgatggtggtttacgtccttgt

SEQ ID NO: 10469 - DNA, 530 bp, Cannabis sativa
gtttctcatccgactctccttacacctgtgaatccaattcaagatcccgacatagttgtattaattgttttgaagcaataccagcccaattttgtaacttttgcatgcattctgaccatagatacacaaagaatgaatattcatgtgtttcaatgccatagtcataaataggaaaaatttgagatgggagaagcaaatgttacaaaataacctatgaccaattaatatcagctgagcaaagaaaagtgtaccaaaacccaagctaaaattgatgaagacatgagcaatattgtcccttactcaagtgttgtgggatctctgatgtatttaatggtctgtgccagacttgatttcgcttttccaatgagtgttctaagcaagtacaacccaaggaaagaacattgaaaagctattaagtgggtgtttagatacttgaaaggaacaaataaacttgcattgaagctcactaaacaaacgaacaacacagtagtagaaaggctacaatgattcggattttgctggtgatagag

SEQ ID NO: 10470 - DNA, 1137 bp, Cannabis sativa
tagacacacttcaagacatggagagagtgaatgcgcccttccatttcttggaggcgtggctacaagacccagggtgcatatctgttattactgaggcttgggaacacgtggttctggggcatcatagcttcgtgttatgtagaaagcttaaggggactgctaaggctctcaagaaatggaatgtggaacattttggtatgtgtcatgtgaaattgaatatgctggaatctcttctcagggaagtgcagaatagggccccgtctgaggagaatttgcagattgaaagtgctattgtccttgagattgaggaagtggaacgccgacaaaactctatttggcgccagaaatctagagagctttggcttaatcatggggatagaaactcccgtttcttccacatggctatggtggttagacgcaaaagcaaccatatttggtctatcaaggaagatgttgggccttagattgaggggcgggagaatctggtggattattttgtgagcaaattcaaagatctctattcctcctcccaccctgctgttaatgaggagttgttctctcttttgtccccttgcatttcgggagaggaaaacgagatgctctgtcggatcccggaggaagcagaaatcaagaaagtcgtgtgggaattggcccctctcaagtccccaggccctgatggatatcctgctattttctacaagaagtgttgggtcagatggggggcgatgtttgcaactttgtgcaagagttctttcagactaggcgttttgtgaaagaggtaaatagaacttttattgtcctgattcctaagaataaggctgcaattaagtttgatcattatcgtccgatcagtttatgtaatgtttgctataagatcattgctaagcttattacaaatcggttgcgcggggttctggataaactgatctccccgtatcaagcggccttcctcaagggtcgttggattacggagaatgctgttattgctcaagagattttctcggacctaaagaagagacatggcaaggaggctgtggtaggtttcaaatgtgatatggccaaggcctatgacagacttgaatgaccctttattgagaaagttctgatggcttacgggtttggtgagaagtttaggga

SEQ ID NO: 10471 - DNA, 648 bp, Cannabis sativa
tctttattgtgttattatgtgtatgtattattgattgagatagcttattatataattattatgggtgagcatatattatatattgtcattgattgagatttgcttgttttaatccaataaactccctcatctatctctattcattggcaacttaatttgtagcttaaattatcaataataatacttaagttatatttcaagactatggttaagtataaagttattatcaacatgttattttcttattaatatatttaaaattttacattaatttttaaataaaaaccaaaatttagtgacattgacacctcaagaattgttacgtcaccattgatttaacaattaatgaccaaatacatacagaaattttaaaaatataactaagtattatcaccgtaaaaaattaaactaaaatatataacaaataagtatgacctcattacaattcttttaagcaaactgaataactataaaaacataacttaacttttcacaatctcctatgatttaataatactgattatatgatttattataataaaagtactgattatatgatttattataggtatatttaataatactgttgcatgccttctttctttaaaaaaaaatcctacaacttcatcaatgtgccaacaaaaaagg

SEQ ID NO: 10472 - DNA, 754 bp, Cannabis sativa
aattctaatatttccttctcaacaattgctatcatggaaaagcttcttttagtgtagaaactagaaaccaagattttttttggcaaatttcatggcttattacgcacgagttttttaattaaagtcgaataacgtgcatcattttgctcatatctccctccacacctctcaaaacttgacgaattttttcatataggtgcataaaacatagggaaataaattttatgcttggaaaatcttaagaataggtggtttatagtttcttgaaattatttgatttcacaactcgttaaaagttttataaaaatagtacactgcgacgatagaaactttaatgaattttacaaaaaattgagagcattactatttgacaccagatgacgtcttacaactgattgaagatattatcgaaacatttttttttaagttatatagaacacgatatttaattacaccaataaaaatataaatattgaagagggtatattgaggaggagggtgcttaattatcatgaatttttttttttttaattttagtgttggaatgtggtatttttttcaaaattgaatattttttgtaaatttaatagtctattagtgacaagttttttaatcatagtggaatacattatatcattctactcgtatttcccttattacctcttgaaaattttaacaacaattttgctaattttttattaggtgatttattgtttgtagtaaatgaaaaatatttggtgtcttatttaagagg

SEQ ID NO: 10473 - DNA, 644 bp, Cannabis sativa
ttgggtacacgattgtacccaatctcggcagtccaagctgggctggtcaagatagggtccaaaatttataatttttttaaaaaaaatatattcttgtgatcaattatggcccttttttaagagctcggcgagatagagaccaatctcggtgcacacactttcggcccaccaagattggtctatagaaatttcccatttttcttgtagatttcgatgtgcttagttcttgagtgaaaaacaggatttgaggcaagctttcttgcctctgagttatagcaccaaattacagcaggccctttgcattttattcctatttcagtaagaaaggattgcagccacacgacttcagtacaggcttgagctaatgctctgtattcagcttctgtgctggagcgtgctacagatttttgtttccgagagctccagctaacaagattgtttccaaagtaaatacaatatcctgtagtagattttcgatcgtccaaggagcttgcccagtcggagtcacaaaagccttcaatgacaggattggaagttttggcaaagaaaattccttcaccaacagaaccagcaaggtgacgaaggattttcttgcaagcattccagtgattttgagttggggcctgcaagaattgactaagctt

SEQ ID NO: 10474 - DNA, 732 bp, Cannabis sativa
aaattctcaaaaacatcttcagagcaccatagatgtattttgacaaatcaaaaaatatacaatttactatttggtaaacgaaataattttagtccaatttaaacaaatatttttttattttagatgagaactgcttcttctagggtgggagactacttatggtggtgtggtgaaggcatacgcgcgtgctctccgttgttaacactccactttttagctaggtaggtaactcccatattcacatggtaacaaacagtaaaacaaaatttggctcaaaatcatgaaacattccttagaagaagtaactactatttcatataataaggctttcttcactcaatattggtctttttggactttgcaagtaggaccacctgaaaaagactttggagacttttgtctattacatgtacataatattgcacaatttagagggactaatataatatttttgatataaacttatgataaaaaatacaattaatatagataatgaaaattaaccgtgaatgcaattcgaggcctgtgtagcacacaatttctttaaaacatattcgccttttcccattgtgctagagaattttaacagcgtctatctcccaggatacagaagaataaagtaacaaggtgcaccaccttttacttttggcaaacaaaatatacccgaactctatcacactaattactctaaagagtattttaggaaactttataacattaacaacttatctt

SEQ ID NO: 10475 - DNA, 615 bp, Cannabis sativa
ccatgtctttctcgggcttcagagagtatggttgcttcgtgggtcgaaaagatatagttttattttctcaaggaaagttgcatagtagcttacttaatggttgcacccacgccaaagtctcaatctttgttgatgtctgtttgtcttgcttgtgtatgttgtttaattgttgttgtataattatgccatgattttttgtgttgcagaaatgccagagtccaaaatgttgaagtcggtagtagactccatcaatcagactatatcctaggctatatcctaggctactgaaggcaaaggaaaaggcaagaccaagagcagggcaaaaagggtatgtaagctgaggcctcccagctctgactcatcctccgacacccaaacttctcaggctaagcaatcttcagtcggggcggagaaggcctctggggaggctactcaaagctgggcgatttctagcagaggagtggtcacagaggcttagcatgtgtggaaatctgatttgaacccgaagcaggttcctttttgggaccaccatcccctacactcaaccagagtagcgcggaagccacttttccatttgaagagagtggggaaggctatgtgttccccaaaaaggca

SEQ ID NO: 10476 - DNA, 908 bp, Cannabis sativa
cgtagtagactggaatatcaagaaatttattttcggtaatttaaactattcatacttttcaaaattttacatgtgtgatattatgacggtaagttataacaaataccgctatgaaaaaaaaaatgaaaaaaatattccagcatgtaattttgaacatgaaattgactaagatgttgtaattagcactcattatatataaaagttttttaggacatttccagtaaaaaattaaggtattttacaaaattttgatgaattcaaaataatttacaatatagaaagagtgttcaaattgtctattacacacacatataaaaataaaatagttaagcgtgaaacagactatttgaaccatgtttttagagtgctaagtttttcaaaatttcttaaaattttgctggatgtcttaaataactacaagtatacgaccatgaaaaaaaatgactaaaatttctcttgaatgccaaaacagataggggtacattagtgcatataccataaaattttctatgcatatatttagcattgatttaaggcaccaatcacgtttaacaccacttagaggtgataccttgtgattagttagcgatattctataaaaattattacaataaattatataagatccgatatttaattgtactaatagtgatatgatatatttgaggatgctattaggtcctaataatgtctaatactataatatggtagtattttacgagtgattatttatcttttattataattataaaattaaaatatgtaagagtgtgagactgaatattgaatgacatcttataatagtgcacacttagatgatgttaggcagatttcctttagcattactattaattaagtagaaacaataacaacatttatgcaattttgttcaactctaaccaaactcc

SEQ ID NO: 10477 - DNA, 860 bp, Cannabis sativa
  modified_base (196)..(198): a, c, t, g, unknown or other
tcttgtctttctttctgaaactcgttctaaaagctcttatatggaaacaattcgaatttggttggggtttgagggctgcttctgtgtggatgctagaggcaaaagtgggggtctagctctcttgtggaagactccttttactgtccatttgaattcttataatgcctatcatattgatgcttggatcaatatggannnggggttttcttggcgttttacgggtttttacgaggaccccgatcgttctcaaaggaaacattcatggcaacttcttagacggcttgctgaaaataacaatggtccttggctctgtggggaagattttaatgaaattagagggttacatgagaagcttggaggtggtggaaagcccgggtatcttatgaagaacttcaacaaggcaatcgatctgtgtgcattacgagaaatagaatatgaaggcagcaagtttacttggtttaatggtaggacagccaacatggtgtacgaaaggttagatcgggttatggtaaataacagctggtggaagatctatgcaattgctaaagttaaacaccttagcaggtggtgttcagatcatagccctctactagtcacttttaatcccatgcctaatgacactcggactcaacaacgttggggacatcgagttcattatgaaaaggcttgggcagataagaaagtgtgctgtcaaatagtggaagacacttggaaagaggcaaataacataggctcggcagcagccctggatgaaagaatacacacttgtggcactctgttggatcaatggaatgcaaatcaaaggaaatcaaaccaagccaaaataaaagaactaaaaaaagaagtggaaagttgttctc

SEQ ID NO: 10478 - DNA, 1355 bp, Cannabis sativa
ttttatgaaaccaattaataataaaaattcacccaagtttctctaaatattttatttcgtgtgctttctcgttcttaaatagtttttattgcaattattcttgtctttctagtatgacttgaagcttatttttgtaatttctttgaggtaaattttaacaataatagtttcaaaattacatttagagtgtaagacatgacttgatagagcattaaattagctttgaaacgcaagttgaattgcgtcaatcagatcaaaattgagtgagttgtgactgttttactaaaaatagttcatgacccagcatccaggttgacatcccagcgcccaagttgacatatgacgtcaacctggatgctgggtaagtgaaaaaatatcacaggaatgtactttaagatgcttaagtgatattttgacgtcacttagtttctgtgttctagtgaagctagtcaccagttttcggagatattgttgttctctggaaatgaaagactcaaaactcttcattttcaggtgagctagaaatgagaaatgcaaagttgttaatttgactttttgacttcatatatctttgtcgttgtgaaaaactagacggacggtcgaaacagcatcagatttggataagcagaacctagcgcattagactttttgtcaacttgggcgctggatacttaatcccgagctctcgagattttgtttttgatacttccaaggcttttgaacttgaggatgaggtctcctcccctttttttgaccattctaaattcaatgggcgcatcaaatttggcatttgagcaattgaaggcaccgtcctaagttgattgtcaacttgggcgctaagcccagcactaggtcaacctgggtgctgggccttgtttccaaggactcgggattgtagttttctctctgaattcgcttgaatcttcattatttctaatgatgaaaaaattgcccgaaatacttttttctgaacttcatcagaaatagcccagactgacaatatgccagctcaagttattagtcttgtctcggtgacatggttttttacccaacttaaagcctccctaacccccattgcctcgaccagttcaggtgacatgttccctgctcgacagacgataattgcctccaccaaatctccattagtatctctagccacgcacataaagctataggtaccactgctgtcaaaagttgcagcatctacgtttacttttagcttcatatcagctggcttttgccatgtctccaatccatccatatctattaaaaatgttgttgtaggaaccaacactttgtcctgagcgtgagaccaactagagagggttgttttggccaggatagagacaccagca

SEQ ID NO: 10479 - DNA, 601 bp, Cannabis sativa
gcttactcgcccatatgctctttgattttttatgatcttattgggcacatggttggactacattacatacccaagttcagattgtttcatttgattaggcttatttccaagttcagaatcaaaatgttctactcgaaacaaattagggttagtcaaacccaaaagtattcaatttctgttgattacatttacttttttggttttgactgtaagaccttacctgaatgttataagtgaatcaaacaaattaggtttagtcaaattcaaagtatttaacacgctcttttaaaccataaaaacatctcaaaagttatgggagaaactaaaaaagaaaagtaaaaaaaggggtcatacttataatttagtggtttcataagggccctagtcgattcctgtctccccaggtcacttggttaatttaattcttcttcctccaatataaaattttatggctaattagtaattttttttttttttaattttgacatatattaaataatgcccttgaacttttttggtcgtaattttactgttttaggtactaaatcatgcaccgactttgcatgatttagtacacgtcaaatttaagggaaaaattgct

SEQ ID NO: 10480 - DNA, 807 bp, Cannabis sativa
cttaacctatctagcccacagtccgttggatggaatcagatattagcaagcatgtaaataaatctttataaaactgagaagaaaacatctaaaaaagacctacaggctcatataatccaactcttaagcctccaaatagacactgacgatgcaacccaggtacaattcctttccatagtgctaatagaccttcttccctggcaatggtgccaactgttcccagcaaaccactgtactttggcaagggcattccctcaacggctttcttttggagttgaagcctaactttagcagtgtccaagggaatactaacaatctgcatcaagttcaaatatagattgatacctagaaagattataatctcttacagttttccagcaatgaactaggctaacattataaaaagatcataagtttttagtttaaaactacaataacagcaaagagtaattaacaattagatcaaaatacaaaaaaagctgactttcaaggcctttttccatcaaactgaaaagaattgagtgcaacaattcatttactcatcaaaattccaattaaataactttaatttgtaagaattgagaaaaggcattaacacagattatatcacaacatctaattcccataccatgcttcaatcaattcacacagacactggaatattaaaaagaaagtcgttgacttagaaaataggaagtagaaatcgaaagaaaagtaatttgaggaaaagaagagaatgcaaacgcaaattagattgagatgttgaaagtataatgagtggtcgattacctcggccgtacaagcggc

SEQ ID NO: 10481 - DNA, 1242 bp, Cannabis sativa
ctgtagtaggggcatgaataaattggcttagcttattggcaatgaaggctacatcgggcctggtcaatgttagatattgtaatgcccctagtgtactcctatacagtgtatgataagtgaaaggctccccatttgtgagagatagaacatgtgaagctctagttggactgggacacagttttgtaccctccattttaagtttcgtcaagaggtctgcaatatactttgattgggagagatatatgccagctggggtcctgtgaatttcgacaccgagaaagtagtggagaggccccaagtttttgatgtcaaattcattattcagatctgtgatgatagcagaaatgagagcttgattaggaccagtaatgagaatgtcttcatagaatttaatgcttagtaaaaatatttaaatattgaacatttcaccataattaattgtaatagggagattgagataaataattatctacggggttaatagtttaattttggaataaaatataatatttatcattgttgttcttgattgattgttggagatggagaataattcttaactacttttaaaatcgtaaatgtcattcgttatttgttttctttttatgttgtttaattgcaactcaaaaccccctttaatttttgtttgatattgaataataaattaaacatagtaattgtggatcgacctgtgttcatcattatactgaagtaattggtaagataaggataaaaataaaaaaataattagtaaatttaatacgacatacgacacacattaaatttttagcaccgttgccaaagactatttttctattttattattcgcaattattttctgtttcactaactattttcactttgaaaatctcaagtgtacatattttgtgaagtcgatactcaagaaagactatcaaagctaaagcaatatcttgagtcatcttctacttatcgctcttataggacaatcttcgacaatccactctttcaacttcttcgtcttgttaaagagccactaccatttgatcacgggtatgttcttgaccattcaatcaattctcgcaagttttaatggctcaaaatagggcgttgaaaaagctggttgcgctagatcttaatcaacaactactatgcatccattatccacccctgaatgttaacattgaactaaaaatcgcgcatcattcacttattgccctctttccacaggcttcccaatgaagatcccaacaagcatctaaa

SEQ ID NO: 10482 - DNA, 582 bp, Cannabis sativa
ttcctagaaggtagttacaatccttttcgccatcacttccatcaaaattaagaccttctcgtggaaagattcattccgaaataagtcaaagcttataccacaccattgaagcaaacaatctaaattcagcaatcacatttccatcagcctgagcaaggaaaggaggatcccagagccaattaattagctatctaccagaagatacatcactatcttcgatccgtaaacaccatttactacggaaccaaataatcttataaaaattagaaatctagtgaagagatgaactaagagtccctttcatgttctccacacagactacacaccccaagaaggttgccgaaaatctgttgcaatctctcacccattgggaggatctccatataaatcttccatagaaaaagtttaaggcggctatgcatattgctgttccacactttaataatacttcctttcaatcttagaaacctttgttcgttaagcttccagtatgccacttttagagaaaacctccctgccccatcatgcttccaaatgatggtatcctctctaaataaagtgtctagattcatagaaataata

SEQ ID NO: 10483 - DNA, 787 bp, Cannabis sativa
ttaaattttattgtgtccgatggggtccgattgctatgtaaaaattcaatttttttacatctgtgtccgatgggtctgatgaggaacctgatggggtccgattcatgttaaaaaaaaaaaaacaaatttcattgtgtccgatgggtccgatgtctggggggggtctgatgcatgttttaaaaatcaaaattttaaggtgtccgatgtgtaacccgatggggtccgattgctatgttaaaatttaattttttgtatttgtgtctaatggggagaggagtaatgtaaatgggagtattttaggaatattgtaaaatgtgtcatatcccataaatattacgtgttatgtgtttaggataaaaatattaagtatttgtaagcataaaaagttaaattttccaaataaaataaggaaaaaaaacccattatatgccgatctagttgatgagtcgatgactgcccagtgcccagtgcccagtgcttactaaggaacaccaccgacaatggctggatgagagctccatcaaagcatcgccatgcgtggtggttgttcttgatcgatggtgttgtatgagggagagaacgacgagatctgaaagttcttgagaaaggaaacacgaaagtgcaactcacttggctcaaagaggctcggagttggccaaatcgaagtcgagaagccttggttctggcaagctcctgacaacagtgaaatggtgacgggggactacggggttgggatttttaaggtataggaatccatttttggggttcgtgtgggctaaaaaggacc

SEQ ID NO: 10484 - DNA, 680 bp, Cannabis sativa
agatttgttttgatcatttgttatcagtaacatttataatatatttatttgtttggaatatttttgactagagaatatattattacatacattagaaatttgaatatacaattgcaaatattaagtatttttcttcttaaaattggttgtcaattcatgtattatataattattaataaatattaaaaaattatgagtacttctggccaaaactccttatgttttatttttatacaaattttttgactttttttggcaatatgatcccttatgtagggaatggtggcaaatttaaattttttgtctaattattgtaatctttcagttttttcaggccacaacgtttgaatgttcaaaaatttacctatatcttctttagtaatgcaagccaaagcattcaacaggggatcgcagatcgtcttgattttcataagctcaataaggaggataatttttttgggaactcgatcatctggtcgaagagtaaggtgaaagatttcaagtttattaaggaggagatttgttccaagatagaaagttggtgttttgttgatgtcatctatcttttcatttcagagagtaacattttgttgcatgttcttacttgatgtcatttggtatctttcgcaaaaaaaatttatgttgagattgattccgaggttgtagttgataaaattata

SEQ ID NO: 10485 - DNA, 522 bp, Cannabis sativa
ctcaaaagtaaaaagaatttacactgaaagaatatagaaataacactaattaagttatacttatgttatcttagccttgtcattctgtttcatatggggacaatttcaatagccgaataatgtttttggttaatcatttgtaaattagaaaaggggtcactattaatgggagaaaaaatattcttaattatcacaaaagttaataaacatttttattcaaaaaaaaaaaagttaataaacatacatgtgccactctcatgtacagcttataagcacaaagtaccttataatttattagatttttttactgaaccttattaatttatagtttatgaatttgatatagtattgataaaaacatacacctttgacacataatcttatagtgttatatcaaattatataatttttcagggctagaagtaataatagatttcagtaggactgatattatattagttattacatcacatgacttggaccttgaccctcctcctatggttaattaataattaatcatag

SEQ ID NO: 10486 - DNA, 850 bp, Cannabis sativa
gtaaagatagtgttgatttgtgatgttggctaataattcttcaatgagctgctacaaatctattgatattcactggtttattgatggcacttgctggttggtaatacttttttggactgttatttatgatcctttgggtgccccatgacatgagcctaactctttgattgagctcctagagtagctagcagattgggctactttgaatggtcttaactgagactcccagttaggcgatcccttgaaaaagtctattctttgttgtttagaatggttaatgagtttgtgtttattagttcatatatgtgttgtgttgtaatattagatgcattagagttaggatgtttataaaatgtaaagacagtgtttacttgaccactttacttgcatatagttctacttggtttgcttctaaattattccattagctacaaatataggttaggtaggtacctaaatatggtatattcacttctaaataaagaatgtatgtgacaagtgatagtggaagaaaattagagtcaaatattgtataatatatgctttcaaaaaaacaaaaaaaaaaaaactattgtatgatatattcacttctaaataacattaatacatctatattcacttcttgtgatagtttcctgattaagttcctttaatttttctattttttgttgttttttttgatgtcttagtttttgttttgtttgtcgaccactcttagagtatttctactctaatggtatattattttactaaattagtatgaaatcttcacaaataacagaattttagttgagaaagtatctaactaagcttctcttgacactgttgacaagtcataggctccaaaaca

SEQ ID NO: 10487 - DNA, 1495 bp, Cannabis sativa
gcaactgaactcgccgacacgtacagatctaacatggcagtcccacctatattcgaccccacaagccctcaaggtgttacctacatagtctctgatggctcgcacctttgactctattagctcagcctcgaaggtgacattagggtcttgaggagtctttgatttacgtgtcttggaagagataatttcaaaatccaagtcacctggttcaaaagcaattgtgaccttgggtaaaaatagaggcttagccaaaggaatagaagacacattgagaggttcaggccaagtagcatctcgcaagaaatggcgtctgccttctataatttcttgcaagaagcatctgtggcgactagcaatatcatcttggtgggttttcactaggtgttccctaatttttgcatcaattatctccaatttggatttgggttttggaattttgggtttttatgggatggaaaattcagtaggatactcaatttctaactcttctggacgataaacttctaaactagattgggacattgatggaaggagaaagcaatcccaattcttggaagaaaattatcaaactagaatttggtaaattggagaattttcaaaaacctatgttctgcctaaaccctaacatttacagtgatacaattggaccctaaaaattgctaaaaccaaatgagataacaacgatgctgaccaagaagttggtaattaaacccagaaatacagcataacgagcatgtaaaaaaaatcaggagaaaagtcacttattgtttggcgtcagtttttgggacgatgtacgaccctacaatctacgaatcaacaaacggcgtgaagatccccctgaatgcttgaagtcaaaatttaaatcggatgaaactcgtagaaaaaatgttaatcacaaagatggcatgcaaggttttgagcaaatttaggaatggtttttcgacggaaaagcttgaaaaaattcaagaatttcaaaaatgacaaaagtaatgcaaaggtggttccttttcatctttaatactcttgggataatctccgttagaacagggaaacaattgatccaacgcctagaatttgaaagagaagtggaaaagatggttattaaatgttgatatatctcgaaaccacaaaaccaccaaaatcagaggacatgcattttttcaaaagggattatgaaaaaaataccctatgcaatcatttaaaaagtacttttcattaaaatgaactttttaagggacaattgttatacccgaaattcggctggcacttcagaggaggacacgtgtcaaaatgggagaatacgaatcaacaaatataatgataattatattagaagatagtaaaatagaataactcattaaatgtaaagttgatagagtatatttacaacttgctaactataaagtcttaagcgagataaggatatacaaactagtgtctcgcgcattgacgagaaataattctacgtaagaagtacaaagcaaggcatcaacct

SEQ ID NO: 10488 - DNA, 654 bp, Cannabis sativa
tcaggtactcttattaactttaaactaaaattaataattgtattaattattaagtttaataaagatgattgctattgagcatgtcacttgcacatgtgaccagccaggtacattttattattagttagcgatattttttaaaatttattacttaaatttattaaacacgatatttaattatactaatagtaatataacaacattaattgtaccaaaatattatgataataaagagagtatttaaacaccattagcattgataccttttagcatttctcagttgctattaaatatcatgctaccagcgtgtctaggcattttacgaatgaaaattgctaaaggtactattggtgcctaatatcttcttcagtgtcatatttctattggtgtaattaagtatcaagttccatcaaaaataatcttaagagaatattgctagtcaatcgtgtagtaccatatatagaaaatactaggcatcactaatattcaataacaattctctttataaatatttaacaatattacataaaaattattacgtgaaatcatttaaaattcaaattatatataacgatattaaattaaaatatataggattcaattacacacctaatactgtatcacttcttttgctatacactcataattaataaa

SEQ ID NO: 10489 - DNA, 742 bp, Cannabis sativa
tgccaggggtatgatcaaagatacattcatttttgaaaagtgcttaagcattaagatagttgtcaagaaagtgttgattttccaaaatcctatctatttttgaaaagatcctatccttcccttgttgtttattagacaaagtataaaaatagtcagctgcctttacatcttcaagttgacattgttgcatacatcttatgaaattagaatccatatgataattcaccctatggccaactctctcttctttagctaatatggctttaaagtcactcatgattagccacttttcatttgtttccagtgaacatagatcttcccatagcaccatttggccaatactatcattagctccataaaatactgtgacaaagctgctataagttccatctattgcagatattttcaagtgcattaattgactagtgcttttgataatatctaaaataaatcttaagggattccaagctatgacaatctttcctccttggtgccaggctatatttgtcgagaagcaccacccattaaacacattgaggtacaaggttccaagtttctgaaccttggccctagtctcgagaagcccaacaaaaccagcatcatgtgatctgaaaaattgtctaatgagtttctatattttgtggttttgggctcctcagacattccagactaggaatttgtccataaccgacagagggtcctcccccctctcttctgttatcatattctccaccatagtctg

SEQ ID NO: 10490 - DNA, 650 bp, Cannabis sativa
ctctctctctctctctactcatcttctcaccttggtcattcttgacaaaattggtcttggttgagcttgaatttgtggggatctttggtgcttgagttattgtggatcttgaggtagttttctactacttatttcttttaatttacagctgagatttcgatgtttaaagcatgtttaggttgctttatgttcttgagttgcatgagtatggaagttgatttagttttgatgttgaatgcaaggttgtattgttaattcatgggtatttcctttagtaatattttttatgtgttatttgaaatgtggctttgagtttaatctgattttggtcttaattatagttttgaaatagctaaaaatatggttttgtgatcatgtttctgatggaggtattgctaggattttagctcaagtgtaagcttattttgatggttaagaattgttatcttgtatgcttaattgtttttggacatgggttaggtttgtgctctaaaaatccctattgtgaatgctatacttggtgtttatagtctttgagtttgtgtatgcttttgtgtgagttttgttgagtttgagctttaattcgtgtagttgaatttggggtttcctgggtttggaacccaggggccgcagccccactctatggttgt

SEQ ID NO: 10491 - DNA, 1182 bp, Cannabis sativa
cgtattaagagactttaacattctccaaactctaatttttgtgtccaattatctatatcagtggttttaaaagaaaactatttgtatcaatattaaagaaaataacactccatcataagaaaatgagagagaaataaaattaagaaaagttaagtagtaaattgaattatgaagttaaaaaaatattattttttcatataaatttttaaaagaatgtataagtattccaataaatttttattttcttaataagagaagaaaaatagattaatattttagatcttaattttttttctaattattttgaatttacacaataataattaattaattaattatatatgtatatattgttataaaatcagttttcaaaatatatatattccttgcataaattaaattggaacctggaaaaaaatataacaataaataaatctataaaaaaaaaactcatcaattttaaaatcgttgtcatcactgtatttctcttatcattgttattatcataaaaaaatacaataattgataaatctatttaaaacttatcaattttaaaattgttatcattattgtatctcactcgttagaacattcaaaattgttgtcaactgtatctcacttgtaattgtcaccatcttaaaaatatcaaacataacaattgataaactcatagaaaaaatgacgatgtcgaatagagagaaagagagtatcaataaataagaatggaatacgaaaaattaataaaaatttgtgagataatatgatataattagaaaacttttttgaatgaactcttgaaaacctaaatatatataatcatttataagtatatttaaaactcgtcaagtttaaaatcatcgtcattaccgtatctcacttgcaatcatcattattctaaaaaacaaaataacaataacaaatctatagagagaaaaaatgatgacatcaaaaagagagaatcgagagtataataaacgagatgaataagcaaaattaatgtaaattgtgagatactatcatataattagaaaaatcttttgaatgaccttctagaaaacatggaaaaaaaaaacatgagagatcaagatgataaatatgcaattaaaaaaataataatgaatatagagaataaagagtatcaataaatgaaaattagatttgataacacataaacaaaattaa

SEQ ID NO: 10492 - DNA, 553 bp, Cannabis sativa
actactttggttaattcatatattattgatagaaagaataatagattgagggaaaatgatcttcattgattaacaattatgttcgagtataaattatatgtaagagagaaaacaagagaaaaaactaactaaacagtatataatgttatatcagaataacaaccataatagaaagttataactaactcataactgcaacattatctaacagtcattacttttccaaacttttaatcaaaatagtaactttagtaacaagagaatcggtaaggaattaaaattaaaagaataaaaatggataataatacatccatgttcctaagtgattgcaatgagatgagttttcattggtagatcaaaactaactaagatcgaaccctcttgacgggcttccactctaattttgtatattatactccttagatcaatataatagaactctcaacttcattttaagtaactacaaataaagaacgaaagaagcaattaatttggtcaaattccattgtgtttattttctacaaaaaataaataaatgaagtatgcaacttgg

SEQ ID NO: 10493 - DNA, 624 bp, Cannabis sativa
tgagtaaaaacttacaacacacaattactcaaaaattggttaaaaacatagtatatattatcttgatcaaactatgcacatgagattgaaaaagacacgttcatcataattttggcactccaataacactctaagaatgattactcaattacacaacatgagacaaggaaggaacgaaaacatatggatgtattttttttcattatagttaatcatcaagcacaataacacactaagcaaactacttttctcataagacaccaaaacaacaatgcaaaattaagtaaactactgtacatgaaaaaatgaacacaatacgacaaacccatcataataactataccctttttattatcatcatcaacttatcaacatatcactagtaaagagtagtttttcaataatcaaattaccaaacctttaaattttgaatttaagctcaaatttcaaacaaaatattgatacataaaattaaagatataatcttttacaaactaagtgcattaatatatcatgacctgtaactagcaaagtaaaaaaaaaaaaggtcttgtcttgtgacatgttgagtatgttattttgtctctaagtttttgtctgttgctgtcttggattgttgttctt

SEQ ID NO: 10494 - DNA, 508 bp, Cannabis sativa
gctagttagggtgttacacattcagtggaaagatcaatagttgtgttacttgaggtgtttttggctttgttggcagtgacattattggcagaaaccttgcctttctcagatttctttttatctccatatcccggagggaaaccatgaaggaaatagcacttgtcaacatagtgccctagtttgccacaatttgtgcaagatggtcttggcttcttggaacggtcgggattggtagaggatgaaggacgagctaaggcagccatagaagacatatttgaggatgaggaaccaagggttctttgtctctcttcttgaacaatcatggagaagacccgagagagattgggaattggttcattgagtagaatttgagcccgaacagaagagtaagactcattgagacccgttagaaattgtagaacttgattttgattgtagtaatcaaggaacaatttcatcgcaccacaagaacaagtggtgctcagttggaattccttaagctcatccc

SEQ ID NO: 10495 - DNA, 802 bp, Cannabis sativa
agctggttctctcatctctaacctcactcttgcattgacttttccataacttgttgtgtcctttcaaagacgtattcatgcattaaacaaactagtaaagtaaagtcaataataaaagaaataaagtaatcaattcttgatcttttgtgtatcgattcagaaaatgaaaggtcgaaattgaccttgtgtaataacttgtgtgtgtgagttgtgtagagataattctgtaaattcttaaagtggtatcagagctggttttagcagtaagaaagactcacaagaagggagaaaaaggagatcaagattgaaggaagctggtccttgaaaaggaatcttgatcaagaaagagtttgaatgttcaaactgagatttctcttaattaaaagttattatcttttctaaattaactaacatgagcaacctaaaagtttatattgacaggtttgatagatctagagaatatagaatttggagaaggaagatcaagtcattattggcacaacataagctgcttagagtgttaaataatcccattgaatggcatgatggaactactaaagttcagtaagaagacttgcttgaaacaacaactggaatcatcattttcaatttgtgtgaggcaattattagacaagttgagaatgaagaaacccctgccaaaattaggaaaaagttagaggaacaatttcaacagaaatcccttaccaataagatctatttgaaggagaggatctttggattcaagatgtcacattcaaagactcttgaacaaaacctagatgagttcttgagattacacatt

SEQ ID NO: 10496 - DNA, 731 bp, Cannabis sativa
ttattattgtgtttttgtacatggaattttactcatttgtcgattttgattttagttataattttgtagtttgggtttcatccgcagtttaagataataaagtttttatttgttgtagtgagtgaattactcatattggaaatgtataaagggtttgattagaaagagataccatttgtttaatcaggaaaaaaaacaagaagaaagaagaaaaaaaagagaaaaataaaaaaatatatattttttaaaattatatttttttttttgatttttgaaatttttaaattagactactaaaaatttgacatgtgtacacaagtgtacacgtgggcagttcactatgggacttaattgaagtttttggacagatgtttaatgagcaaaacaaaagtgaggttcagagagttttaccaccaaaaattaggattgtggagttaaatgtaactaaatgtatagtctgggtaatattaccgccaatatctcttattaaattaagataaaaaatcattaattaaagtcctaaaactaaaactttaactaaaaattaaaacaaaaagaaagacctggaatatcatttaatttcttctttgtcgtcatcttcttcatcttgttaaaaaaacctaaagtttctaacttaatccttctcgaccactattcgtcatgcctcaattggtagtatcagatagtcaacttagacagttcagtttagaagtcatcgaccacaacagtgt

SEQ ID NO: 10497 - DNA, 774 bp, Cannabis sativa
catccaggtatcagctggataggcttccatgtttggcagggctagtccttaaaatatatgggcttaagatgaattaaattttggggccctaaaaaatatatataaaaaatagtaaaaaaaacgtgtgttatgggattcaaacccatgacattgtataatatttcatacacctcaaccaactaagctataaatatttgttgtttataatacacttaattttacttaaataaaagcctaattaaaaattttattttttattttgggcccctaaaaagtgtgggccgtaggcacatgcctagcatgcctatgcctagggttggccctgatgtttggaccacttcaagtctaggagagacaatatgtcttccacgtccaagaaacttaggataagacagaatagacttcctcttatccatcagtcttgactcgcttctggttctgtgaggcctctccgtgatgggattgtaatgggagactttaattagcgagattatgaggttcatcccttcctttatatgccacgtgtcacatgctaaaaaaatatagataacatttaaccccaagcttataagagtttttaagatctgggagcttatagtcttcatctaattcatggagattagactttgacacatgatgactattgggatcgcaaatgcatcatgtaagctgtcattgagtaaggggtcattaactgcaagtaccattggcgtggcacgcatgcagcacctttaatgtagcttttaacaacgcatgcatgtcgggggtccatct

SEQ ID NO: 10498 - DNA, 501 bp, Cannabis sativa
aaccatggccgctttgcctttatcaacgctagtgatgacagaagtggtcataagaggagcagtgggcagaggacatgagagacttggataaaacatccaaggatagggatgtattaaccatactgggaatgaggaattggttaatggcatcctgcagactttggttggaaacagagttacgtgaggacgattctttgaaagggacagagttagagagatcgaagatgctctttttataggcagatttggcaggagctcttaaaatgtccctgtaaggaagggaggggggaacaggggaaacatcacaaaatttcagaagtttttcacaccatttaaaagtgtggtccagcataccatagtaataacagtagttttggattccctcatacataaacttcagccatttaaccgagggaagagatcaaaatttgatgttcatgccacggcgaagaggcctggtgacatcaacaagaacacgaatacgcataaagggaattatag

SEQ ID NO: 10499 - DNA, 991 bp, Cannabis sativa
tctcagatcaatctctatcgcaactcacttggggctctacaatctttcactttaactaggctagatgtggcttttatagtcaataaattgagtcaatttatccatgcccttactacagcacattgggaagcctacaagagactatttagctatctcaaaggtaccataaatgaagggattcacatcagacctaccaaatgactttacctctaagcttactaagatgctgattgggtaagttgcccagatgacacaaacgatcaataggtggatatgcagtgatttggaggaaattttgtatcttggtctgcaaaaaaataataggtagttgcaagatctagtactgaaagtgaatttcgagcccttacaaacacaatcgcagaagtaaaatggttatgttttgttcttgttgaactaaacatcaccctgccatctcctctaattatttacgttgacaaccaaatgctgcttcattagctgtcaatccagtctttaatgcttgttccaaacacatagagattgattttcacttcactcgtgatcaaatactggccaaacaagttgaagtaagatatgttccatcctttgatccaacatttgatattcttacaaaactgctatctattgatcgatttagctatctcaagcacaagcttcaagtgtatacaacacctttttgtttgaggggagatgatagagtacctaattctgctacttattattttgagttatagttttgtcagttaaaacctttaaaagttgtaatttctgttacaaactataattatctagttccatctcttgtaatctctctacataaataaaatccaaggctagatctttgaattactttctttctcatagagtgagttctggtaaaaatttgtattgataaactcagaatataataagttatatttagtcatcagaattttggatgtatagataatattagggtcttactatgaggtcccagtaggggaaacaataa

SEQ ID NO: 10500 - DNA, 640 bp, Cannabis sativa
tatacaatcaagataatatatatatattatcaaaccaccaaaaaattatgaactcagtcattaattacttaataatatatatttaataaagtaaatatattttctcccaataaaatcagttttgttagaataaattagatctaatattttcctaataaaagtgtcacctcattattatttcttttatgactaattaagagcatctccaacatgacttcaaaacattaaatatagtgtaatttcatactatatttactctaatgggatactaaaattatacttataaataaatttgtttactgtgtcccactaaatttaatagggtactgtagaccacattattttttttttaagtttttaataattaaataatattttttttttaaaaaaaataaataattatatatatttagtattaaaatattcttattatattagtaaaataatagaataataaataatataaaatttggtataatttttagtattgtgattagaattgaaaaaaaattaatattaaaatagtaaatttttagtattgatttaacgctaaatttaagttttaccaatagagagatactcacacctcattttagtgcgcccaactgtaaatataacatgtgcgagtgctctatatata

SEQ ID NO: 10501 - DNA, 1145 bp, Cannabis sativa
ctctctctctctctctcgatcttcccttcccaggccctctttctctttcttcgtggtggttgctgaagccgaagctccacatctcttctctctctctcgatctaccctctctttctctctctcgatcttctccctccttgaccctctctctctctctcgtctctttgtggtagacttcgttagggccaaagcaccacgactctgattaagccatctttgggccccattgagccaatcaaagctcgattttgtttctcctagttgaaaagtttcagatcccgattgagcatctccagatgccgattgtggtggtttttgtgatttgtggtgatattttttttgtgatttatggtggtggttgcggtggtggttgtggtggtgtggtggtagttctggcggtggctttggtggtagtgactgtggtggcgatgataataaagaagaagaaggagaaaaaagataggtttgggtggagcaaattagagtttcaggaaaaaaaaaagaaaaaaaaaataaaatatcttttttttttataatttttataattattttttaaattaatattatgtggatcactaaaaatttatcatatgtacacacatgtatacgtgggcaatccactatgacacttaactgagattttttggcagaagtgttaagagcaaaatggaatgggattcagtaggttttgtcatcaaaattttaatttatgtggttaaatgttaaaaaatataaaatttaaataattttaccaccaatattctttccaaaaataatatgaacttattttcttggacaaaataatgataatgaaaccaaaacataattacttttttttaacattttttatagttttttttttatttcacgtacatttactaacattatttatgttactattttttaacgacagcacattaattgtttttaaaattaatatagtaacaatcagttgccatgatcaaaacatacatatatatttttgtaatgctataataagcttacctccaacaattttttcgatagtaaccaattagtgaaaaaataggctacttatgatttttgtcattctaacaatgacgtatatattattatgcctataaattttttagcccgataaaaattatctcggaactattcacagt

SEQ ID NO: 10502 - DNA, 548 bp, Cannabis sativa
gagatggaaattcattgaattttcgaatctgcgatgtttgaggagagtaaaaagtgaactgctgaaggaatttcaacttgatggaagcaaggagagtttgtcttcttggatctaagagtacttagatctgttgtcttgacagtgttcaagaattaggtaacattgtgtaaagtttcagattatgtagtttgatttgtaaaatctaaactgatgtatataattgaattgattttatagtagttgttattttacctgatttttgggaatccaagcactactcggttggaatgtataattccaatgcagaggaagcttgtaaatctaatgttcattgatttagctttctagtcttaattcttcgtaatattcatttatgttcaattacttagcttttggatatattagaactttcaaattatttcactttaatattctattttatagtattattatgattattattctattttaatagtttttcattatcgattgataaaaaggactttgataaaaacatgtatatatgcttacattggaatatatggttt

SEQ ID NO: 10503 - DNA, 1020 bp, Cannabis sativa
tttttttttgtattgtataatggaattatagtatttgaaggaaatactttatgcttgtaaagacaataagaccgcgcttggaatgctaagaaggaatattggaattggttatacagtttatctgatcacggatattacaagtttacgtaattgtagtaggtaattttctaattcttattctttcataagaattgaatgtaattattaaaacattttattttaaatattaagtattaaaaattattattttttgtgtaaaattaaaaactaatttattttatcaaacaaaatattaagaattcataagtaatcatcaattcatcacatttgacaccttttattttaaaatgtaatgtaaatactatgttgtgtaattatactatatatcctagtaattacatgtaattactatcttagttcttacataattacttccaaactactctaataaaaacctcccattgtatataaaaaaaatattatcacatatataattttgtttaataagatgtaaatgctatagttgatatatattttgaaatttaaaaaaatgatatatacagtattttctaacaaaaaagtaaaataatatattattaataaaagactacatatataaacatgtacatattattttggactatgtgttttgtaaaaattactgattagatcttttattttgtgaaatgataaaatagatcctatattttttaaaatagtaaaaataagaccttaaacttaattttcgataactttttttttaatatcaataacttaaaaataattcctagcatgaacaaatacataaaatatatatagttttatcataatacctttagatcggcttattattaaattttattttgataaaaaattagttcaagatcctatttatactattttaaaaaatacataatttattttatcatttaacaaaaccaaaaatttaattaataatttttgtaaaatactaaaataataatagaaaattctataatacacccgcttaaaggggtatat

SEQ ID NO: 10504 - DNA, 521 bp, Cannabis sativa
tatttttaaagtaatttattgattatgaatttatactaaatgactataagtgacataattattgacaaagtcaaaatgagtgaaaaataaatattattgacagaggggaaaatgggtggaaacccaaagatatatcttataaattagaaaaactagtaattaaataattattatattatgttcaacaacaaaattagtaatttaaattatattaataattaattattaaaaataataatatcgtataattacacacaattcttatcgttatgaaaattaaagaatataataatgacatttcaattaatttctataatataattaatcaattaaacaagcacacaaatttgaataacttttttgaactatactcaattcgaaatacagaataactatgtacaaatagtgatttgaagagggtctttttctaaattaaaaaataaacactaaattgtgagttttggttatgcaatcaacaataatcctatggatgagtatagatattttactaatgtaatttg

SEQ ID NO: 10505 - DNA, 707 bp, Cannabis sativa
tgcatgaaactttttgtgcgtgaaagatcacagggggtacgacacatcttcacctccttcctagaagagaagaactgcttgaagtctatcatacgcccagtgatgtttcaccctttggtcttttaaatcaaagtcattgcttgaatttttatgcatttcttaaccttctcttacaaaagccaaaatctgtctcataaaaattcaacatgactaatgcgtatcgaagcagaccccagcatggaacgggtcctcgagtgatggcataatttagctttcctccctatcaaccaaaagcttcccattccacaaaagcttctgcctccaccacgaggtctctatcatggcaaaggatcatataccgaacttgtggatggaaataccacttggaagaccagtgcaacttcaaccctccctcttggaaggaagaaccgcttgaagtctgccatccaaattggtttctacctacaattctaaaaataaagccttcgcttaaaattcagtcccagaacagctttcccccgtagaagcagggaaatcgcttctgaatttagccaagcgtctctcaaaatttaggaaaccccccccccctccagaagtgaaagacacggtctgggtgattagcgtaaattacgcctcctaaagcaagggttggctaaaaatacgcacccggacctcctcctagcgaccaagaaatggtacaggttgga

SEQ ID NO: 10506 - DNA, 905 bp, Cannabis sativa
gatccaaaaaatgagctgcccatggaaatgaagcctcgagttctatcaaagaacccaagagaataaaaacaactgcaaacaagaagaaatcttcaagccaactcactatcgagtctgtaaaatttctagaaaaggctgcccctgcctcggtgagcgccagtgaacaacccctttagtctgttcaccaggtgaaattctctggttcttgcccggagatggtcttccttgagccctgctaccccttgcctattgaagccggcacagaaggttcgcagctttgctcgctacacgctaccaataactggcggtgctatcagtgctttttgtctagtgattgggaattgctcaacaagggaaattttgaggctttggtgtagagaagttatgatctcatgcagcaggttagtttttccctgctctttttcctttttctctcctcatctttatatttctttcttattacatgttttcattccttgcaggcatctcttttgtcttttactgctcaacaccgagggcttcaacaagttgagatgctcgagactgagctttgccaaactagagaacatcgtgatgtcatggccaagaagtggaacgactcaaagtctgagctctctcgggtaaaggaagatgttgagaagcaacaacaagctgactagaagaaaatcaaagagcacgaggatgccctcaagaccatccaggatgaagctgataggaaacttgaggaggccaaggctgacaccaaaaatagagtcaacaaaattcccaagaggtctatatatcaagcgtggttagccaatcctgagatagacttcaactttctgggccaaggggctgaagagatgcttgcctattgcaagaagaccaaaaaggaagaggctggagatgaagaagaagttgaggct

SEQ ID NO: 10507 - DNA, 521 bp, Cannabis sativa
gtttcatgtaagcttgcctccctaaaatacaaatttgtatatcatttgtcagccgcgggtaaaatacacaaaatatttagtataatacatacacataaccataaagtaagtaaggctggccgtaataaaattcaacattaatctaaacgcatgattaattctctagttttcattgttagcccattttcgctacaacgttgtttctctaaatatcagctttcagtcggtacaaattttggcaagcatatttagactttagaaagaaaaaccctttagaacttaagaccccaatggtttgaaatcctttacactttatttgccataaacaacaatgggttcagctgaactagaggcacctacatttacactcatataaaaatgttgataatggcatcacactagacaaccagtcgactacaaattcaaaaattaagaaaccaactcacaccatttcgattctaaaagaagtacaaaacatgttttctgaatttagcacgaaaacttacactattttcagacaa

SEQ ID NO: 10508 - DNA, 736 bp, Cannabis sativa
ctccatgataacagtccaagtgttcgagttcctcaatgttcgagctgccataaaaatagtaaaaatgccttttgtaaaaatattgtcatttgcgttgttgtttcttttgtattgttttggttcaagatcctattttaactttattatttagtaggattttgaacaagtgttcctattaattttgcatgtaatacttgatattttggaatgaaaatggttattttgacaagtttagatcttctactgccaacataaaagttaaagtatacatattccaacaggatttgtcccaaaataaacctatcacaaaagttaaagactcaattacctaaccattctaaaaagatctgttccaaaataaacctagcgcaaaagttatctattccaaaataaaagctttctattaatggaggcagtagcagtaatgctataacatttaacactaacaattacataacatttaactatgacaaactaatactataacagttaacttcattgttgagtagactatgaggtcgatccttcccttgctgcctgttccagctcactgcttctcctttcacattctcctttttaatgtttatgggattgaattttgaataggtagcttccgtcctttattttttgaacctacaccaatatgataacatagtcaataccaactgaaagtgtattaaaatatttaagtgatataaaaatatacctatagtggtggtagtgttttagatttttt

SEQ ID NO: 10509 - DNA, 608 bp, Cannabis sativa
ttcaattgttttattaaaatataaatagttttttgccgttttagcccatatagttagtgatccataatttatggacttaataaagtctagtcgaaacaaaagtgagttttagttaattggagtctttaatgagaaggctcagtccaactaaaattttattgttaagtatcttctttgtatgttattgttgatctacttctgttttagaaatttagaaaaaatgacttaataggttaattttgcactgtcaaactctattaattctcagttatttctatggagtgataaactctattaatatttaattattattgtatgcaatatagtatcctggtgtgttataaatttctaacaggtttctcacatggcttagatgaaatgcaaatcttatcttcctttttcatcttttttaatgccaacattgacatcaaagagaaaaccatctttcaaaattggcaaagacgttagaattttttgttctaaagaatcaaaatgtaattaaggtttcaggacatttgaactaaagtttgactataattaagttccatcttaaaagttcaaaagagattgagatgacaaattagaaaatccaagttgtcatacctttc

SEQ ID NO: 10510 - DNA, 668 bp, Cannabis sativa
gtatacatatcttcaaaggacaatcgattgtcaatgtcattcgaacacagagatagtctcgccaataaccatttaaattctttgaattcgattcaataaattttttgatataattcccaacatcttgcaccacacgagcagttttaaactcgtttgaagtccatataattgaacttacatgtccacttcatccagaaccagtgtcttaggatcctcctttttaagtcaatgataaacgagcaaaaaaaaattataaaacgtccaagggctcttctccatcaccctttgaatatctatctcatggtagaattgatataaatactaattaatatcaagttctttcacgtacaaacattttacaggctgctagagagaagccattagatgttgcatagcatcaaaatcaattgttctcgttgtcaaaaatcaactaacaagacatcacatgtcatcaacaatcataatcgcctgacgctgccgctgtatcataattgtaaaccaattcatctccctcatccaaccaaatgttactgcattgctcctctagcgcacaagccaaatggctactaaaagccataacccacaaagatcaatcacgaaatcaagaaaaccaataaaatgaccaagagatcttacaaagaaagcatgtcaacaatagaaaagaccta

SEQ ID NO: 10511 - DNA, 1069 bp, Cannabis sativa
cgtgtttgtacaccaatcaaagtttagatagatagatacaagcgtttctatgcatatatctcatttaattaactcatcacatatcatcctcttagttcttaaatatttgactctattaaagacctaaattatttatttattaggatttcagtcgttttcttcaaccataaacatacgttatatgtatatatcatcaatacatgtatatatcatcagttattgtaaacggcgaaagtatcgatgtttggtggcaaccttggattccatggttggaatatgctgaatttcgtgcgcttatggaaacaattagaggaagggcgccttatttacgcaatgtggcggatttgatgtaccgtaacacgagaagctggaatcatggctttttgtgcttcgtctttggcaatgaaattggaactaagatcgggggaattcaaattgtgaagaacggagtagaggactttgtagtgtggaagaactcaacttcgggtcacttttctgttaagggagcgtattgggctgctcaagttggccgtttcaatgacactaataagttgtggggttggatttggaagtctagcattcatcctcgtctgagcatgatgctttggagagtttgtgcaaatgttcttcccttagctggtgtttttaattctgcaggaagcaagtgttttttctgtgactctgggaccgagaattctcttcatctttttgctgaatgtccctttgcttcagctctctggttcagtagcccttttcctgtgagattgaatctagtcactgttgaaagcataccggaattattgtgcaagttgtgcgaaggagtcaagggtgatgttaggggacagatgttgggatgcttcgccattttatttgagactatttggaacataagaaatagaattgttcatcaaggggaggcggtttggagcattgaccaagcaagaagggccatatctaaccggtttcaagagttagtttcgtcctatactgcccacagttccattaccccctcatcggtccttgatgttccactcaagttatcgtcgaagtatttagtggttgtggatgg

SEQ ID NO: 10512 - DNA, 526 bp, Cannabis sativa
aatgatgatctcaggtagtgaatactcatcccatattagttcaactttgtgctgagtattagaactaaagacaagaggtcttactttgaaggctctatctcttgggttcccgctttcaattgaaacaatgagtaactcagtgataatgacttttccaccacgagccttgtctagatccttggacttttgcactatgagcttggcacagatgaattgggtcatgtgtcggtcatattctttaggttttctgcatgtttttctcacatgaggcatatttccgatatacacaattctcctcaaaattgaacatctgaatattaacttaattcaactcaaatcattttttttaagaaaattcagacaaagtgcaccttgcaggaattgagatttttagctaaaacaacttttttgaaaattttatttttgaattttagaaggcataccaatgggttaagtatttccaacaagatctagaattcttgaactgagttctacaagagtagaaaaaaaataattaaaaaaaaat

SEQ ID NO: 10513 - DNA, 612 bp, Cannabis sativa
ctccaaccaaacgcaacctaagtgtcactattaaaaaaattactatttaagatttttactccccgaatcatgatttatgtattattgtgcccttgaacttttcagactgttaaaaatgatctctgaactattcacaatgttataaattggtcattttgtcaagttttgtcacacgtaacaaataaaataatgacatgattgcttagccagttgctatgtcagtattatgttatcgtcacatgtgtaattattattttttttaatttaggtttacgtaggtaattttcttaatcattaattgatttttagtttaataattttttaaaaatacataatttttattttttaaatgttaaattgtatacaaagctgatgtggcaatgagctaagtaattatattattattttatttgtcacgtattacaaaaattgacaaaatgattaatttataatactctgaataatttaaagactatatatttgtaactagctaaaaaattcacaggatacaacaatatatatcatagttcggggataaaaattttaaatagctcgactaaatgatgcaagagtctatatatatatatatatattttttttttttgaggaaaa

SEQ ID NO: 10514 - DNA, 974 bp, Cannabis sativa
tgcagcttataacaaatgacaagttcaaaagtgtaaaccatagagtgttggctaaccgtaaagggccaagaatatcggtggcatgttttttcagcaccagttttcagccctcttcaagactctatggtcccattaaggaactcttatccgaaaataatcctccgatctacagagaaaccacagtgcaagagtatgtttcgtaccttgccacacatggcatcgatagcccgcttcaacggtttaggatttaaacttgcatatgtcgcgattttgatgaagctacttataaacattttggccattatgtagttttggagaataaataatggacttttctttgtgttcattaggaaaaaatatttgtatacttaacatatggtttgtttgttattattatgttatgctcaataaaagtgaaatgttaggatttagattcattcaaatatttgaagataaatattaaggaagatcttctagacgatttggtgaaatctaaaaattctacaacttctccccatatctttttcttttgcaataaaatatatatgtatatatattttttttgcaagaagatactatttcaccaatcaaattatatattttgcattttatataatttaggactaatttagtaggccgtgtaagggttttatcatattaaataacattaacgtttggataaaatattatattgtattaattgttataagtataagttttaatataatgtgaattatattatttaatatatagtgaatgatatgcattgatttatattgtaatatttacaaagggcttggggttggggactctaatgccggtcccagaccccagaccctaaatctagaattagactcggactcaggccttgttcttggctcttgatccgaccctagccctggaccccaaacccggacttggacccggagctcgacccaaacttggccgctccagctctagacctagcctcagcc

SEQ ID NO: 10515 - DNA, 1414 bp, Cannabis sativa
aatagaattaaagttaatgtagacacaaccttgtttgatgagggtcgttcttttggtacgagtatgctggctagagatggtaaatgttggttgattgagggacgaaccacctttaaggtgggcacggttgaaccaatcttggctgaagcaattagtgtcaaggaagctctcacatggataaagagacagcagtgggatcatgtaattgtggagagcgacagtcttggggtggtgcaagcattacgtagttctatacatatgatttctttgtttggtcaagtcattcaaagctgtaaaattttacttactgaattgtgtaccgttgaggttatttttattaaacgatctgctaatgtagtggctcatagctttgttaggactgctattttgtatcctgatcgtaccttcagtatggagtctgttcctactgatttgttaccttgtttggtaactgaatttgttggttaataaagttaacattttccattaaaagattccttagataaaagattcctcttacaatctataaaaatatattatttgaactatgatattgtaaagtgattgtgaaaaataaaaaaaaaaaaattatatattataagcatatctgttttatttcgaaatatattgtttgaactatggtatttttgaaaagaataattaagcttattttttaatgaaaaaagtaaacaatgataagaatctatgattttttgaagaaataagttagttacctttggaccattgtggatgggccttaaggcttgggccaagcccgaaagcctccaaaagaacacaattaattaatgttgattattgttaatacatacataataatacaaaagagatatgagagatgaccacgttagaagaggcttatttcatgaaaaactagtacatcccctcatagtataatatagatagatcttcatgttaagtagtttacctatgatgatcatattcatatatggcacactttccaagtaaaacaaatattttattatattgataagagtatttaaatagtattattggtgtctaatactattttcatatcatattgctattgatataaagcttagtcttagcataagcaaactaagcctgtacttaggactcacctagctcaggacctaaaaaaactttattttcattttaaaattacatatttttttattaattttaaaaaataccacatttattcttaataagggcctaaaaatatatattttttttccatgtccaactaaattttaaggttagtattgaatctcatatatcttaagaaaataatttttaaaaaatatcgctaactaatcgtaaaatattatctataaaaaaatattaagtaccaataatatacaatatcaataatagcaatgctgtattgataattaataagataataataagg

SEQ ID NO: 10516 - DNA, 654 bp, Cannabis sativa
acctttgtcccaaacccaatcccacacctcgagccaactaagacttcaaaccccttgcttgtaaagtctcgatattttcaataatttcaaagggatcgaaattttgactttctatgaatttattggattaaaattatttcactaaacctaagttaacccgcattggtagaataggctaacatttcataaaattcaattctactcttcccatttcaaacacctgaccctctctcttactcccttctctttgtcgctctctgaactcacccaaaaaacttgacccacaacccaccacccacaacatcggtcccttctctccacgatcaccacgaccacagacccaacgacccacaaacccaacgacttctccatcaaccacggcttctccatcgacaatattgtcaaatgtaagtatcattttttcatgatttttgagtttgggttagatttagggttggaatggtcaaatatgtattttggacaaattttgggttttggcctggtccgatgcaggctcgatatcggcccgatgtatttttttttattgaaaaggttaaaggttaagacgatagcccgatgtaggcctaatagtgtgcttaggttttatgattttttttttgtaaggctcgatagtgtctatttttgtgctatttt

SEQ ID NO: 10517 - DNA, 586 bp, Cannabis sativa
acaaaacatagacgccattagggatgatatcgccaaatgtcgctatcattgtcgaaaaatgtcaataaatatataaattaaatggaatcgaattgccaccattaaaatccaagcacaaacacaaaaaatcatcttaaaattgaataaatttccttaatctcaaccataatcaacaaaaccaacataaaattttaatacaaaacctaaaaattggaagaattactcaaaaaaaaaaataataaaaatagaaacttaccagagactgtgagaatcgtgggtgggtggcaatggattgtcgtggattatcatgtgtcgtcttgggtgcttcttgggggttgttgtgggtcgtgggtcgtgggttgttgtggtgcttctcatcctaggtggcggtctgagctcgcgagaagtgagagggttggggattttgatgtaggtggaggatttttcaagtgagaattttgagggtaaaagagagagggggaagttacacatatatagagagaagagggtgtttttaaagaatatttagtgtatttatttaaatatggtatattaagagagcttgttaaatttttaagtatgctta

SEQ ID NO: 10518 - DNA, 570 bp, Cannabis sativa
tcagattagtgctttcgctcatctgtattcattttttttttttattagcaaaagatctataaatatgatttaaggttttttatattagagaatttttaaaatatgattaaatatgtaattatttgtattttttaaatgtttttaaagatgtctaagagatggagctacaaaattatgttactgctagctagtgctattgtttaaatttttttaacttgttgttaggctaaaattttattaatatttctaaatttttgaattttgtggttcataatgttactaaaagaactttggctatgaacattattggttttttagaggtctcctctatgccagataatgtattttgtttcgacctttaagtatttttcttgtatcgcttgtttttcaataaataaataaataaataaaacttatttcttaatcccaatcccttattcctaaagtacagacacactagctactaataatgttattatgaaaaaattgattatgcggctcattgaattggtctcgggtccaagtgtccatgtgatcatgaatattgatatgtatcaatttaattaataa

SEQ ID NO: 10519 - DNA, 707 bp, Cannabis sativa
aaaaatatagtaaaaaaataaattatgtcgtcctgtagtataaaaagaataaatttgaaaaaacaatatgtggtgtaagaatccatttttaaatataaagtccaattcaacctatataaaatattaatatatttttacaatattaaattaacacataatatatatttaaaaataatttttaaaaaataaatttatatgtttttaactgtataaataaataattaaagtataaaaaaactatatttatggctgtaatttgtgttttttatatttgtaatttcatgctgtgctttcgtgtttgacgtaacgtcatgtgcttaaatttatatttttcatgtcatactgaatttaagtttatatatttttttttgtattgagtcgtacttatgcttccaaaatttgtgctagtttgataccgtatcgaaaagtgtaacttgaatgtattaactctatagcttgagttgagaggaacaatattctaaaatttaagataagaagtcaaagcaatgtgtcaaattttgttttttgttttttttttttttttgttgaataataatgagaattcattaaatcaaatcttctaaaaccaaggaagtaattacagtaggtataacgcaacagtactaaaagtacggtcagcttccgtaagagaagatcgcgccagagcgtgcacaaccttattcgcagaccgcttaacaaagctaaaa

SEQ ID NO: 10520 - DNA, 1228 bp, Cannabis sativa
tacagaaatttagtccttctattacgtttggtcctattattctatttaaatgttgacgtgtttttataaattaataactctgcctcctaaactttgacaactatcaaatcgtaccctttcaaaataaaaatgagaaagatttaatattttttttaagtaaatcttaaaaaattatgtagatcttaagaaaaaattatttttgaatgattaaaaaaattaaaaaataaattaaaatggtaaaactcattaggcgatttaaaaattatttattttttttattaaaaagttcatttagatattaaaaaaatattaaatttcaatttttataaaaaataaattttacatggacaaacttgagtatattttatttttcttaaaaaatgtagattagtttaagtaaacataacaattttttagtttaatttataacttttttgcaaaataattttgtatttttattgaatttttgtttgttaaaatatgagtttataaatataaataagtttgattttttttttcaaaaaatcttagtttatttaaattacttataagattcttaataaaattttggtttaatttattaaaatacatgtttataaataaaataaagtttgaaagtatgttttaggaataatttaatttttttttaaaaaaaataatatttttaattaatttaaaatttttattaggtttttaaataatttttattattttttctgaattaatagaatattataattacttaaaaatagaatattataatttttaaaattcttttttaataaaaattggcaaaattttatattggtcaaagttgggtaaaaataataatttttaacggtatagataacagaacataacaaaaaaagtataattatgcaactattatattttagaggaaatttttaataagccgtatattttagagagtaaattaaatagtgttgaaagttcaaagaacaaaaaatgcttatagttctattataattacatattttgaataaatatgagataattattgatttttatgagtaaatttttatattagtcactgaacaatttaaaaatattaaatataatcaattcattatataattaacttatttacatcataagttgagaatgagttttattttaattgcatatatcaaatttaaccaactatatattttaaaaatgtgtatgtatatatattaagttcgacaatccgtttgaatggaaagaattt

SEQ ID NO: 10521 - DNA, 559 bp, Cannabis sativa
cggagaccggcggcagagagagccctcaaaaggctttctcggggagaggggtttgatgtgatctatttaatagaaactaaggttgatgaagattcaatgaatgcaataactaggcgattgggatttcaagaattcagtggcattccctctttgggcacggctggggggttttgtgttgcttggaagaagggcattaagctgagtattaggaaccaattcaattcgggctttgagtgtcgtattgaagatgaacacaaagagccttggactatgttctgtatttatgggactccctatggaagagagaagggagcgttctggcgttggctaacagagatggtcaggaattgtgatacaaggtggatggtttggggagatcttaatgttattctcaatgctaatgaaaagagagggggtcgtgcgtttcatagccgtgaagggggcaatcttcagaatttcttgcaggacaccggaggcgttgacctgggattcattggccctaagttcacttggttaaagtcgagggatgcccgcaactctgtaaggaaaagattcgatc

SEQ ID NO: 10522 - DNA, 721 bp, Cannabis sativa
cttaccatttggctagagctttgtggttaaatgctagttgtacctattcaaattctacgattctgagtattttacgtgatgtttttttgaataatttgagctaataaaattgtatttctattaaaaaaatatattaatttcattttatttttaattaatttattaattttaataaaaaaaaaatatatttaaattttaaattattatttatttgaaattacatgcatggcacttacttggcaatgcgatataagtgaccaaacaaccacgtcaatatttaattcccacgtgtgacgaaatttaaccgaagaactattttatgacactactgtggatagttcaggggataaaaatcttaaatagccatatttaaataagcataatttatacaaacatatacatatagttaaaagatggagggagagaataaagatgtgtttgtgtatataaaaagaatagagaaatattaacaccatccccattaatacaattaagtatattgaatcccatatagttaattataataatttttatagaatatggctaattatttttaagaagcaatattgatgcctggctcataacaataataatgctcctttatactacaaactaaaaaataacttattaaaaaattaagaaaatgttttgataattgatctaaaataaataacgaaaaggttatcgacttatattaattaagctccgatcgagaaccttc

SEQ ID NO: 10523 - DNA, 622 bp, Cannabis sativa
attaatttagcatataatttatttgatagtcatgtatattaactataatagttattatagcatgcatcttattatttttttaaaaaaattatgaataattaatgtacaatttcgagaaaatggctcaaacgagttacaagtatatttatattgtatttatatccatacaaatgactatattgttcttaatatttaatgttaattataaattattcaaaaaaattcaaaaaaatacaaaaagatatttctgttatagctataatatttattattgtataaaacaaataaagctataatttatgcaaaaatgtccataaaaaatgtccttacaacaattggacatttactttagcagaacatcttttatttttttaataatttctacaaaaaaaaaaataataaataaaataacaaaaaaaaaaaaaaagagaattacaaaccttagggatgacaaatattgcttgttcatctaccctcagttctcgaatgccaaagtcaagccctgcatgcatgcatgtggatatttgcatttaattataagaaacatttacactacaaaatattattacaaaaattagtgtaatcctataataataatcatttacagtaattaatgtgtttt

SEQ ID NO: 10524 - DNA, 671 bp, Cannabis sativa
gttgccatttgttccttcatcttccagtactactatgccatttgatattttacatagtgatctgtggacctctcccgttttgagttcttcgggacatagatattacattttatttcttgatgatttttcgaagtatttatggacttttcctatgggtcggaaatctgatgtgtatggcattttcttggcctttaaagcccatatttctactcaatttgagcgtaatatcaaaactgtgcaatgtgataatggtagggagtttgataataactctttttgggatttctgtaaaaatcacggcatgtcattccgtctttcttgccctcacacttcttctcaaaatgggaaagccgaacgcaaaattcggactataaacaatatctctcgtactctacttgctcatgcatctcttcctccatcattttggcatcacgctctccaaatggcaacctatcttcttaatgtgcttccgagtcaattgttgggaaacaagtctccgcttgagattctttacaaacgggtcccttcttataatcatctccgggtttttgggtgtttgtgttaccctctcattccgtctacaactaatactccatgtgtcttcctagggtatccaaccaaccatcgtggctacaaatgctatgatttgtcatctcgtaaaattattattt

SEQ ID NO: 10525 - DNA, 1242 bp, Cannabis sativa
ctctctgcattatgacctgaagactataaactttgtacgacatctcatcaactaatattttcgtcgagccattgaaaaaaatgacatgaaagaaatatttgttaacgtaatctgttttgggcctatattaagatttaagaagtgcatcagcgaattacgagtacacataactgataagtggttattgagctgcccaagggttagctagtctatgatattttgatttatttttgtatattcaaaataaaaaaaactttttttattttgtaaaagatagccaaaccccataattcttgaaaattttgtgctatatcttacataatcattataatattttaacaaatagcctctcaaaattcatatttacaataaagttttccaggtagaagttacaacataactaattccccagtacaaagctttaaacagagtccccctgtccccaaaaccaaaaagttctccttcgatcactaagcacggtgccattgtcaaaacacaatgtctttcaccatatttccaaatcaaataataattataagaaaaatacaaaatacagtgtctaagtgaaaattaaattttccaatttgatgtttgccgtgttaacacaatttttaatgtgggggaaattattaaggaattgagatacagctggaaaaaatagttataattatatatgtttcttaaaaatatgtatttcagttattaaatcatagagtggagagttaataaaaaagaaaaatcatggagaggagaatatcacacattcacactaatagtggtatgataatgacaatggaagaacttactatatataactttttatcttggccacaaaagaatccattttaactattcgaagaataagctagcaatttaatgtccctttcattcttatggtaatgacaaataacatcacaccaccaaatttctataatgggaaagagcattagacaaggagtgagaggagaccatcgattgctttttatgcttttggaaagaaaaggaaaatatctagaggttgtatcaagtatactaataataactatgaatatagagatattgtctccgcagctgcctgattccaaataaaaattgctttataaaactctcaacaatatatccccacgaatatacataactaatttacttaacgaatacaacaaaacttctattcttatacgaattattttattcataaaagtaaaaaatcgaatttaaaatacatatgattttttttttttt

SEQ ID NO: 10526 - DNA, 918 bp, Cannabis sativa
gacccgccagtaataatttttaccagcggatatccctacttttaccagcagaccaccccgccgataatgatttgattatttgttgtagtgttagcagattcacaagaagatataagcttaataaaaccttaacctggtccattaaatataccatgtaaagatttactattgtaagtagataaattatcattttcagtagaccatttaagtttaaatttaactttgaattacctttggaatctaccacaataggatgagaccatcctgaaagaattagtttccatgctttctcatcttaggatttgataaatgcccttattctaaccttccaataaggataatcagaatcattgagaagtgatgaacaaggaatggaacttccttctgcaaagaatgacatattgcgaaaaaaaccaaaaaacaaaaacgtacaaaaataaaaaaaaaaagacaaaaaacaaaagaaaactttaaaggaccacactaacagtttagtgtcccgctctgataccaattgaaaaactgtatttttgcatatgttaataaatttacaattgacttaagcaagtttagactccctctaaagctttaccgcaatcagcgaactcccttcgacttttgatgtgtgtgtgtgtgcttacttcctctcgaagtatagcttggacaagtcttttcctgaagacccttttcttattaaataaagctcttcaacctatttttaagaataatataagaataataataaagactaaaacctagctgatcactctcgatttttacaaaagaaagtttttcctcacaaatatgaaaatataaaaaatgaaactagaagaggtgtgaatgtttggctgctctctagatcttatttataacatatagtaaccctagagatacccataaacatattttcacagctgt

SEQ ID NO: 10527 - DNA, 740 bp, Cannabis sativa
cttaaaataaaagggatgcaaactcattggggaggaaaatatcgaaaattgtagccaattttacaaaaattaggtatccttttcagacatccatgtcctcatactcatccacaacattgaagagtagaaagaaaacatagacatgtcacagaaatgggactatctatgcttgctcaagccaaaatgtcattaaagttttggtgggatgcatttgtctcaactgtttttcttataaataggctacctacaatagtcaatcattacaaatctccttatgaaagtatctatattcttgtaccagattactaatttcttaaaacctttggatgtgcatgctttccttttcttagaccttataatacccataaatttgaattcaaaacttccaagtgtgtctttcttggatatagtccattaaataaaggatatagatgccttcattcatctggtaggatttatattgctaggagtgtgaactttaatgagtctgaattcccttattccacattattttccaacaaatctcaatccaactcctctgtcactcacaagaatttattagcactagcctttgttatacttgtcctgcatagtgactctcaaaatcagtgcaccaattcaatttggtactgtaccatcacaaacagatgacatcacctctcagtctctcactccctaaagtctcacagaaattctatcaacaaatgacacccaaaatcctactgacaacaaccaaaatt

SEQ ID NO: 10528 - DNA, 795 bp, Cannabis sativa
aagggcccttatagtcgcaagaggtggattctatcccagttgaatctacccaccaccaccactatcgccatactgatgcgacgttcaggtaacttaccttccctttatttttaatgtcacattggggacaatgtgtcactttagtttgggggatgaacttaatttttagtttctaaaattatttttttttagtttttaatgtgaattaatttgcttaggggagaagaaatggagctttttagttccttacactctaagttatctcatatattagatttttctttttctgtattctttttctataatcagcccacaatgtcaaaaagggacaaaaaacttaatttgtaaaaagattaatttacccctcaaagaatcctaagctttaatataacctaggggcactatggtaatttaactaatccatcaaaccggcattctaaaattctaaactaatccggaatacatcaaataatccatccattaatgtcgtgatatttctgactacaatgttaagttcccacagtcgccgggcccaaaaaatattttattttagaaatagtatccacgatacccacatattccaataaaatttccgtaattaataaattacgctttattcaatcatttaataaatttacactaactaatctaagtaagatcataatcttacttcattaccaaacaatttaataaaatatgcccaattaaatactctattattttccagaatattacaaccctcctcgaagaaagtgattatagcattagagacatcatcaccaatttcctttcaac

SEQ ID NO: 10529 - DNA, 528 bp, Cannabis sativa
ttacctaccaacccttagccatggacctttcctctcaaccccatgaacaaaactccaccttcactgatgaagaagctcttgttcacgaatttgataacatctctgtccatatgatacttccccccagtctttctgtttggttgccaaaatcctatctcccaaacacatcaaacctgattgggttgataatgccatgaaggacgcctggatagttcgatgccctttctccttttctgaatatcattccggaatgttccttatccgttttggctgtgaaggcgaccggagacgtgtaatggaaagacagccatggcactttgatcgcaaccttatccttcttgccatccttgatgcttttgacactgttgtcccttcccaagtcagctatgtccctctttgggtccaggttcacctaatccccttcggtaagcgttcaactgacctagccaaattcctttcagtgcaacttggtcatctcattgaggttcatgcagcttccctgtatgatactataattccctttatgcg

SEQ ID NO: 10530 - DNA, 844 bp, Cannabis sativa
ttctgccccggaaaggaatgtcgtatgacccttttttttgggggttataatgtcgtttgacccttcatcgaatagacttaggaagtactcaaaaaacaaaaataggcttgaggaatgattaaaaattaatgaagtaacatacattaatgaatttggatttaacataaattagtaactagtaactgcttctagttttctagacctgaatcgtaatgaatgttacttcttatgggaaaattagattgtataccccttttaattaagtcattttctaatttagaattttcattctgttgtgttgttttaattaagccattttaatttataccttcttttttttattcattcatatatactcggatttataaataatgtccctattgtaccctttatttaggttaaataaaaaaatattcaattactttttctccagaaacacaataaccactcctccgtgcaatcaacgattttcctttagtgcatgagcacaggaattgaaaaaatagctaaggaggacaattatcaatgatagtctcttattgaaaactcaaatcataaaattaacaaaatgtttaaatgatatatttttgtggtgacccaaatataatgtacaaattagatatataaattgacatcaatttttaactaagaactaattttcattatatgaatgagataaaagattatctctgtagataaagattgaatggactcaattataggctagctatgacttctttgagttatttaaacaaacacttaaaatgcattatatattatctacaatcatatacaaaatataagaaaatagaagatgggaagagggagaaactagaattaaaga

SEQ ID NO: 10531 - DNA, 597 bp, Cannabis sativa
tgttaaatttgttagttaaaatgtctaatttaaactagttgttttagtgtaagttatagaattagtattgatgattatttatcgtatgtaacaaaagtagtataaatagtcagatatgtgatttgttcttgagatttgaagttcgaggttcgaattcgtatcaagtagaactattggccttaaaaggtttgaagttcaagtaccttttaggtatctatataacaattgttatagttttttgttctcttagacaaaatgcttaatttcataaaagaattatgaaatatagttctaaatcgatatcaattgtagaattactgttcttgatgttcgagtccttacttgttcggttccaaaatattgtagggctagacaaatcgaattgctaacattactattataaacacttaagatgtaaaactaaatatttatttactatgttcttatttaacagccaatgaagaaaatgatgaaaagagtgtagaagagaatgtgattttcttacatggctttctttcctcatcttcattatggacagaaaatgtgtttcaaaatataaccaataattcaaaacaagtaacaaattgtaatgttaac

SEQ ID NO: 10532 - DNA, 736 bp, Cannabis sativa
ttcttgagttttgtgattgaattttattgctgccttgcgataacttttattaataggcaaggtagccattggctcaattcagtttttagagagactaatattttagtttattgattagcaactttaaattttaaagtgcgtacaaggtgcaaagaaaattacttttgttgatcatattcaatttgacttttcattgtaataaaatatcttcaatttttttaattaaaatttttgaaaaaaaatgttgatcactatgcttattgttgatttatcttactcattgttaaatagttcaaaatgctatagctcatcctgttgtacgtttagttttatctcttaactcttctataattttatggcctgattttccgtcttgtttctaatttatgactattttgtattgaatttttatttttgactttttaccttttaatgaaattttggctttttgccttttaataaaattctcctgttcagaaaaaaaaaatgaaaaaccacataaggtgcaaaaatttatgtagttgttgagaatagttgggtagagtataagtgaacgttctgttttgttttttcttttcattttgttttgtttaaaactataaacgtgacaatgtaaaataataataataataaaaataaaaaatattattattattacagtataaactgtaatttgctctaattgcaatgtgtcacacctagaaaacatttcaactctccttgctttgcaattgaa

SEQ ID NO: 10533 - DNA, 547 bp, Cannabis sativa
ggtgaagtgccaaggtataccatctgaaagtttttggctgcacaacctttgctcacattaagcaagataaattggagcctagagctatcaagtgtttgttcttgggatatcctgatggtgtcaaggggtataaactatggtgcttagaagatggatacaagaaatgtatcatcaacagagatgtgatgtttaaagaacatgaaatgacaatgaaagctaccaatactaacattggtcatgggaaacaaagtgttgagattcaaacagacaaagagggagtagagattgtagatcaggtggatacaccagtaacacatagtgagcacagttcagatcaagaacaagaacaaatgccatcagggctacaggactagcaacttgctagagatagtgttaggagagatatgagaccccctgagagactatgatatgttgattgcattgcttttgcacttgttgcagctaaaaaaattgtaaatggtgagccaactacttatgcagaagcagttgatggaaaggatatgaagaaatggcttggtgccattaa

SEQ ID NO: 10534 - DNA, 592 bp, Cannabis sativa
ttttcataaccccctctgtgtaatctaccacggcttctgccgcatccacagtgatgaggatgattttgacctccccgaatgcctcctatctcaaccatattaccatgatttctcttgtttctttaggcatccatattatatataggactagcatgcgaacccataagtcaggtaggtcagacagcgatcaaatacaatccaactactgcatacatggaattttaggcaatgcactattcatctaacatttactaacatgcttcctatcttgctttttctaatcaattaaattacaaattaaacaagtaaagacttactaaattgtgagtcgagtttgtctttaatgatgattgtatatatcttgacggtctttggtaaataacctggcggctctaatactaaattgtaacgtcctacttgcttaggcactctacaatgattttttaattattgtgcatgcctttactaatcaaatttcttgaaaaacgtgatcaattaaaactttaaagttaagctttaactttaataaatacataaatttacataatttttgagatctcatttaaaagtttatacataatacatttttcat

SEQ ID NO: 10535 - DNA, 573 bp, Cannabis sativa
ccataaaatctactaagaattacattggttcaagtctgatagattattgagatctatgactttaatctagttttgaaaaactatcgtaaacttctttattgattgagcaagaatacaagtacaatacaaaacccgaaaactcaatctctttttcttctctatatctctcaattgaaactctctctcaatcgttttctcaatcctcttttacaaatgatgatatagtggcagtatttataggtcaaagatatctaactaagtagttaatttggttacgacttaacagtcttaactagttccttacagagagatctctaagttagctccaaagctctccggatatgaactacgcttcctgcttcctagacggaagtctcaagctaacgaagctagaaggacgttccgaataggtacaaagtcaattggaacaagctatttgggaccttttcatgaaagggacggctagtcttctaaaactctttttcagaggacgactagcttttctgaacacttctttcggctggtcaagttagtctttcggaactcttttctgaacgataactaactttccat

SEQ ID NO: 10536 - DNA, 564 bp, Cannabis sativa
atctatactgactaacacttcacttaaaattagtctggaaaattataccacattatatatgtgttagaatttgggataaggtgcataggttctatcttaaaattaattggtaatgggaggaatagctcattcatcttatatattctattatctttccacacataagtagttcgatcataagcggctctttttgtgtggctctttccttttggctcactattttcaaatgacaagtggtttttttttttttggactttttggctcttggatcaatttttttttttttttatttttggtggctccattttgtttgacttcgatcggttttttctaagtcggacttagagatttatttttgtttgtttttgctctgatactatgttagaatttgggataaggtgaatgggttccatctcaaaattaattgtgaatgggatgagtagctcattcatcttatatattttattatctttctacacattaacattgtggaactctctaacagtaggtgtaaagaccactcgagtctacaacacgcacatgctctaacaatgctcttccata

SEQ ID NO: 10537 - DNA, 599 bp, Cannabis sativa
tcgagaaaatttactgttattttatattaaaaattatttacaacaacaagaaaatgggattgggaatttcttgtgtctccgtttaattttagcgtctattttgttaatccgtatacagtttggttagcaattctcttaacatgagaaacgataactttaaggaaaaaaaaataaaacataacgtacattaaaaattaaatctataaaacatgataaattggaagatgtagaatttaaagtattcaatactcgcaaagcaattgttttaatataggttatatgttattgggagctgtaattgtgtgacccaattaagactatagaaaagagtttttgcttccatctcatctgttctgaagcatccttgggcagcttttgaaagggttacctggccatcatgatctcgaatgatagcacctacatcaagtatttttgcttcataattcacggcatcattaatgtttaactttaggtcattgtggtttggtagttttcaaggaacagcttcttttaggatgtcatttctgtgtgttgaggtagcataaactatagttgcaacaggcggcagatgagacttcctagccttaaggaaattgtct

SEQ ID NO: 10538 - DNA, 548 bp, Cannabis sativa
ggattttagctttataactgaaaacccaaatctatgttgccctgaaagcataaacagcttttttcaattttacaaaaccaacaattgttttttcttagaaaataaataaaattcaaatcacatcatattacttttgttggtttactcagaaagtctagataaaaatggtttacaaatatacagacaacaatgcttctttaagaaagatgcacactagtgtttttaaaaattttctggaaaagttggcgataatgtatgcgtatgcatgtgaattattattatttttaaaaaaaatttataagatatacctacaaaagacagctttatcctacatttttcttcattgttcatgcttggtttggtagtatgtgtcgtaaggtgtccgaattgtagaatccattatactatttgaccattgaacttatatatagttttccatctaaaccatgtttctttggtgaggaattcatgcatggtttggtaaaatgtgttgtacaattttacagtggtcgaattcattgctctgatgagacttttagacaatattc

SEQ ID NO: 10539 - DNA, 509 bp, Cannabis sativa
cgtttacaataaactggaaaaaaattctaacaacaaaatcaactaaggatccaataagccatcagcgatcaagtatcaaagaagtgtaaagtatattaggtatccaaatcagatgaacatctcacagaacccacatattaatgactaccagtcaatgatcttctaataaaaattgagtcataacaacctcactgtttaaatcataaataagagaaataacacgaccaatcatatcgtgaagcttattcgtaaaagattagagcacataacataacaaatgactaatagaaattcaaaaatcacctagatcttctaacgaacaaagagtgagattgagatatcctcgccgaagggatttggattcgtcgatgaaacaccaataaaccaataagtgacaaaacttacatcaccaaaatcaattcctactaatctaatagggtggtgaaaaatttttcaaattaaaaaataaagaaaatacctaactcaaaaattccaacccaggcccaacc

SEQ ID NO: 10540 - DNA, 561 bp, Cannabis sativa
gatctccttgtcttagactcctttctagaacaatgtgcccacaaactttcccattgagcaaggctaacctactctctctgcctctctctcttgtataacttttgaacccaagaaatcgatctctaaactcaaataaaattgatcactttgaactgaaagtaaaacgattcactcccacaaattttgggagttacgtagcaatataaccatatacattacgtatactatttctccaatctaaatgataataaaaaaaataaaaataataaaatgaggttaaaatataccatataatatagtacactatatattatataatgctattcactaatattattaatattagtatacgaaaatactaacgaatattattataccatattatattataaaattaacatatattattatcattattattatactcataataataatattcaccaaaaattaaataaaatgacacaatcattaaatgtactaggtattatacacatgccaagaaataaataattaaaataattttattgttactaaaaataatctcatactctactaaat

SEQ ID NO: 10541 - DNA, 951 bp, Cannabis sativa
aatcagcaataactccagccaccttcccaaatcgcaaatccgtacagatataaatgaagctcttacaggttttgaattcctcttccaaaaatccctattcactgtcaaatcgcctcaggaaaactgggattttattgataagtttaggtatttttttggatatcccattaaattattgtctgatcagtgtactttcaaagttatgtggtgtaatgggaactcttttaaatcaatatatagtcggattgttattctctttgtcaactgggatttgaattccccattaactgctatctatagcaattgtgttctgcatggtgttcttttccaaccctttgtgcagctaccctattccttattaaatgcaaaggatatgcctgatactgacttggcttgccttagttatgtgagggttttgctatttaagggcaatttccttcgacagccagtcatcctcgttttagccttttatagtctttgtttcttacagagacatatccggccctatttccttttatacgttgcatttccttttctccctagctttgttaaaaatccacactctctaatcacccactcactacacagttgcacacacactaacacttcggttttagccatatttaactcatatcctctgctaagatatatagtgtcttgctccctgctgtgctttactttccatatatatttggttatagttaaaacccttcactggttcatctctcttttagtttacagtcgcatactcttagtcctatcaatggatgatttaaccaactcattatctgttgctctcaatctcacagaaactgaatgtaccatccaaactcttcatgatcctaccccttcaaaccctgctgaatccgagacccaacacactcctctgtatcttgttgccaaagttctcacggttaagtcttttaaccgaaagagctttattgaaaaaat

SEQ ID NO: 10542 - DNA, 600 bp, Cannabis sativa
tagtatagtttgtattaaaaatttatgttatatagtaatgaaatgagtgaagagagtggaatttgagagtaggtaaaattaggagatgagagagggagagagaaagaaatattgttattttaggccgtaaaagtattatgggaattaatattaaagtagtcttttaattttgcacagtaaagatttaagggaatacatttccttaagagcatttttaagggtaaaactttagaggatgcttggtgagatagatatattatgtggcaaaatattaagatggtatatcattagagagaagagtatgccattctaaaaatttgcatgaatgctattttgtagcattgatgtcatttattattttttaataaaaaattaaagctaaaaagttattatagctaaaaattaggatatattatattgtgtaagattataattataatattttaaaaagtactatatgagagtgtttttagaagtaagagtaccaaaaataaattaactattatatttttagataatgtgtaaatttagaagatactaccatttgagatggtctaatatatgcattacaaaagtcaaatttctcaaacgaaaacaggg

SEQ ID NO: 10543 - DNA, 548 bp, Cannabis sativa
  modified_base (261)..(270): a, c, t, g, unknown or other
ctttctttcactcattttttttttcataaaaatggtggtgttttacaagtagatagtaatttttactataaataatattctgtaattgtgttttgtaaaagttattagttggaccctctattttgttaaattgtaaaaataggaacatgaattcaattttcaacaattttattttttaatatcaaagataatttttaatacgaacagatacagaaaatgtaactagttttattattacatctctagatcaaattattattnnnnnnnnnnttgacaaaaaatcagtttagagtcctatttatataattttaaaaaatataagatcgatttattatttaacaaaacagatagtgtaattaataacttttgcaaaacaaggatacaaaataatatttatcctaatttttatataaattatttattgtatatgagtgtacgattattttagagtagatgaacaatttgttgagctatcaaggtcgaatttggactaaggcacattaggcaactcttagaaatggtgtcccatacaaatcattttaaaaata

SEQ ID NO: 10544 - DNA, 851 bp, Cannabis sativa
ggccaactgcagtatatttctcctctctactaggagggaaagaatgttgttttctctatccctcatctagagggtggggatagagcacttgatagtgggcaccctctaaaaatggcagtgtcaaacctcctggatatcctaggcaatgaagtagttccgggcatatccccagctttcaaaaaaggcgtattgttggtgccacccaaccactgatagctgatctgactgaagtagaagtaccccgtgtagttcttctttgaagcacacttcaagtcaaaattatatccaatctcatacggagtaggctgaggctagcctagctttgcataaagaacaaacatggtcaacaggtacttgatacctttcggggtgatttgtgttgaacgtatcgcgaagtaagcagctatatctctaaaataggggtgcaaaggcagcactgccccctattgaatgtggcgctctgaccatgccatccaattgatggccaaccgatgcgcttattggtctctcgatggaaccccacactggacgcctctcactagtccactctcttgtatcttatcgagagtctcaatagtgaagaaagatggaggagaggcccaatggtctccctgtaccccaacatcgagaacttgaggctcaaaagcctatatcaagacatggtctatgccaatcactgaaggttgaccaagcctattcaaagggtgtctgtcatcatcatacgagtccagaaggctgttggagaaaattgtacaagtcttgtacgtcctcctcctagtaggcacaacctcctccacctcggactcattgttcgaactctcagcaccatggtcagccacaagcacctctgc

SEQ ID NO: 10545 - DNA, 625 bp, Cannabis sativa
tattataataaataaaagaagaaagaagaaaaaactcaaattctaacaccaaaaatatttagatttttcaaatttgtttttatttccttaatacttattaaagatgttaaggtgttgtgtacttaagcttggtgattagttagttaggtgagctgtattgagctgtcatttttcggttatgagttagttatgtaactaactctctatctagtgtattctactggtttgagctgtataaataccctattttcaatccatgaaagatgatgaacatttttactcattcattccattttcatactctattttctgttatggtatcaaagccacatgatctgtgagctatttgttcatcgttcttctccttcttcttcgttttgcttctctgttcttctatggcgagagaaggaagcactcaaacttgaagcagtgctcgaggaaattctgacgattcaaatcaattttctacactcgatcaagatcacagattatcccccaacacagatccacgcagtccatattttttatccaatgctgataatccgtcagctactctggttccaaagatccttataggagctgagaattacagttcgtggagatgctcgatgatggtggctctttt

SEQ ID NO: 10546 - DNA, 1127 bp, Cannabis sativa
tgtatcgcgacattaatggagctatgtctacttctagtttttattttcacgagatggattacagaaaaatagttccacacctttgattgtattttgaaaatatagttctattttgtaataatggttttgggacaaagtgtaaaagtttctaaacaggggatccccgtattcagcagtattttatataaaaagttatgtttttagtttaattaaaaagtttctaattaaaccgtacttttctcaaactaatagattaattataaattaatttgtaaaaagtacacatgtggtgtccctgtggaacagggcgttacagtaggtttcttccgaccttaatggttttggtggggtctttatcgtagatgttaacttcttccacatcctttacaggctcgatcactcttttcgtccccacacgaggatctaactcagcctcaaagtcatcctagataggttcaacttccgcttaagttctcatcacatgcccgtcaaccagtggtggtgctagccctaggggatatgtaggtctaacagccatcaaagccaccgcagctggagctggtggagtagggagtgtcgagggatatgttcagggaacatgaggatgaattactccatgtagaggatatacaatactctactatgcgaaaataatcacatgtcaatgaatgacccctatttgggatatatgatgggaacccagacccattgccctaagttttccgctcttatcaacattttaatttcatcattcaagaagtcacatttgtttgttgtgtgtcccacatattcatggtattcacaatgcttctttgggtctttctgaaatttttctccttggagcattctagggggcttcctatgttgccttgtatatattttcacgagtttccacaagactggagtactcggtgtacttcgggtcgtactctttcttagatttcttcgaggcttctcctcatctcggacattttccccctctcttgttctgggagctactcacttcttattctggtctccccactttcgattgtctgggtgccacactgcatccagtctgtgccgcatcgtacccatagaaatgggtttgtgtaggtgcgagaacagacgcagaaagatcggaagag

SEQ ID NO: 10547 - DNA, 654 bp, Cannabis sativa
tgtttgattaatgaagttttctttcatgattaaaaaaaaggaaaaataaagcataataataacaatcgtgtgaatagtaatgatttgtttgcaaaaaaagctactaaggattttggcccccgaattatgacatatgtattattgtatcctctaaatttttcaacccgttctaaatggtcccaaaactattcataacattataaattggtttttctgtcaagttttgtcacacgtggcaaacaaaatgatgatgtagttatttagctaattgccacatcaacgtcacgtgtataatttaatattaaaaaaataaaaattatgcatttttcaaaaataattaaactaaaaattcattattaattaagaaaattacgtaaaattaaattaaaaaaaattgtttttttaaattaatcatatacatggcgttattatagtattgatgtgacaattaattattacttatcatttatatttaattgaaaagccaatttataacactgaatagtttagatactattttgaatgaaaaaagacaataatacatatatattttttttttttgaaaacaagcgtaggttatattaaaaaggaagttcatccctttaccaaaaaaaagtctaaattgataacaccttctctctctggaactttcta

SEQ ID NO: 10548 - DNA, 615 bp, Cannabis sativa
aaaacaaaggttgtgtgtgtaaaaccttaatgacacgtttattacacaatatgtttttttttaaaggatattacacagtatttagaatcggaataaagtaatggaaaaatgtaacggaataaataaaaaataatcgaaatcaatatttgtaatatgttgtttactaaaactgcttagagatggaatgatagcgatttatcttatttactttatcaggaaatataatcgaaatgcttcaattgactaaattacctttttgaattaaactatactatatgacagttattttgtaagatatattttaaaggataaaattatttttataaatttaatattaaaaaataaatgaaattcatactcttaatagctctcattcatgggaggggaagttctctctttcttttctcccttaattaatcaagttctccattttctaaatttaataaattaaataaacaagagaatgactctttacaattaattgtcattatttattagtaaatatgtcataaattaattgtatttttttcagattgaagttgttttgtttagcataacaatatacaaaaaaaaaaaatatatcaatataattcaccatattattagtaaatcatt

SEQ ID NO: 10549 - DNA, 617 bp, Cannabis sativa
taacagaatataataataaaaagtaaagaacatactagattttatagaggttcagccccttatagttggtaatagcttactcccctatttgttgtattgacttgtgaaaagagtgagcaataatggtttgatctctcttgaaagctcttacaataatttttgagtaatttactcttttttgagtgttttctcactaaataaaatttgtccctctaaatagtgagatgagtccactatttatagggattaattacatgaaattgatttttctaaatcattaagaaataaaatgggaaactaatttaatttccataattacaataaagaaagtgggaagcttaagctcattgtcttaattcttagaagacacgaatctatcccatgaatgcatggattataccgtgacttgcaagcttggagatgcattggatatatctctgaaattgctaactcacacccgttggtcggtgcatgcgaacaacattcgtggtggaatctggtcggatatatatatgcatactgtgtttggatatcacaacttctgtctgtgagcttgaaaatcaatccttcctgtacgacttactaggagtagaattatctgcccagattatgaaata

SEQ ID NO: 10550 - DNA, 580 bp, Cannabis sativa
caaaatcacatacagcgatttagtgttgttcaaaaaaaaattgagatagtagtagtactaagttattatacaaagtagagtttgtgcaaaataaaatttatctgatgagcagaagtttccgtatttatcttagtacaggtataggcagtaccaatttcctaagttgaaatataaaatattaatgggtattaccaataaataaatattattagaaaaaatatattttccatacttaattttgctatctaattaaaaaaaactctctctcatttttacagtaaatgggttattatatggctgaagttgctccatcattgatagagataaagaaaattgaattagagttagatatttttaatataaacatacttttgatataatgtacaaagaaagttttttcccttttattattgaccatttgatcaaaatctaatagtttaatatttctaaaattggtatcatatttctagttatttttttttaaagtaaccatcaataattcaataagtaaatgcaacctacaataatagtagtgcctttttcaatatttcactttagtaagtccatgaaattgcatctt

SEQ ID NO: 10551 - DNA, 788 bp, Cannabis sativa
tacctttttctccatgacaggctccttgaaaaaattttcttcgattatctgagcctatttatcgtacccttgggataagatgttaatctgtttatctttctcttagacatcaagcttggcttgatttaggtcagcttccaattctttgatttaggtaagagccttggaatgcaagcctttgtacttgtctccacgctccctttctattttgttcgccttcctttcatgggtcaaagtcttgtccaaagagttagacaatctttgctttatggtagcttccatcttggtaatggcttcagctaaagccctctttgcctcttctcttctatactcagcattggcatgctccgccctcagcacctctaggtcataagccagttgaacgaccagggagcagatcctctttgccatcaagccaatctaaaaaaaatatataaatgtttcaaaaaaaaatatatatatataaatgaattaaaataatggaaagacacgaagcgtttattcatatcatagaagtgttagacttacagcattagcctatgtcctcacaaagtcatccacatacatcagatccctacttgccattatggcaaacctatctaccttgagcctacaacttgtagtagcactctgtcacaataagtctgccaaaaatggtgacacatcagtcccaatgcgaggacaaagtttctccatcaacttaacttttttcacaagaggagggttggcttcgttccatctgtcatagtcggcaaactcgacattacgcctagaggagatactagtgg

SEQ ID NO: 10552 - DNA, 625 bp, Cannabis sativa
ttcgcagccagataatgagattacagggcagacatggggaggtcctccagcttgcactgatgggcctaaccataaccgttcccgcgttcgtagagcacaacaacagtgattatgatcagtacgagcctcgtataacaccaattctgttttagtaaaattggtgttacatcagtatttgtttctgtttctgtaatagtactcttcattattataagaggaatgtataaataagagtattgctgctttcaggatctcttcattggttagagatactttttaaaaactgtttttttaagttatttagatctcaatacttaatttcactaataaatgtataacaccgagaaaagttagttgctaaaaggcattattacttaactcctttttctcagtatcatacttttattaatataattaagtattgaattttataaaacttaagatagtactttaacaaatatggttaaccaatcattgagaaggagttatatagagtaggaatgctcataaatttatcgttacttttgcattaatgtatgtctcgatttgtacctgcttgacctcttatgaaatattatttatgtttaagaaaactttgcaaatacattacgtatgaaatatttct

SEQ ID NO: 10553 - DNA, 547 bp, Cannabis sativa
tttccacctagtccatgtgatatcccaattgtaacatcattgccttgagaaacttccactccacccaatcatacgcctttgccatatctaactttaaagccgtcttccttccattttaaaatcaatatttcctcatacaatgtaacccttcatacccaataattgcattatcatgtatcaatgtccccttgacaaaagcactctaggtgtctgaaattaccatacccaatgttgttcgtaatcgattagcaaaccacttcaagacaatcttatatatgacattacacaagcttatgggcctgaaatcctccaccggtgtgggcttctttatttttggaattagcgcgatgaaagtatcgtttaaacaactgatgtcagcccctttattaagattcctaaggaacacagtcaccacctcctccttcgaattgttcaaaatttttgataaaaaagtgtcgaaagatcgtcctcaccaggagctttagtaggattgatttctttaacagccttcataatatcatcttccgtaaaatcttccagcaacata

SEQ ID NO: 10554 - DNA, 621 bp, Cannabis sativa
gaccccttgcatctcgaagcacccacccatacccaaatttgttggtctctgcaaatgttgttgcatctacattaatctagtaattatcatttaatggagtacaccattgctcaacccttttagcaatctcaatcgagaaaagagaaggattaaaggagttgttatgagtaaataaccattgttcaagatcacattttgcaaaagcaacaacattcttgactgaattactttttccattccacactttgttattttgatcatgccatattacccaacacaatatagcacccacttgcttatcctccttactccaccactgaaactggtgttgaaaccagtcaccaaaagaagaaaaaacagcactcccgccaagcagtcttgctgcacgccaacaagcagtagcaatgctgcaaaaactcggacagtggcctattgtctcagcctcttggttacatctagggcaataggaagagatcttaacatgcatttgaatgaactgagaacaagtaggtaaacaattggacactgctctccaaagcatttcttttaccttcaaaggaaccttcaactttcatcgtagcataaattattttgatgataaattattttcatcaaaataat

SEQ ID NO: 10555 - DNA, 945 bp, Cannabis sativa
cggccctcccctctcacctcaagtggaccttgggtcccttttcctgaaacccaaaacctcgaaaaccctaaacccaccctccacctttccctctcggaccttagttcaaaaataaccccttttgaggtattttgccacttgaattattgtatgaagatcaaaactcaccattacaggaaatttgcctaatgtttttgggacctttccagataaatgattaaaagagagatttagagtaaccgtaaatgacatgatctcgcctatatcttttgggatcagacctattaacttgttcgaagagaggtcgagttggataaatcttccattcttcaccaaatccccgacagaattttactagagattttgttccaggtgagtatcagtccaagaaaacttttcccaattagaggaaatgccaaactagtagcaaggtgttgggtcatctgcgttctagttgaagaaagcttcactgatcgattgttgatcaaggatggatttgagggagagaagagcgagttcgtctagggttagagagagagtgagtttcagagggtgtgagatggagaagaaaaaaagaaaaagaaaggaaaaaagaaagaaaaaagaaaaaagaaaaaagagaaaacaaaaaacagaaaagaaaaaaacaattaattatttttctaattttaataattttttattttttaataattttttaaaatatttaaataattaatgtatatttgtgtacaatgacagtctacatttatacttaacaaatcaaagttgatgaaaaagtgaaaaccaaaatggtattaaaattctcagggttttacccttaaaatttggagttgattgtacaaacccaaatgctcaaatcgtctaaccctaaattacttattttttaacgtatatcccatcttaatgtaaagtaggatatataaaagaaatttttacatgaaa

SEQ ID NO: 10556 - DNA, 762 bp, Cannabis sativa
acccatgtcgttcatacttccttaacaaagcagataggccttcagggcagagaataaacaaataaggggagagaagatcaccttgtcggatgcccctatttggaacaataggtcccatctcgtggcaaccatggataaccttgtaattagtagttgaaacacattgcataataagtcgcacccagcctgcaacaaatcccagtttcctaagaaccgcttccaaaaaattctactcaatacaatcatacgccttgctcgtgtccagttttaaggccatacaactaatctttccttgtcgctttcgttttagataatggagtacctcaaaggagaccataatgttatcgaaaataagccatcctgggataaaagaactttgagagtctacaacactagagtccataaatagtttcattcggttagtcataacctttgtgacaatcttgtatagcacattacaaagagctattggatgcaagtctttcattgtctcatgccctttcttctttggaattaaaaccacatttgcatcactacaagcttcatcgaagacacccgtatcaaagaaactctgaaccacattcaccacatcttttttcacaatattccaacacctttggtagaaggccggggtcataccatctggccccgagctcttatcgggatgtatttgaaaaatgagagtcctcaattcctcctcagtgacagactttgtgaattcgaagttagccaactcgggaaccacttgatcaatacaatcaa

SEQ ID NO: 10557 - DNA, 504 bp, Cannabis sativa
cgtaaaaatgtgagcagaaggcaaccctgtactagggaataggaaatccctcgtggtaacgagagagatcctaggactcaaccgaggataggtgggttgctacagagacatcgtcaacgtccctttcgaactgatggggaaggggcacatacaaaccccgacagggggcatgtatcaacccattctcaaagaagaaggccagtaaatgacgaggccagttctagctctggacatacaagaactcgtattcgatctatacgaggaggggatagaacgcgttatagtactgatcgagagagtatgggaacatctagaactgaaagttactcaaggacaaggtctataagtaactataatcaacaacaattagagcttcgtaatcaactaaatcagaagaattctgacttacaccaacaacttgatcaaaaacaagaggatcctatccaattatgaatcaacgagtttgaggacaagttcagaatgtaccaagatggggaatatggg

SEQ ID NO: 10558 - DNA, 503 bp, Cannabis sativa
tatttatagcttttattaaaagaaaaatgatatgtttcatgtataaaaattaatgagtaatgttaaaaagtggtagtggtgtctaatactttttaatgtgtaatatgtttaattaagtgtcaaattctatataaattagagtattattattgggtatcagtagtgttatgtactttttataggtgatgctctacaattaaaatatatttttttatgttatatggtacccgatatacttaattacatcataacggtatgacatcaaaaaaggtgctagacactaatagtgttttttaataattctttaacttttataaagtatcgttaactaattataaaatgtaatttataaatagtgttagacactactaatatctaatagcaatgcatatcttatctacaaaaaatgattagttggagaattaaaaaaattgttggaaaaaagatttcattatcactatgtctacgtgtaatatttagtacatatttcaaatacccatatt

SEQ ID NO: 10559 - DNA, 524 bp, Cannabis sativa
tgacaacatgagtgcaagtgcactcgctgccaatcctgtttatcatgcccgaacaaagcacatcgagttggatgtccattttgttagagacaaggttttgcagaaacaacttgagatcagatatgttccctcacatgatcaagttgcagactgcctgaccaaaggtctgtcacattcacgctttcagttcttaatcgacaaactcggtgtgatgaagtcaccctctcgcttgaggggtggtgttgaagaacagagtatacaggggtagtatatgcaggggtaattcactcatcatttagtgactccaaggttattggaatattctcaatcacgaggcaatcatcaccagctgtcacatcattccgttttcattattgttatgattattcccttttctgttattcatagtgtacacgtgtaagtgtgtgattgctttgtattgattctctgtactggttttttggctataaatgaggaattaactatcagtctcaatttgagctgattgaaatcaatttacgatt

SEQ ID NO: 10560 - DNA, 543 bp, Cannabis sativa
tgagaaggagaagatattgctccaaaaaagggctaacaccctttcttccatgaagagggcagatatcactgagggaatccaaacttctaccccagtaccagtgattgacactgaagctcttggcaagaggatgatgcccaaggtggggaaaaatcttttgcccttctttgtagagcatctagaccatgtggcgagtagcgtgtgtgagctgactttggagaagtgggcagttagcaatagcactgatgctttcactttggctcaagctacaaaggaacaggttgcaggggtaagctttaacatcttttgtctttatttttgttgttgtgtattatcatcttatggtgttttttatgccagatgaccttaattgcataaaggacttccaaggaagtaggggccttggtcatagactttgagtagtttcaaattaagaaccagtctttgcacggggagaacaaagctctactcgatgaacttgaaaaagtcaagactcaggccattactgaagtgaacaagatcaaattagaagcagaggcttgg

SEQ ID NO: 10561 - DNA, 664 bp, Cannabis sativa
ttcttccggtaactatataatatacatacacatttatatatggtattcgtttattagttttttttagatgattttgtttgaataacacataatgatttaatttgcagatgctgctcatcaataacataatatgttatggtaccaaaactacacttgggcttacatttaaatggaggtgccttaaaaaaatttctatttcaactaataattaagtttcataatatgcttagatataggttttaagcacatcatgtgcaagtgcaaaaatatggagaaaatatactttttccataatttatgataaaaatttgagtaactaaaaaacttatgagaaaatatttataagtgaaagactataaaaccagagggtaggagcaaagaagaaaagtagaagaagatgaataagtaaaatgaattgctcaatcatcaaatgattaaccttagatccttatttatacacaatgtttgtacaaaatattaattattacatcaaacaaaaatgagctgagaccgactataataacagaaaattaatctaacaaaaagcataattgatttaactaactttctattagagtacaaacacttgaaaaatcagctaacattttgttatcctaaatatccccttaagtccccttaagtgacatttgtctacaccaagtgt

SEQ ID NO: 10562 - DNA, 582 bp, Cannabis sativa
ttctttcatgcggccactatgattcgaaaacggagaaatcatatctggaatttgaaggaccaacaagggcgaatttgggaggataagtatcacatccaacaaattatcaataattattttgtcaatcttttttccacggggtcaccatcgattcctccagagcttgactccctttttgtgaagaaaattgatgatgaagctaatagactattgtcgtgtactccttccatcgaagaaattaagcagacagtctttggttttaatccgctaaaggctcctggacccgacggattctcaggggttttctttcaacattattgggagcaagtgggaaatagtgtgtgttctgggattcaagagatattcaacactgggtctatcaatccaaagttgaattatactcacatttgtttaatccccaaaattgccaatccggatagaattgaaaactttcgccccatcagtttatgtaacttcacttataagatcgtggccaaaatcatatctaatcgtctcagacctttcatggaagagctcatatctccggcccagtcggctttcatcccgggaaggtggattgca

SEQ ID NO: 10563 - DNA, 669 bp, Cannabis sativa
ttaatcttgaagatgaagaagaagcggttctctccttcgatgatgatgatactcagggattaaattccaccaatgaccacactttgttttcttgcatccttaccaaaaagcccgtctacctaacaatacttcaaaagtagatgaaggttcattgggatgggcattaccacattatcctctataagccaactgctctacaaaatgtattgcctactaatttcaaatatttaccattttgggtacaagtttataggctaccattcctaagcaaaactagaggattggcaaaagctttaggcgatatcctttgtgaattcttagaagtatatactaactctctaaacaaaggctgatgaccttttttacgcattagagtcaagcttgatgttactaagcctttgagaaggggtcgggacacacggttacaaccaatcaaagaaaaattttgggttgatttttgatacgaacaacttccagaatggtgtatggaatgtggctgcttggggcaccgattttagaagtgtgcaaattttttggaacttgtggacaatggcattgaaactgaacttgcttatggaccagagatcaaatgggctgctttaccaacttctgcttatgatcggtatcaaactaatttttcaaaaggaaatgcttgacccataccttcca

SEQ ID NO: 10564 - DNA, 511 bp, Cannabis sativa
  modified_base (223)..(224): a, c, t, g, unknown or other
tattattaaatattggaaaatatatggtatactaatatattcttaatctttgcttagaaaaaaatttagtttgatattttttttataattgtatatttgtagttatttaaaatattttgtaaaattttgaaaaatttaaaaaaaaaaaattaaaacgctaaaaatatgattcaaagaatttgttacacgcatgtaattttattttgaatttctcaaaattttnnaaaatatcttaaataactataacttacacaatcataagaaaattaattgattcatgtttttaaatgccaaaatattactagtgctcttatttgaatggagtgtattatagaagcacttataaatatttattttattttattaattatgagaaggaaaaaaaaaaaagaagtagttggtccacatgatgcattcttctctcctactttattttttattttttctaaatttaattaaataatgatgataataataatataatggtagccaacatgatgcactcaaaata

SEQ ID NO: 10565 - DNA, 640 bp, Cannabis sativa
atccatttctcatgatcgacctgcatatgaagatgtccgttcaccatactatctcagcaacgcagatcatccggggttagttctggctactccagttctcacagatcgtaatttccagccttggacacgcgattttaagctctccattggagcaagaaacaagactccttttcttgatggttctctccctcaacctcatccaacagattccttgtttagctcctggattcgctgcaatcaaatggtgatgtcttgaattcttcactccgtttctcctaaaattaaaagcagcatcatgtatttggacactgctgctgaaatgtggactgtcctcaacaatcgattcaaccaaggtaatggtcctcaaatctttgaactaaatgaattacttacatatcttcatcaaggtgatgattcggttagtgcttatttcactaaacttactgctatgtgggatgaaatccaccaactaaggccacggataccctgtacttgtgctgctgctgcacaaaatcaagaccagatcaatcatgatcaagtcttacagttcctaaagggactcaatgattcttaccatgctattagggatcaaattctcctcattgatccctgtccctctctaaacaaggtattttccatg

SEQ ID NO: 10566 - DNA, 523 bp, Cannabis sativa
ttcaaacccaaagctttttttcccataaaaactgaccaaaaaatttaaaacatttattaataaaaaaaataaaaagaaataaattgggtctgaacccttctttctctttcataaaaaaaaccctaataatattctcgcctcttcctctcgcctctgcaatctcttcctctcgcctcttcttcctttctcttggcagatgttgttgcctagcttcctctggcgacaagcgcctgagactttgcggatttagggcgtagaggatggattacaggtacatactaattaaactaaataaatttaacaaatattcccagacattttttatttgaagacaaagaaaacaattgtttatttaaatttgcaggcacgaataatggttacagcatataatttaattagaaaaagttgtgagctcctcctttgtaatacaaatccaatggtaccttccataatggaaagaggagcgcctttttgtgaccaaatcttttaaacaatttatggatgtttaatgtaattttttcgt

SEQ ID NO: 10567 - DNA, 591 bp, Cannabis sativa
aaaacaattaatacaattgttttccatctctctctttttagtcgttttgattctctttctctttactctttctttttcctctttctctctggttctccattggttcttgtgttgtgttacagctatgaatagaaggactaacacttctaatattggatattaataaaattcttatcttaaccaaaaaaaaacttaaaactaaaacaaaatcaaagttctgatcccaaaacaataaataaattacgaaataaagtataccaatgggtaaaatttgagtatagcaacgatatttgtaagaatagaaaaatgaaacaaaaaacaataacagtgtgactcaaatttgaaaaatgaatgttagtgtatttattttccaagaaaaaacaaggagaattaattcacaagttaacaacacatgcagcacttgttcactaggaaactttaactgaaatgatgacagagactgaggtgaaattaataaggatatatatatatataaatattatgatgaggagtagttaatggaagaacacgtatgagcttacgtggtaaaataaggaaacgtaggacattgacgttgtgcattaaaaggag

SEQ ID NO: 10568 - DNA, 538 bp, Cannabis sativa
ggttaagttagttaattagctatatataggctgttacagagggtggttaggattctgttactcaagttgttaatttctttaatcttgtaacaaactgtgtcatatatataccatactttgggtcaatgaataagatttaagtttgttttcatatctaatatggtatcagtcgcttagaattttttctctcacgatcgctaccatggctagaactcgaactactggttcaaggaactccagccaaactcccttgccaaacaattcctcctccataccagatgctcctccaaatcctcaaatcattcctccggcctctattcccaccggacacattaccaatcctcagcccaacgtgacaacacgacttatccatgaagatagttcaagtccatacttcttgaattctggtgatcatcctggactcaccttagtcactcatgtgttatctaacaagaactttcagtcatggcgtcgtgatttcaaactttctgttggtgcacaaaacaagaccgtcttcctgaagggaaccttaccttaa

SEQ ID NO: 10569 - DNA, 522 bp, Cannabis sativa
tgttctttacattcttggaggacttggaccggaatacgaagctgtggtggtcaatcttacttcaagatccgaacctctaaatcttcaagaagtgcagttcatgctacaaagtcaagaaatgcgaattcagcaactttctgcagatactctaaccaatatccaagcaaatttggcaagtacaaacaccaacaatggaggccgtgccaactcctacaatcgaggcaatcgtggtactaatagaggaggcagaggctcttacagaggtggaagaggaggcaacagacccacatgtcaactatgcggcagaattgggcacactgtgattaagtgtttccacaggttagacatcaacttcacaggccctcaatcaaatccctcatcctcccaacccagtgatgaatcaccacaagccttgatcactgaaaccaactctaccagtgatcaatctcatgcttggtatttggacagtggtgccactcaccacatgacaaatgattcccaaaatctcagcacttctgcaga

SEQ ID NO: 10570 - DNA, 659 bp, Cannabis sativa
atattgtacaatttttaaatccaaaccaaacaataaaattataatggtgatttcattgcaattaagattacaccaaaccaaacacatcccatctcacatttaacttaattcaacatctaatctttatattgattaatgcatcaataaaatagtttacttaaaaaaattattagtagttgttgttcgcagtttctgtatggctcttgagccgatttatgaacccaataaaagtaaaattgggttcatatgggctcatgggtgagttaaggacgacaaacttacatcaacacaatagattagatgaactttctctaaaagatttcttccctaaaggtgtggaggccctagggagaatctttcgaaaattccaatgagaactcttcggaaggctccaaagagaagtctcttgagatttttctcgttaactgatggtgcatcggtaaagcgagacacttcatcacatgaaaacaagttttttcagataaacctatccgcacatcttttgacactcaaagataggacattgtagcttgtcccttcgtgccaacgaaaaaattagtcttctataaagtaacataaactttggaatttttgtacccactactttgacatatactatcccatgcatttattgacgacacattttgaacctattaaca

SEQ ID NO: 10571 - DNA, 838 bp, Cannabis sativa
tctagatctctgttcgagtaccgggttcgagtccaggtcaaggttcaagtctaagtctcgggtttcgattcgggtctaggttccgaggctcgggtccaggtcaatcatctaggtctgggtcctaggtccctatccgagtccatgtttgggtttgggtcctagtccctgttccgtgtccgggtttgggttcgggtctgggttagggtcagcgtttgagttctggtccgagtctagggcggggtctgagtccaggtccggatcctggtttgcttatgggtttttgtccaggtctgagtccatgtcttgggtacgggtccaagtttgggtctgggtctcggtttgggtccaggcctgagtccatgtcttgggtacgggtccaagtttcggtctgggtctcggtctggatccaggtcccgagtttcgatcccagtctatgtatgggtctaggtctaggttcgagtctaggttggtatctagatcaatgtctaggtccgactctgggtctgggattgggtcgcaagttaaggtctcacacgatccgggacctagaactagaattggacaaggactgggactagagcccagaaatgttactgtaacattatccaaacctaaacccaaactcaaacaagaacccatactgggacctatgacctgggacctacacaaagactgggacctagatctagacagggacccggacccagaccccgaccgaaaaaccgaggccgaaccaaggacccaagaacaagactcgtacctgggactcaaaactcggacccagactgggactgcgacccgaaaccaaattgggacctagactcggactggacccgaa

SEQ ID NO: 10572 - DNA, 608 bp, Cannabis sativa
aaccgtcaataactttttagtcattcatcttacagacatgattaatagtttaaactatttcttttagcttactaaagcttacttttaactaatataacttgtactttgactcagacttgattaatacaacatttacctaaatttaacctattacacatcaacccatattgaacctccatgtcacactcattactcctcaaccagttaactcagactaatgatttatatattgtcagaaagcttatgttatgcactaaacaactataacataaagcaacctccaatcacttttcctttagtaccattagctgcggttccaattacccgagtcactaaatcttgacttttgttcacgctataacttttgacccaaacgtcctagacaaattctgatcacaccagcagctttgtctcactcgatttatacctactaaagtgtttgcaatcatcttaaacacaaacttcgatgtttcgaacttggtcgccagaaaccatgttaactcccatagaaactcgaagttcaggtcatatctcgacaaccacaagtcgcacattaaaactattgatatctacagcttcagcgtaatgagtttaccccgaataacatg

SEQ ID NO: 10573 - DNA, 508 bp, Cannabis sativa
tttacaataccaatacgtttgaagttcattgaacacggcatggtaaaatagaatattaacaactctatttttaatattgtaaaatttttaaaattttttaaaaatttacataaataatactgtaattataaaaaatactgctataaaaaaattaaaaaaaaaatatttcaatgtaatttcaaaaattaaaattaactaaacaattataatgaatcctcctctaaaactaaatataaataaacaaacaacgtggatacatgatgagaaatgaacggctgagaaatggttggatccttaacacgtgtttttaagcattggccccactggtaatttttctcattcaaaaaaattaaaattttaaaaccttttattattttttttaataataatcatcacttcattagattaattatggatgaaaacacaatgggatgcaaagaatgcaccaaagcatgggtaaattaacagattatttaacaaattgaaaaaaaatagcactaatactaac

SEQ ID NO: 10574 - DNA, 922 bp, Cannabis sativa
gcgggtcaggtgggtgttgggtgtcgctctttggggctggttccatggcacctagttttttaggcgactgattgctgctactagaggctatccgtctctgttgagatggttcttgccgttggtcagaggtttttggtggttttgtccttttgggcagagtggtgccgctggtggtggggcttctcttggctctcaccatttcgttttcgaggattctgcttggttgtggtcattctcaagcatgtgttttgactttggagtgttgtttttcttcctctttttttagatctcagtgttttctcgtgggttactaatactattcaggcgtcttggctctggtgtacaatggatgttgtttagctttctaagtgttgtagatgtagaggggggactcgggtcttacccataggaatgtgcttcccttgtcttaacatcttcaccgttcagaacttgcaatgggagactgagtgtggacctttctcgtaggaagttggcagagaccctttgcttttggcctagctgttttgggctttcgggcagcctcgtctactttttggagaagttctttggagttgttctatgttatttatttacttgtcttttgtattttagtttaattagtatgttgtacatcttatgttctttgtggcgttagccttagacttttgtggaatttttccctttagatgcttttgtgtgagctttgagctttttgctcattttgatgatgtgattactcgatatctgtgccatttagtgagtttgtgcggttcatccgcttggcctgtaaggctttggcccctttcttaaccttaaatgaagttttatttcatcaaaaataaataaataaataaataaataaaacagaaatttgtcgttttattgaaattattcgaaaaaaacgttgtcgttttctcgatgt

SEQ ID NO: 10575 - DNA, 1181 bp, Cannabis sativa
atcatatatagcaaggggcagtgttgccgctacacccatacttttgaggcattactgcttactttggggtgtgtccaacacaaatcacctcatcaagtataaagtatctttcaacgatgtttgttttgtatgcagagctaggttgggcgtcataatgatgaagatactcatcaaatagttgcacaacccaaacaatacagagtgaatcaactgaatcctccctgcataagacaaatgcatgcttgtccaggaatggagacactgctgattttttttaataatgatgccacaatcttgaactttccactttgttggtctaagcaaaactcctaagtgacgaagtggatatgatcccttaatttcaaatctctaaggattgccacgttttcaaaatcttggactcccccaaaataaatttaggatttcccttcgctaatatgcaacctcgaggtattgccaaactcatctaatatatctttatgaataatcattgagctccttgtttctttgctaaacaagattagatcatctataaagtaaagactaataagacagaagtatttgcatagaggatggtatctataatttgtacccaagacagtcatttagagtcttcttgtgaggtattccattactaagacaaagaggagaggcgatagtggtcaccttgcctcaagccttttcttaccttcaaaggacccttgcaccctttccattcatacatatgaaatagttagtaaatctaacacattccataatcctatgaataaatctcaaagggaggttgtaagcacataataaatcctcaaggaagtcccaacttatagtatcataagctttgcttatgtctattttgatagcacaccttgaggcgactaatttcctcttgtaattcttcaaaagatcttgtaagatcatcacattatgggctattaatctacctttgacaaaggctccttagttttggcgaaccaaagaggggaggacaattgaaagtcttagacacatgagcttggatatacacttgtacactgtggtgcaacaggaaattggcatgtagtcctcaactctagaaggtttgtcatccgtaggaattacggtgatcatggtggcacagaaatcccttggcattgtacctgcagaaaagaaattagtgacaacttcacatatatcagcaccta

SEQ ID NO: 10576 - DNA, 534 bp, Cannabis sativa
ggtcagaaccaaaataaccgagatggatgagaagagcatcaggaaagatgttgttccagggagtgttcatgattcccagtcaattcgttcctgaatattattaggagaggccacattgttgttccaagttagcgggggccctctaggatcaatcggggttagattaaaggagtctaaaagatgtctaaagtcagaagacactatagactcgattggactgggattcgacagagttcccattacttcaatcccttctggaattaattgggtcaggaggtaatttaatggggaagcagaatttgtatctaaaaatgcaattttcaactttgtttctcagatacgatttgacactgaacagaaagtttggacatagaaattgaatacctgttagcttcgtatttatggccgtacagggcggagatctggagggatggccggaataaatgttgatgcgacatgggtgattggatcgacttcgcacgatgatcttggagcgacttgggggagttgagctgccacaggtgtcgttggaag

SEQ ID NO: 10577 - DNA, 725 bp, Cannabis sativa
ccacgattgtttccatatgtccaccgaatcacctcttcccagtatagtcaaacttcccttgcgaataataccacttgagttcaaaattcccttccgtaaggatgaatcgtttcctctcggatctgtactccagaagtaatttcttttacagtattttgcgatgaggcatttgacccatggcttatggcaattagagtcaatttgccaagaaagtttggccaataaaaccttgttactatcttcaagctttctgaaaccagactccccaaagttgtggggagacataaccgatcccaacccaccaaggctaggaatctttccttctcagtacacctgatccaccaaaattttcgaatcgtcctgtcaatttctcgacaagtagagactgggatcttgcaagcagacatggagtaagttggcacacttaaagccactattttaaccagtgcagaacaccctgagaaggacatgagttttgtttcccacccttcaattctcttcaaaaccttgtctttcaagaattggtactcttctttcttccttcttttaaaaacgaatggattccggagatgtttttcatgacctgcacattcttgcacaatgtgaatccggagaatattatctttctaaagtctagccaaattctcataaaaaaaggacactcgacttagccatgctacatttttggccagaccaagattcataaatcttaatactgtccaaca

SEQ ID NO: 10578 - DNA, 617 bp, Cannabis sativa
ccctcaaaattcacagcaagcaatcacaaacagtgcattggtgcacaaagaaaagcttatgcctgaatgttaagtataattacaaacttatagataccttttctacagccttcacatttttacgccattttctacccttagatccacttctttcttcttgatgaagggcatcagctgctttcttcaattcttttgctttcttagctagctcagttgcttcctagaatgtgcagaccaaatataaaaaagtattcacatgaagcaaaaatatgagctgtcattcaaatttctgcttatgcacatgagaaagatgtagtacctttatatattgtgaccgagtaataacagcctttggacgccgaatgaaggagaaaataagtccaagtggtagagatgcaataccaaccccgccaaagatctgaaagataaagaaagatggtggatgcaaaatttatagcaaatggaagaaagggttgtttatattcataattgacagaatattttgttccagatgaccataaataataagtatcacattgctctacatatctcacacaaaatattaacataccccccctgacgaaaaagaactttcatgaccctaagagtacatgaat

SEQ ID NO: 10579 - DNA, 596 bp, Cannabis sativa
atacagtatattacaaaaattcaaattttatttacatataaatacaaattagatgaattggtgtacaattgcctttcgaaagttatgaaatattatttgtcataatttgattttatgccgtcaaaagcgaacaacgttgtagaggcgcgcgataagacaacataatgaacatattaatataaacgaacattttcttgtagttaatgcacaacttacttttttgacattgggcagaatttattagtttaattttttttatataatcattaaaattatttatgacaatttaaaaattttaaaatgtttaacaaaatttaacaccttaaaaataaagtttaaacaacttatttcataaacatattaaataaaagagttttccgtacattaaactatttgaactttatttttaacgtgttaaaattttctaaatcgttcaaaattttatagcatgttttaaataattacatcataaagaatcatgaaaaaaattggatcaaacattctttaagatacctaaacagaaaaaactccatcagttaacgttttttaaaaattgcattgtaaaaactacttaaaacaaatacatacaaataatt

SEQ ID NO: 10580 - DNA, 1092 bp, Cannabis sativa
aaaaaaaaaaaaaaaagacaccactcatgatgtcgttcatgtttcactaacttttgagttgagaaaagcttaattgtgtcatgtgttttgacatgttagtggtctctctgctttagggatttttttctcttattcttattttgttcttttaatgatcatggtgtcaaatagtggtgtagccaaagagttagaagaatgttgggctgatatacgattggaggggaaagaggaggatggattggtgtttgatgagccgacgaaagatgaatttgtggtggatacaaggtggtatctcgtgggtaaactgctcacgggcagagtcttagatttttcagatttttcagcatgttatggttgatttatggaagccgagtaggggtatgattgtgaaagaataggacacaatctatatctgttcctgtttaccatgaagtggacatacagagggttctacgggtagtccatgaacttttgattgcaaacaactgcttcttgaaaggtttaaggagggtgttgaaataaattcccatattcttgcacactgtttcaattacaaatacacagattacaagcagtgaaaagactaatgtggccctcggcctctaagcaaccaagacagagtatttaatttagttacaagtatgttaacatttgtaactaactctcctatctctgctctcctctacaacacatataaaaggccagaaaatacaacaataacagaccagatcaataaattcaacacagaaccagattagtacaataacaacatagaaaatcagaggcagatccatatacaacaaaaatcatataagttttcaaagataagaaactgattgatttaggggttcttggaggaggcttacaatggagtaagctttgcaaccaaggtggtggttcagatatccaatagccagggtgttgttcatgcaaaagaagagaagaaacacaacattgttagtactgatttagagaggaaaaatagagagacaaagaggagaaaatcactgtaaaatattcggattaccaaaattaatacctgtgtgttttggaacccaaacccattgcaatcatttgatcattgaagatcca

SEQ ID NO: 10581 - DNA, 920 bp, Cannabis sativa
tgcttatgttgttattcaatatctttgcttcgctttgcatttgcatggtttctggtatctgggtatttttcttcttccgatttgaagcttgcccatttcattttttttcttaataattcgtgggtcggattttttagattggaatgcttgggttttgtgtttaaagattgaatgtgaaacgcgtttgttcttctttgagattcacaaaatttgagcaggtgggttttgtgctttgggaagttttaatcattttgatatgacagttttggggtttggtagttatgggattgataatactgtttgtggagagatgcaaatgtttgaatcttgatttggtattatcatgctcactatgaatggtttacaaaaaccttggtggtggtcaggtcgatcgacgagtgaatcccatggacgtcgattgaggtgatcgagagggtgaggctcggggctgggacatttgggagtcggaaaagctggaagtggcctccgtttgggttgtcgatagcctcagagagccctgggctggtcagaagttgggcgagagggaagtcgagaaggagaaaattgaagagatggagaagagagagaagaaagaaaaaaaatattttattttatttatttttcattttaaaattatttttaataatttttaataataatataccaattggaaatcaacatgtcccattcatggaggacttaacagaactgttaaaataggtactaacggaaataatagaaattgaggatttgagtatttttgccactagttttaaattttgagtatttaatagcaacaaattgaacaaaataggtatttatgccgcaaattttctcattttaaacgagtttctcccatttaaacctaaaataatcatgcttaaagagaaagacttgagagattgagaacctttgagcta

SEQ ID NO: 10582 - DNA, 744 bp, Cannabis sativa
tggttctggaaaaatgtggtcaagtctatccctatcatcagaaggggcgcttgcaagcttgtctcaaatggtccagatacgtacgtatggagtgatccgtggatcgtccacggaaaggatttttaccccaaacccatctcttctggccatgagagggtggttaaggtggcggatctgatcacgagtcagggggactgggatatctccattctcaggtccttgtttgactctgacacgatctcgaatatccttaaaggggggaggccttgtggtcaggggacggacaggtggatttggactaaggaaagttgcggaaaattctccactaagtctgcttatttgcttctggcagacgagagagcccctgcctgtgtggtggcgccgtccttatggaacaaactttggaactccaaaattctcgaaaggcataaattcctttggtggggtattctctctgacgctttaccggtccgtggcctccttgctaggaggatctcaatcgaagatgacacttgccctttgtgtggggaggctacggagtctatggaacatctcttcctcttttgtaactttgcttaccacctctggaggtcctctccttggggagtcttcccgatccttgattctgggggtcgagtttgggattgggtgaaatttctgtggagcataaggttggaaggggtggacttagataagctattcctctatgcttctatagtggtggacacaatctggactacccgt

SEQ ID NO: 10583 - DNA, 754 bp, Cannabis sativa
gttgctctggtccatcatcaatggcagatgtgctaccgaagcagagcaatataatcgagaagatgagcaaagcgaagtagtgtgaggaggtaatcgccatggaaggaagacactcaaactgatcactgatcagtctaatcaagactctaaagagagagagagagagagagattatctgtgagaaatgagcggttaggatattaaggattcttgaaaagagtatatatatttccgagtgagcgcgcggtaagagaattggttagggaagtgttattcacgcgccgttcagaggcgtgtgaggttggattcttgaattctcaacggtttgttagtctgttacaaagaaggaaagctcaaggacctcagtctcgtgtgcttcaaaggcggtggcgggaaagtttgcagtataaagactatccaaatttcaaccgttggatctgtcaatcaaactcatcccacagtcactattcatcgaataaggagttatgatgcggcgttcgtaggaattaattcctccccagcacaatttttttttccttttctcttctgccgcactaatttttatttggggaattttattttatcttttttttttttgaatggaagtagataatttcattaagatagaaaagtaaaatttccttttcaaaaaaaaaataaatttttttttttttttgaataacagtatccattgagaacaagcaaaaacaggatacaatcacaaagttagtgtagagtttgtccacagagcttc

SEQ ID NO: 10584 - DNA, 605 bp, Cannabis sativa
tttttttttttttttggctaaagttctacaggaagagctacatctagaaggggaccacatatttttttggttctctctcttttacatatattctcccttcttcataataagcaatagcattaccagacaccattacatatacatacaaacctaaactacagttgaaaaacatgtgatgtgtcgaggcctaatttgtcatatttaatcctcctcttccttatgctgtaaattgaaatattgtgttgaactttccctgaaacttgaccatatccaatatccaataacatctacatattattaattaagtaaactcaattatgatgtacctcaacacacgagattattttagtaccataaatctctttcatttattaatacatcatatctatcacctcagctttactaccatttgtctctactttttcccttgaataacagggctatgcaagttgattgaaaaatatttagtcacattgacttggattattgacatgaccaattataatgataataatgaaataatgtccttctccttcttcacaagtatatgttcatctagtacatgttattaattaagtaagtaataaatactctctctctctctc

SEQ ID NO: 10585 - DNA, 525 bp, Cannabis sativa
ttttattttgtatgtgagtgtaatatatgaaacaaactgtgggcaataacaataccataaaataagtttcaggtccaaagagagtatgtctcaatgtcattcttccttttctgcaaacttattaaaactgttcagttcatatagacatttcagctagcacatagagagtatttaccataaaacatattaaaatctaagtaaattagttgaaacgtattgggccaaatcacaatggcatagcagtctagatcttgaatatcttcatcgaaaaatgaaggttttgagtgttctgtaaaaatagtttttatgaaaaaatttattggcaaaataacttcctaaaaaaattattagtaaaataacatgcttagtggcacaagctaccataaaataccccatgtgaccataaaacgaccatattttacactgcccaactgttggttgcacaatgtaaagtcaatgcaattattttgctaattttacattttcatgttgttagtttggtaaacttccttgaaagtctcaaga

SEQ ID NO: 10586 - DNA, 725 bp, Cannabis sativa
caccatcacttgtttttgcctggtatgtttgtcatatactatatttattaattctatatggaaaaattcttttatttgttaggtagggtttaatttaagactactcaaccgaaaatgacaactttgttttagagttcttaacagctatgacagactaaatcctatatattgttagcttaattaaaattattgcagcatttttttttatcctaatcaaaaaatcaatggcaatataaagtcataacttatgtctacctcatattctattctagtgattagtctatgaataataaaataatttatgaatcgtcgatctataaggtatattttttgactaattaatttaatgatattgtgattgaagcatatatgatgttgactgaccaatatcattattatttttggttttgaatgagtggacttcttttacttacattttagtttatgcaaatactcattattataatgggatattgggatatgctttttattttttattttaatgcagagattgtctgaaaatgaatgaatataaagtcaattaattcactcacctctataattctcacattctctaaatctcaatatcataccttcaaaaattctcaaaaaaaaaaaaatatcataccttcaaaaacaaaatctcaatgcaataactaatcaattaaaaataaaacaaaatgtagaggtgggttgcatattaaaagacatttaaatttagggat

SEQ ID NO: 10587 - DNA, 782 bp, Cannabis sativa
ctctattttcgggagtctctttagggggtgtgctggggttgtttggattcctcataggaataatggggtggctcatcgccttgctgcgtgtgcggccgctttggatgcttgtcaagtgtttgatttgggggaggttgcacccctgttgcaaccgtgaactggttcctgtctttgttttcttggtgttctgccttttgtctaatgaagtttttctttcagcaaagaaaaaaaaaagaaagaaaacaaaggtaaaagttaaaacaaacaaagtaaagtggggtatacaatgtaattttctcattgtttttcctattttctatgtttaattggataacttgtaatttttttttttatttttctatgtttagttagataaaaatttgtaaacatttggagtaattttaatatatatatatatatatatttagaataatgtatatatatttagttatgtgattaatttaatttttaattatataaaattaatatttaatttaaataaattaataaaaataaacaaaaaaaaaacatatgtgaaaaataaatactctacgacatctcttatttgcaaataacttaacgccataaaatattacgacttcggttatttgctaatagttgatgccataaaggcatcattatacaaaataaccccaaatcttccctatgttgtcgattatttgataataactgaagtacagcatagggtctcatctgtatattgtcggttaatacttttcctctcgttgcttggcacaacatcaatagcaaattttattaaa

SEQ ID NO: 10588 - DNA, 958 bp, Cannabis sativa
  modified_base (390)..(392): a, c, t, g, unknown or other
ttacttttttaaaaaacatatgagtctattcttttctttcgtttgtcacagtattcacaatagtcacggatcttatttgttagcttttaaaattgaataatttacagtaataaaataaaatttaaatcacactataaataacaattatttttagtgacaaatttttagtcacaacataaattttttatgattaaatgtgacttttggttacaacaaagaactacttgtgactaaaacatagtatttagatattagttgtcactaatttacttttagtcacaacaagtattgtgactaaaaccacatttagtcacaacaaattgtaatctttgtgactaatacctttagccacgaaccttttagtcacaacataagaatgataattaatannnagtcacaacttttttacttttaatcacaagttttgttatgactaaaagtaagattttttgtatcagttatttttataaatatataataataaaaaagaatattattataaggtactaaggtgcttagtaaggccgaacttgaaatttagtgggtaaaataaatatatttgagccttatgatatttttcaaaattagtaagaaaatatatatttttaaaagaataatattttttaagtctataaactaagtaaactctaggtatagtcatagaccgtttatgccgaagatcgagcgtcttctaagcatatcactatgaggtgatatcttataattagttatcggttctttataatttttattacaataaaatatatatgagacccgatattaaattaaactaatagcaatattacatatcacaatagtattagacactaaaaatacctttagcatttctaaaaaaataataataataataaaacaacaaaagcacacaagcaataaattgaactctgtttttcacaatttaacctactcagagtttttttaaaactgagaagtcaat

SEQ ID NO: 10589 - DNA, 801 bp, Cannabis sativa
attcttcatcctattgacccatctggctcgtttgtttcttttttcatcaactatgataacacttagaatgtttctcgattaaaacattatcttcctctatatctggtaagcaagattctccaaattccccttcactatacccttgctgatactctcatttggggattcccccattctggcatcctcactgttaaatctgcttaccatctcgcttctactattgccaatatacactctccttcttcttccaatccaaatccttttgaaaaatggtgaaaaactctttggactcttccaacccccccaaaaattaaacacttctcatggaaagctttcaatcatattttgctgtgtgctctaaatttgtttcgcaagaaagctcttcctcaaccttcctgtaacttttgcggcactaatactgaatctgtttctcatgctcttattgattgtattagggctcgcaatatatggaagcactcaaaattcaaaaacttcgacaatgaccaccgaagttatgatattaagaattattatcttcaagcactgcagcttatttccacagaagatcttcctcattttgttagcataatctcgcatatatggaataccaggaattctattttatttagaaattcccctgaagctaacaatgtggaagaatttgtttgtaattacttgcaggattatagggaggctcaacacctgcattctcaagatatttctcactcagcctctcatctatatcttctatcatcttgccctgaaatcatccaggcagacactccggccttgtatgttgat

SEQ ID NO: 10590 - DNA, 581 bp, Cannabis sativa
gcatttgtgcttcttgaaacgattcaaggattggaggagtacatggcttgaagaccacgacggagtacgggatggagacccggcgatggacgctgtcgtttggggcagcctttgtccaataaattaagaccctaaaatctattacaacttcttaaccaattgttgtgtttcttgtgagtaaactctcgagtctcaattattactttatttacatttaattttttttaagctcaaattttaacataaattaaaggtgtcattcattttttataattaattatcaatatagattttttatgtgtacgtttttgtacattatcaaattttatattggtacatctaatattattattttaaaaatataaaaattattttaaaatttataatattttttatttttttaaatattttattttttataattttatttaatttttaaataaattttaacaaaactgttacaaaggacagagagagaaatctacatattcaacccttttaacaaaactgttacaaaaggttcttacatacacaagtgaatgcaattaaaacacaaaatagaaagttattatacaacttaa

SEQ ID NO: 10591 - DNA, 504 bp, Cannabis sativa
tcgcccatctccagcccatcaatcataatgacatcccttgatgatcggctatgattgttcatctcttccctgtagatctccgacgacttctggccggcaaccactcccagcgactgtcccatattgtctctaagccatcttgcaccaatctgcttcccctgccttcggtctggagctttcataaataaaccataaggtttagcaatagtctcaatgggttcttcaaacaatcgatgacaaaatttttctgaatggcctatgatgccacaaatgaacaaaacgttggcaccctctcgtatttggtcagcccagaaccactccgtcttactcttatagatccgcatacgtctttttagtggtttctccacattaatcttaacacgtactcgaaaataatctcgccaaattcccgtaaagttcttcggacaagacgaaacatatttgccaatataagctcccaccccttgtagtgcacggtcagatcgaaaaccaacttcaagatta

SEQ ID NO: 10592 - DNA, 741 bp, Cannabis sativa
gattgacattgacaccaatatataagatttttttttttaatcccaccaaagtatttttttctttaatagatttaatcataccatagtatttatctaattactaaagctctatattagagttatagttttttttttggtaagagtaaccggttagagaaaagaatgctgagagacagagtgaagtgaatagattctttccattcaaaaaaacctatagtctatctttagacatgttaaattaatttatgagtcacaacattaacgttgcgactaacatgaaaaagagatgcccaaaaaattagacaataaaattttaatatcttaaaagaaatccctaaaaatgtatctgtttcgccaataaatctacaaataaagagaaaaaaatattagtatcaaaacaagaagaataaaaaaattaaaaaaaaaatctaatatgatgcgataattataacttaatagttgagttgaaactccttgaatacttgaataatcaagtgagtgaagtaacaaattcacttataaaaatgtataaaatttagttaacaccacactctacttaatgataatattcattaaaataggaaattaaatttcagtgctagaaaaacatttcaaaatataattgttgttatgcaaaaaagttatcttagaagtcttttgaactaatagtgtcactacttaatgaaaatattttttaaaaatgtataaaattcactaataaaaatgtataaaatttagtta

SEQ ID NO: 10593 - DNA, 500 bp, Cannabis sativa
accgatttcgaaaaccgtatacaaggaatgtagatgaaaacagtcacttaacaaatgactgacatataaaagacaactcaataatctctaatgaataatatgatgctactacatactaatagaaggaaatagttgcgaattaataatcataaattactttacttatgctatcttagtgtaaccagaagactaaaaacccttatacatagagcttaaaggataattcacaacgatcataaaatgatatgtattactaaatgagacttctcatatttataagttattttcctttgacacaggtaactttaatatgctttgtacaaatatcaagatgaccaagtaatttccaaggctaaacccaaagtaaatcaggttcatatctgaagacaaaattttattttacatctaaacgaactggtatagaccgttaatagaaaataaatttggtaaacgaaaggaaaagagacgtattggtttcaatgtaaaaacataccgatcta

SEQ ID NO: 10594 - DNA, 611 bp, Cannabis sativa
gtgaatgagaaaaaggaaagagcaacatattcatcaatctgaaaacgtgatttttgtaatggtttaggtcatggtcagaaggcagagaacagctttcccaccaaattttgttcactcgctcgatggttcacatatgatgatgactgcagtagcctgcagaaaggcaggcttaacatttgcaggtcggttcttgtcggtgtctatcttgtttgctacctcaattttgtctgttctacttcttagttttaatatttacaggagttcatgattcatactggacacatgcatgcgacgtggatcagatgaacaggatacttagagagaaattcgtggaactatatgagactccaatactggagaatgtacagtatcttctcttcttgaaatcacatttgtctaataaactaaagacagcaaaattccttatgaaaacatgtttttcaattaatctaacagatcctctgttttcagttaatggaaggctttcaacagtctttccctacattggtcttccccccgttgcctgaacgcggtgactttgatctcaaggatgttttacagtcatcttatttttttaactgatcaagacaggagtttctcctcatttcaaa

SEQ ID NO: 10595 - DNA, 626 bp, Cannabis sativa
cctatatatgtttatgtatgcatgaaatttttctcattttggaaagtgtaagattagattaattgtgaaactagttaatacacttaaaaaagataatgaaaatgctagtctctatggctataagtgtggaaaccaaataatatattgataacaatttttggaagcaaactttctttcctttggcatacattattttatttattcggcactattagtgtcgccctataaatagtttgtaatattctataataattattatcaagcccgaaaatagacaggttaggcttgtgtctagagtttacctagccgaggaactcaaattttatcttcccttataaaattatacttttttttattgattttgaaaaatacaatattttttttctaaataagggcataaaaatatattttttcctatgacccaataaattttagaattggtcctaataattacgttaattatctagtattattttaattttttttaaaataaacccgttatttaattcaactaatgacaatataatattttagagagagtattacacactgtgccctttagcattacttattttatttactcttataaaattgatccaactattattaaaaaaaataaagtacat

SEQ ID NO: 10596 - DNA, 776 bp, Cannabis sativa
ttaagtgtactaaaatataacaatacactatctttttgtcattccattaaagatgctcttacataattaaactttatttcaaaaactatcgtcgttttatttttaatatacaaaaatatttttaattttttttttcaaataaatatcggacaaaattaagaaaaaatataataaattttaaaatatctatttattagttttacgtaccagaaatgattgcgttgatgatgatcatgtggccaaagtttatgaacatcttgtttgggagattcaacgatggtaaacccctcagaccacattctcttcggatgcaaacacgatcttcgacaggttccatacccactaatactattggctgatctaaaggcttggagcttctgatcaaacggtagagaaaacaatccacgagtctggagctcaacttcatcaagtagttgagaggaaacaccatggttgatcacatgaaaaataccccatttctcacatgcatgtcttatgagagaaatggcatttgggtccaaaagatcaattgtgggtattgattctaacaagttcccatcacaagggttgagcacccatgtgtgggactcaggtactttggttgtagaaataaagtcgattggggcaatgcattgatactctgagtctgatgaggtaattgacattatattcaaataagtgttttttttcccttagctcgaatttagtgtttaaactctctcttttatctatagccattcttatgtatgtatatataaacacttaattattatgtg

SEQ ID NO: 10597 - DNA, 580 bp, Cannabis sativa
atatatatatatatgaaaaaaattggtaaggtttgctccattcattggggcatttcttgtatttggtatatagagaaattataaactaatttttttttatatgagggtgtatattatagttatactcggcattatatctgttttctaaaaattaagaataatttaaagtgccgaaaatagaattcaaaccttcagttgcacagtgttcgttttattttaagcgcataaaagagactattttgaattttatttttgacaccggaaaagtaatcagaattgggatataacaagtatgaaaattagaaatcgccgtacagtaggagcaaatgccctatatatataaatataaattgtgctgatattcttacaatcgctcggcgatattctctctcacgaaacaatgcatcacctaacagaacctgtgcaaaaaaattaagaaaataattaaaaacaaaaaacaattgaaacccatatagaagcaccagaaattgaacacaagataacttctatatcagtttaaataattataaagaaaaaattacttgaaatggtcaaaaatacaatacagaaaaagggggaa

SEQ ID NO: 10598 - DNA, 502 bp, Cannabis sativa
aatcagggtcgaccctaggctaaagcgaggtaagctcgcacttaggacccacttctaacccaaataaaaaaaaaaaattaataaatatatattttttaaataacttataaaaatactatatatttatttttataaaaagggctaaaaaaattatttttctaaggcttaaatttactcaaagccgaccctaaaagtaacatatcacacttgatgtaatttaaaacgttaccttttattaatattagacattattgtgaactaaattaaaaatttagaatttttcattcctaaatttatagttacagaaggttgttatttttctccgggcaggatcgctggtttttcttgggcacatgtgtggcttggttggagttgtgtttatttttattattacaattagtctaccatcgagtggtgctttctcagcggtagggttttgagtgttttagtcgtgtatttgcgacatagttttgagtaatttagtcttgtttgtgtgatatgg

SEQ ID NO: 10599 - DNA, 1322 bp, Cannabis sativa
  modified_base (554)..(554): a, c, t, g, unknown or other
ttgtcttgatcaaaaccaacagtatttttaatataaaaataaaatatataaattattcattagtgacatttaagaatgtcactaaaaatagtaatttgaaaatattttacttttgctcacactgacatatcctacatttttcgtaaatgttacaaaatctataaatattactcaaattaggtaattgcaacatttttaagtgttactaacttattgtttttggtgtagtgtgtatatgtactcattttgcattaatttttataagttaaaatttatatatttatatatttcatatatactaggttattgttatgtacattacacgtatgtttagttatattttagtttttatttttattatatgtatttttaaaattttataaattaaagaaaacaatttattatttttaatttttttcaaaaaaaataatatttagagttttaaaattttgaggaaaataaatataaagtttaagaatattacaattgaacatgttcccaatattaaaaataacaataaaaatataataatgttacaaataatatattaatanttatatatatatatttaaaataatctaaaattgatataagtttaattaacctaaaacaaataatattaatatttatatttttaaattaatataaaataaataaattaatatttatatatatttataaaacttaccctactaacatcgttaaatttaacagaataatctaatattcttaaaatattatgttaaaccaacaaaaactgttaaatagtcacattttatatataaagatataaaaatatgtaaatcaattctctttagcatgggtaaatggggggttttaatttatatattttttggtttaattatagtactcctaaatagagattttttaaatatttgaataaccaaaataaaaacacattacatgttctaacgtttatttctttattttaagacttctttaaaatatacttttcatttttctatatttatagaatactatttattgctctaaacatattttattgattattttttgttttattttttttaaaatatgtagatatatatatagtaatattatatatttgaaataaataaaatatattaaaatttgcaaaactaaattttggtgatgtattttaatgtatggtgtaatataaaagtttgaacaataaaatagtgaaagttaagtcttaatgatgtattttgaaggattgaattagaagtgggtcaagcaaattagaaattgaatttgcaaaattatcatccaattcaatccaattaagcatcaaaatccaattcaatcttcagtattttaat

SEQ ID NO: 10600 - DNA, 660 bp, Cannabis sativa
gggcataaaacccaacagtttaatcgttagatattatcaggaaaggggcttgtaaggtgatatccaatggggaagatactaatgtttggaaggacccgtggattgttcatgggaaagtgttctacccgaaacccatcactccttgccctgtgagggtgactaaggtagcggaacttcttttgagcgatgggaattggatatccctaagctcgaggccctgtttgaatcagaaacaatcagggatatcttaaaaggtggaaagccttcaggtcaagggagagacaggtggatctggaccaaagaaggaaacgggaagttcaccacgaagtctgcttatttgattcaagctctgggaagagcccccaactgtgtggtggctccttctctctggaatagactatggaactccaaaatcttggaaagatataaaatcctttggtggggtatcatttcgaatgctttgccggtacgtggtatcttggccaagagaatccatattgaagacgtaacctgccctttgtgtggggaggctgaggaatcaatggaagacctgtttctatattgcaattttgcttaccatctctggaggtcttctccctggggggtgtacccaattcttaactttgggggccaggcttgggactgggtcaagttcctttg

SEQ ID NO: 10601 - DNA, 791 bp, Cannabis sativa
ttttactcttaaatctagatttctttaaatgaaatttgtgtccctaaatagtgagatgattccacaatttatagggattaattacatcaaattagtttcccaaaatcaataaggaataaaatgagaaatctgtttacttcctacaattacaataatcaaaatggaaaactaagtaggttttcttttttcttcattactacgatctatcccatgaatttaaggatattgtcgtgtcttacaagcttgataatatataggatatatctctgaagatattcaactcgtgacatctggttggtatatgtgaactgccttcatgatggagttgatcagatgttcttgtacaccttgttcaaaagttcaactccttctcactctaagcattagatctttatgcacggttccttgcgagagaaatcttctgcccgagtcacaaaatctggcccatgtgtcaccgagatggatgccacatcaccctgtatagaattttggataacagtctcgcttttagccgataacgctaagtccattaaagcgataagaattaataatttaacaataagaacacagagatttatagaggtttgaccatgtgattattataatagcctactcccttttagttgtattgttatggataattaataagatcacaagaagttggctaagtaagtttcttaagaattctcaagaaagcttacaattcttttacagcataagaactcttctaaaaaatatgatctcggatccctgaacaatggaataattccattatttataggaaaaaaatt

SEQ ID NO: 10602 - DNA, 589 bp, Cannabis sativa
cttaagaattttcaatgaaagatataactaacgaaacgattttaaaataaattgtcattttgaaaataactttttttatatatgtatattcttttcttctactttatttattttttcttaatcaacaggattctgtacctgttctattattactgtctgtcgttatggaaaagggtgttaataaaggagagtagaactcgactaccggatccccaactgcagacggtaaaagcttaaccacgtagacatgacaggtggcagcagcaaatattaattaaagagtccacgtgtttgtgtacaaggagtcgtctcaggatcttggcagcctgtggtgctaccacgtggcagtttgggctgtattgcctcggtttcctcgaactaaaagaaaaaattaatctgaagttttaatttgacgtggcgttaaaataggggtgtgattaggttaggttaaccaagggttagttgagagttacgtgtgtgtgaatacgagttgtagttggtgatgaaggactagcgacagcgtccaccgcctcttctttcttcgacttatcaggttttgtgtggaccaccacaatttatttgtcttgga

SEQ ID NO: 10603 - DNA, 640 bp, Cannabis sativa
ttattttattcaaaacatataacaatacaatcctattttttttagtataataataaaaaaacaattatttatgaatataataattaacaaaataaaacattattttactatataataacattaaaattacttattattaataattattttatttattagatcttaattttattatttataggaatgtatatatgaaattttaaagtgttcagtcaaaaaaattatcgatattaaaaataaagaaatagatagcatagagaaaaattagagtgttattattatttcaataatttgtttcaaaaaaaaaataattaaacactttttctctcgtaatatttatatctcgatcatttaaaattgttgtcatcattatatctcgcatgttgttatcaccgtatctcacttgtagtcgtctcttattgttctcacaatgtatttttatatacataatttgaattttttaattgtaaaagataataagtttttaaaaaattaaaaaatctataaaaaaaaatctctatgtactgaaaacacaatatacaatatttgtattcatagttaatttattttgactcttaattatcttttaataaaaaattaaaagagaagtagtgtacaaccattataaagagaaaatata

SEQ ID NO: 10604 - DNA, 599 bp, Cannabis sativa
catcttcacatttatgtttagggtgtataggtataggaggatagtatgtttgcatttccttgtcacaatgtttcggtttcattcaactgagtccaagtctagtattaggggtaggatagttcaaatctcttgtaagaaaattttgggggaaaaggacaagaatatagacttcaaatcttttgtttcgtttcttttctaccaaacattgagtccatttcgtccaccttcttttctttggctatgtagttatgacattaaaaattatagcttgctctctttaggtggacggttactttcatgaatcccggaagattgattcctcagcttcagatttgaagttctttttctagttggtcgtacctagcatcatctattttcccttttctgttttgacattgcatgttgtgttttaggccaaaaataaagctcgttgcttagcttaattgggaatattgactgcaagaacagaaacgcctacaattgaggccaatgtacgatataaaattctattggcatgaaagaggaaaaaactataccctatcatgtcgaagatcgttcgttttgcctaggattgttggtctaatttgtattgactattt

SEQ ID NO: 10605 - DNA, 550 bp, Cannabis sativa
tactttcaattcactttcgtaataccttaattatatatatatatgaaatactttttaataagtattactcattaaaggttaattactaataaaatttaattataaataatgattttaaaagtattaaatgaattttaatttattggagaatagtaaaagagaaatttgaatttctatacttagtttaactacttattagaaaaaatatcataaaaatatatttttttacactgtattaaaaatatatttatatacaaaatacttaattgaaactcaatttcttttttatatttttttttgtcgaaaaatatttttttaattttttttcagccgaaataatctatatatatatatggaacactttttaatgggtattaattactcattcaattcgaaaattgaccgactaatccagaacttatcttaaaactaacaattttgaacctcgatttggtcggttcaaaccacccaaactgaacttctatttttctttaaaatataatccaatttattctataagcacactattctatattctacaactattaat

SEQ ID NO: 10606 - DNA, 719 bp, Cannabis sativa
atatatatatattgagagagagaatttttcaaccaataaaaactaaaagtaggaaaaaagatcttacctattgtgaaaattactcaagatattttcaatggaaaaaagaaaaagaacaaatggaaatggaaatggaaatggccaatacctttagtatcaataaaatattcattgaataaatacttcctttaaaggaatgatattcttaatatatttagcttttctatattgaatgaaaccctattgtgaagataccaaaaacttttgttttgactttgtactcatgattttgaatgtaaaaatgtggacccttttttgtttgaacaacactacaattagaaatagtaggaaaatgacctaatgacttaacaattattgaatttgtttgattaggaaccaaattatatttaattgtacattgtagtgtgtaatttgaatgtgtaaaataaaaatgagtgaataattacttatactttatataatttctacctcaaatcataatttaaataattcaattttttttacttagttaaaagttacaatctttcaacttcctataattgagtgtgatccctatttaaatagtaaaagagtaaaataattgatattgaatcatcttttcttaattattattgctacttatgaattatgcaaaaattgaacaagtttcttggtgggactatatgtgggtgttatttttttagttacacaacaatctt

SEQ ID NO: 10607 - DNA, 1056 bp, Cannabis sativa
gcagctgacaaagcaagcttttaccgctgtggattcattagtctacaagacacattgtctgatgctcatggccgtcactattttgaatcttgccacattcaaggcgcaattgatttcatttggggtgatgcccaatccttttatcaagtaataataatttcattattagataacattactgtcaatatatatgaagtgatgtcttatgaatagttaacgatatttttgaatatacagagttgtagtttagaagtaacaggaagtaggattgggttgtcttacatcaccgctcaagggcgaaatagcgaaagtgacatgggtgggttcgtgttcaatggttgcaaaatatttggaaatggtgaagcattgttaggaagagcatacagagcttatgccacagtcctctattacaacacttatatggataatattatatcccctcagggttgggatgcttggtttaatattggtcatgagtaagatatatctatgttatttatttatttacactttttttttcttaattaatattaacttgataggtatgaacattgtgtatataatattatatactatagttatactatacattttagtgtaaatatcattttgaattttgtgttttgcaaaagttaccaattagattttttgttttgttaaatgacaaaattaaccttgtctttttcaaaattgtacaaataggatcctgaattaattttttgtcaaaataaaatttaaaaataatttaatctaaagatattatgacaaaactagttacattttctgtatctgttagaaattgtcttaaagttagttatattaagaaataaaattgttgaaattgagttcatagtcttatttttattattttggaaaatataggatcaatttttttatttaacaaaacaaaaaaatctaattagtaacttttgcaaaatacatggtatctaaaataatatttaccctacattttatttaaattttatatatatatataattgaaatgactttaagaaatgatgttttaacatgtataatatattttttgctatatat

SEQ ID NO: 10608 - DNA, 989 bp, Cannabis sativa
cacgagactactgactgtaacaataattgtaacgccctagttgaaggaacgccacatatcgtgattacactgtgctaatcacgtcaatcaaggtctactaagccaagtgaatttaaataaaataattgataaattaaaccaacttgtaataacttatactttaaactaacattatattacatatatgagatctcgtaaaatcttttcaaaatattacaaattatttatacaaaagccaatctaagcgacaaaataagatttctaagataatcttcttgtaggacctaacccttgtggtctaacgtggcgaaaacaagtataatccatcgtcaaagacctcgaactcatggttgttttgacattgtcttactcttgcctgcataatagagcacatgtaagccaatgcccaacaaaaagtataatcaaacccaaatataaacacataacataattatcacatttaatatgccattgtgccagtgcactaatataacacgccccaacttttatgatgatgtcacaacatcttaagtctattttgtataaacaccacgtattacgcccacacttctatttatattatcaaacctcatttgggtgtatatcaatcttgattgtcgagtttcacctaattattctttgaatgcataacccttatcatttatccacacatctcatttaacatatttgcataactttaatacatgtttctaattagctaactacacatcatataaaggtgccacatcattaaactctaagtgcatggtttgctttcttacatggatcccaaagtaagtggagaatccaaactgaaagacgatctcaatcaaatggcgataattctagtcacaaacttgagtacgagtataataagattaatctccaatcacataacacatttataaataattagattcatagactgggccaaatgatagagctcttcacaatctttataacgctataaaatatgtttaaaatggagt

SEQ ID NO: 10609 - DNA, 1187 bp, Cannabis sativa
tatatacgaggtattttggggttggggagaagtggtgggataaaacgtgggcacagggcaaaccagaaagctaaatagagaaagagagagtgaaaagagttgacaatctcaaaaactttcaacttttgaaatcatgggttccacgttcttcatcgcattcatctcaagcgtccattattcgagggtcaaccacacatacaaatcctaatttacttcctttggcagaaaaggacacactttgttttatattttgtttatttttaaacaaaggaaccccccaaagcatacagataatcatatttttaacaagttatatatgataacgggactcatcagtttattatttaattaattttttaagcaaaaaaacaaaaaacactacccaataaataagtatagtcttttcgtgcaaatattttgggtttatacattgttactttaaattaaatatatgggatatttatataattattgtaataatttttttacataaatatggtaaatatacttaataggacaaaatatgatatttaaaagaaaaaactggaatatgtcatttatattacaataaaaaatattaaaattctttttatatatatttttttaaaaaataaaacaaataaaattacagtgatcaccgaagttgttattggtaccgaaaaagttgacggagtttgctatcggtgtcggaaaagtcatggagttactgtcggtgccaagaaaagcgatggagttactgctggtgtcaaaaaagtcatcagaattggtattgtcgctggaaaaattaccgaaaaattcgtcggagttgtcattgtcactggagtttgatgccagagtcgtcaccggagttagatgttggaatctgactaatagaaaccaattacgtttatggtagtaaaaaatataaacaatgaaaccaattttttaaaataataaaaaaaaatataatatttaaacacggaaatgagttattttgtacaaccaattaagaaattgaacaggcataataagacactgaaaaaaccaatttcaaaaactacaaataaacatataaaattatataaagaaaaaatgaacataatccaaaaaggaaaaattatatataccaaaaatgaattcttacaacttggatcaatttactaatttttcttcttgatatggaagaagtttcttctcagagtcaacac

SEQ ID NO: 10610 - DNA, 674 bp, Cannabis sativa
tagaaaacaaaatcaaaacaccatacaaataacaagaaacaaaaaaaaaaactcaaaaacatcattagtatattttttttttttacaaattaaaacttataaaccgtaaaaatattttttcactaccatattttttgtaatttatttttttactttttatgaaaatattcttttttttatatatatattttcgtaaaatgttagatgcaaagtttatgaggaattatatggtgtactcccaaaatggatgtatttttctatgtttagattgttttgattttaattttttttatatacaaatgaaggtcatagttatttcgcacattttataaattttcaagatatttataataatttatgtgtcaaaaataatattcaaacaaacatttgtttcttttatgttatatacatgtaaaataaattatttgaacactaatttttatattccattctaaatttcttaaaattttataaaatataaaataactgcaatctatactatcataaaaaaaaattaagataataactactctaatatccaagatacatcaatacactatatatgtagatgcaccatagaagacccaaagttataaaattgaaaatataatcataggaacatctatgttagttctcctaagcaaaaataatcccaatgcttcacaaaataataa

SEQ ID NO: 10611 - DNA, 520 bp, Cannabis sativa
taaatcaccatgtaaaaagttaatttttatgcccatttggtgtagattccaattatttatgttagccagtgcaagaaagagtttaagggtattaaattttgcaactggtgtaaaggtttcaacatagacaatgccatgttgctggtttatatcctttgcaactaaacgaggcttatatctttcaacttcacttttggagttttgtatttaattttgtatacccatttgtttccaataacatggtagccaggtgaaagtgaaactaatgtgtagagtgtcatcaccttggtagagttatgagtgcttccctgagtttgaatatgtgatgtccattgccttgatcgtatttcgagttgagctcctttcacatttcagcagttgtgtccaagaacatgatgttgctcttaatttctagtaaaacagagtggaaaatccatgacattactatttgcttgcaacgaagccagtaattgtggagaggatcatcgaatgtatagttggaagtttttatcagatagtc

SEQ ID NO: 10612 - DNA, 709 bp, Cannabis sativa
gggttcacgtcctccaccaccaaatactcttacaggtaacctcccgaacccagaatttcaacaatggatgagatttgatcaatttttgatgcactggctaatgaactcaatctctgaaaacatactgggacatgtgattcactgccgcacctctgctgagatttggaccaccttctctcaactctttgctactagatccagggctaggattctccaacttcgtgggttgcaacagtcgacgaagaagggttctctgaccattgaagattacattttgaagatgaaaatgtttgctgatagtctcactggtgctggacaacccataaaagataacgatatgattttatacattcttggaggacttggagctgagtatgagtcggttgtagttaatctcacctccaaatctaaagatctcactctacaagaagtccaattcttgcttcaaaatcaagaaatgcgaatacaacaacttttcgcagaatccgtagtcaacgttcaggccaatcttgctaatatgcaatgcaacaaaggaggcagaggctctcaagctaaccgtggttaccgtggttcaaatcgagtgggaagaggccattacaggggcggtcatggtggtaacaatggcaacagacccatttgccaactgtgtggaaggtctgggcacacagtcattaagtgcttccacagatttgatattaacttcactggc

SEQ ID NO: 10613 - DNA, 663 bp, Cannabis sativa
cctcccagtgagggaaggactcttagggaatagcccccaggaacaattatcggacctcgtccccagtactatgctggagagacgagaccgagaattggtgagcctgctattagcaagccccatgtggacttgggagaagatcgcgagttagccagacttaaagaggtcgtctgtcaagccggcttaaccgaagaaccatgcactgttgattattatgtattcgctcaacagatatgcaaattcttgagatggatggatgaccaagagtacatcctctgatctcaccaggcggagctagatcgccgcaacaaaaaagccaatgacctgataaggtggttcaatcaaagaaccactgaaagaggccatgatctcattagagacccactccaaggaagactagttgacagataggggagggtctatcagcaagctgtccaaccaggctcttcaggaaccaggacaaacctttccctacatgaaggagtacaagccttgccacaaacgtctaatggcgagaacagcctgatcccagcaactagcagtctgggagcagatagggatatctcaggctcaacaacccccatcgaccaacctttggttggccagccacctactggtgcacctctagttgaccaggggagtgcatgttggaaattattttac

SEQ ID NO: 10614 - DNA, 732 bp, Cannabis sativa
aaattaaaagttatttgtaaataatatttttttagatagatattctactatgagtgttttatcgtaaagtttacaaaaactaaatcaatcgaagaattaattgaattataatgatgatgatgactgtgttacgattacactaaacttataacatggtttaaatagtaatatataggatcatcgtgtgtcattatttataacatgcagctatttttaacttttacatgttacaaattaattataaaatatatatgttttttcttaagaaaaaaaaagattaaattaatgaagtaatgtcaattcatgaatatgcatgcatgagtatattttcaataataggagtttgcttagatcatttcacataaaagttatggaacaggtttcttcagttcatgaaaagccacaatacaaatgtcctttttccctttcaaaagtcaaataataaaacaaacctctacatcaatctatattcaatgtctatatatttactggaacgattttccccatatatataatataaatttaaatatatatcaaattatttgtaacgtttttgatggagatatctaattaattaatttaatttctaacacaaaaacttttgttttctgcagtacttaaaagtaagctgtttacataatttgaccaacttgctccgaggccccaaatgtacccttctactacattaaaactttaataattaagcttgtttttcatcagattaaaaaaaaa

SEQ ID NO: 10615 - DNA, 844 bp, Cannabis sativa
ttttttaagaaaataaaaaaaaaagtatgatatttagaaaaagaaaaaagatattatgaaattaaaaatattaaaattaaattaatattataattaataataaattttaaatattattatgataatttttataaatatcacttaaattaaatattttttaattaaaaatgatgtttaattaacctactatatatatttatgatgtcactagccacgttgggcctaattatgtatttttaagttttttttctcttttaaatgaagcagtttaatgcagaagtttagctacacctgaatgtgggtgaccaactggtcctacctgattaatttcttaaataagttggagccattatgttatgtgtggaccaagtaatctctggttctttcgaagctaatcttcttttttattaaatactaattaaggataaacattttcattcatggcccccttcttaaggaaaaagtacacatctaaagcaaacctatgataatgacaactgacaagcatttcaatgccaactgacaagagtggaattattgacgctgagagactaataattttttttttttttttgaataactgagagactaataattaaaaataaaagtaaagaaaaacttagacaaaacataatattacagcttacatttcgtggccattcacattaattctttgctcgattgcagattcttacaaatgcatgaagttcaatatcaaatacaaaaggaaaaaaaaaaaactaaaaacatatatgtaaataaacaaaaaattgcccaaaaaaaatattggatgaatgaatagagcgctagaaacgctgtgacaaatacaaaaaaaaaaaaaaaa

SEQ ID NO: 10616 - DNA, 644 bp, Cannabis sativa
caagtgggtcccacctattccttgacatgtcatctatagtcaaggctcctggtggtaacacgtgcctagtgatttggcagacaacaatagtgtacaattatcaattatagatgcttctttatttttgtgatcacaaataatataaaggatgaagaagaataattttgggtggtataaaaataaatttaagttgtgtgttttataaaaattatcaattcacttttttatattgttaaatactgtcttttaatctcttaatggaactctgtctactcgtttttttaaatggaatataatgtatctcaattcaatttgggattattttagaagtcttgtcacaatcaatgggggtttgctcattagagtaatcttgttacatatgcaatgtggtctaattttttagattaattttttttatatgaagtgttgctcaatatagacagtgatattttttttattaaaaaagttattttttcttaaaaagtcattaattccatgatgagcaactcataaagttgttaactatatttgagtttttttttaagagaacttatatgaaagaaagagaaaataaaaaaaaatatatatattttagaataatgtgttatcttggtaactactaactataggtttgcttacactaa

SEQ ID NO: 10617 - DNA, 583 bp, Cannabis sativa
aatttttcaagaaaaaacaaaaacacgcagaaaaggaataaaatatttaagatcaaatcaaaataacggtaatcgagaactataagagagtgtggaggaagatgaggaggaggtgaagtcctgtaattggtagcctgtaaagagtcaaaacagtgaagggagtgagagtattctccatggatgaaccacgagaagaagcttactgcccatcaaagacaaactttggctccaaaacaaaaagatatttctgaaaagttggtctgactataaactatgaagtcttcacctctgtgatgccttttagcatcttcatttgtatatctatatgtgtatttatctataattaaataaatgaataagtgtctgtatatgatgatgtgaataatgagatgaatatgaggaatccagttgccatgtgaggacagaaataaaatataaatgtgataactgataagtcctaaattgtggcatatgcaatgagatttatatactaatcatagtttttggtcttttttgtggtgtgataatattttctaaacatggcttttgaattgttttcctttctttttctgtaaaaaatttt

SEQ ID NO: 10618 - DNA, 645 bp, Cannabis sativa
  modified_base (320)..(321): a, c, t, g, unknown or other
gttatgtagatacggtactctcctttttccttttccttttttggaatgaaaatcttttgattgggtaaaaactgatattggattaacttaaacaatactaaagattacttttattgtagatactctaatatcaatactctattaaacacatgctgattaatattatatgacactttcaaaagcggtatagctaggcactactactagttgtgccttttagcattttttctcgagaaatgctaaaagacaccagtagtgtctagtacctttttatatgtcaatattgctattggtctaattaagtattgggtcccatatannttaatataatagcttttagaaaatatcactagccaattgcaatgcgacatgtcgaaaaagtactaaacactactagtgcctactaatattagaatgtttttttatttctataaagcaatataacatgtgtttcattacgtaccaaccaaggttgtccatatattgttattaatgctataatttggtagttggtgcccacatacatatcatatctaccaattttgtccaatatataataatgaaggcatatccaattatttcctcccgggacgactgaaggggcggatactattcatttggggtgtatgtttttttttttttttt

SEQ ID NO: 10619 - DNA, 1044 bp, Cannabis sativa
  modified_base (125)..(132): a, c, t, g, unknown or other
gtgcatgaattacattttaggaataagtggacattgttgttattaacaaaaatatcaatgacgatattacggttataattaaatgatcaacatgaataaaatactagtatatatataaatatatnnnnnnnnatatatatatatatactctctcttccaaaataaaagcttaatttgagtatctcttattatcattcttgtttttctagccgatcaacttttcacaagttaaaacacaccttaattatataaatgaaatatatttatcatatctatcttcaatggtaattaaattaaagaaaaagaaaaatgatttttaaaatcattattaataagatgtgtaaagaaagcaaaaggagaacaagaaagaaaaactatacatataaatatatatatatatatatttaataaataaatttaattatcctctctcaaaaaaaaaaaaactttatctataaaatcatagacatcaatcgtaaaagcaatgtattttgtaacttcttactttttattgaaaaaaacaaactgacatggtgaacacacatagaagcgaggcagggtatagtcgatcttgaaaaaaaaatcagaaaaaaaaatcagaaatatattttagttagttatgatataaatttgtaataaaaagtgatatctacgacataatattaacattggtataataattaaactaaattatatataggatagaggtcaaggttcaaatctcatcaagtacttctcatatacttctctcaaattagaatagattatcgtttaatcaaaagacatattttgtgagatcatgaaatatattaaagtaaaacgagcaacacaagagatgcctccataaatttgatctcgtcaatataacatcgtccaaaaataaagacgaataaagatacaaaaagatatgatacttctgtaataattaattttttcttaaataaaaataaaatttgtaatacttattattatattttttaaaaaaaaaatatgaatttttgtaataatttttaattagtcattattgaatatctcgtactgata

SEQ ID NO: 10620 - DNA, 884 bp, Cannabis sativa
tgttgcaaacttttatcccaagtgggaagatcaactcttattcggtatgtggctcaaagtaccaagctttacaatatgactacttttttattactgaaaattctttgccatcaaatagaccaagcaatctgaaaattttggtggacgggaggtggagaaaaagactgttatttggctcttctggattgaaattcaatgtgtgccttttgataagggtacgcttaattttaagaaatttgagaatgtcaaccttgctcttattactaagcttgggtggaaacttgcagcaggggatgactcgttagggtgcaagttatttaaggctaaatattgggggcgggaagaacaatccttttggtccgttgggttgcccttaaacgcttctttcagaataagaggtattatggcaacaagagagttgattaggaacgagtcttgttttcttattgctaatgggagaaaggcgaatttgtggcattccccttgaatcccttggcttgattagagacaattcagagcagcctttaatcaattattgtgcctaattcgatcaaggtttcctctttgatgtgcgagggaggagagtggaactcttacttagcaaacagttggtttgttcctagtgtggtcagctcgttgagtttaatcaaaaggattccaagtctatggaggacctgctagtttggaaagatgccacaaatggatcttattcccctagggaggcttatcgttcaattattgaatttcgtggtagcagaactaatcggtattggattcaaatttggaagcttaagatcactgagaagttgaaattattcttgtggaaactttgtagagatttccttccatttggtattcggctccaaaggatttttgggaatccc

SEQ ID NO: 10621 - DNA, 689 bp, Cannabis sativa
taaatataccaattaaaaaaaaaataaatcatgaatattcactttaacacttaacagttaaatacctaccgaagttacaaaaatataatttattgcaattattcatttataaaaaactcgaggatacaccagtacacctctttttctcattttaaggggagtatcgtagacaccccaaaataatatactaaataaaaaaaatagagatataaatttacatgtgtttggagtttggatagagtgaatcaatcatcatccattccacctgcatcatcaatgtccatatcaccatctccataatcattattatcttcaggttgagcatgatcatcaccttcccctggattgtatgcaccacctcctacaatgttctcatcttcatcatcatgtgttgttgctagtgctccttcttttactgccattgattttagattctcttcgctgaaaaatgaagcgtacggcttcgatacctgtgtcggggacgacgagtcagctattataactttcaaatagctttatctatgttaaacgagaatgaagtgtgtgtaaagtcggaaaggacattttccatgaaattttgtcttttaaggggttttgacactaatgtagaaagtgaaaaactgttctttattttagctaatgctttgaagtatatggtttcgataactgcaccagaggggcgagtcagc

SEQ ID NO: 10622 - DNA, 665 bp, Cannabis sativa
ggttcgaacaatgaagcgacgccccaataagtaaggccgccacttgaggatcgccaacacgatggccatcaattccttctcataaatggatttaagctgagcacggggtttcaaaatctgactgaagtatgcgataggacgaccctcttgcattaaaacagcccctaacccgtaccctgaagcatctgcttccaccacaaagggcttgcgaaaatcaggcaaagcaaggacaggtaccgtggtcatggcggtcttcaacgcatgaaaggcttcagtggcagctgtggaccagtggaagttgtccttcttcagttggtccgttagtggccgagcaatactcccatagtctttgacgaacttgcggtaataccctgtaagaccaagaaatccgcgtaactccttgagcgtagttggcacgggccaagataacatagcctggatcttggagtcatccacggctactccgtgtccacttacaatatgacccaaatattcaatttgccgctgtccaaacgagcacttcttgagatttgcaaagaactcgtggtcaaggaggagttgtaaaaccatctcgaggtgctgcaagtgagtcgtctcatcaggactatacaccagaatatcgtcaaagaacactaacacgcactcgcggagcaatggcttgaaaa

SEQ ID NO: 10623 - DNA, 664 bp, Cannabis sativa
tttgaagtttctgcttgaacaacgattggtgactccggaacatcagaagtggttggtgaaactgttagggtatgattttgacattcagtaccggcctggggtgggcaaccgggctgctgatgccttgtctcgggtgcaggctagggagtgttgtgtgctcactacctcgacttggctggattgggcagtggttgaacaagaaaacagtcaagatcctttcctctcacgtgttgtggcagatttagaacaagggaaagaagtgccgggattcactttgacaaagggtcggttgttgtatcgcaaccggttggtcttggcagctacatcttctttaattccgcatttcttgcaagagtatcatagctctcccgtgggtggtcattccggagagtaccgcacttaccttcgtctgcgtggggatgtgtattgggtgggcatgaaggctcgcgtgggggactttgtccgcgcttgtgacatttgccaacgaaacaagcatcttgctatgtcaccaggggggttactgcagccattggaattacccgctcaagtatgggaagatttgactatggatttcattgaaggcttacccaagtcggagggtgtcgacacaatacttgtggtggtggatcggctgagcaagtatagccatttcattcccctcaaa

SEQ ID NO: 10624 - DNA, 576 bp, Cannabis sativa
aatctatacatatccttaaattgcagtaatgaattaagttgcaagcaccattcttttgtaaccctaaaccagtacttagtactggcaatcacagtatgtaaacaaactaatatgaaatgtcaagacaaaaaccattttgtttcaatattgtaccccattctatcaatacgcacacaattattgatcacttttgcgaatatgagattcatgtcatgtattttcagaaaccatgcacctactagctacaacaaaagtacaaatacaccatgagtaacttacatagttacaatagttattttgagcatattctctatggcattacatccaaaataaactgtcaaaaaatcaaagcaggtaagttttcaactgctattccataagaacccgtttcctgctaacattaatgtactacctaagttgtagactaagaattcttgcctgcttttagttataaatttggaaatatagtagccattcaagatgcaccgagcacatatcactaagccaataggtatgataatagcatgatagcatccataaaattttgtcagcaagagtatatacagaacataccca

SEQ ID NO: 10625 - DNA, 613 bp, Cannabis sativa
aaaattgtaaataaattagaaagaaattaaaatataaggtgggcatctcgtgaaacattaattaattttaagtactatgtataaactttaaaataaatcccatgcttgatatgctaaaaggttaatcacaataactatatatagaaaaaagagccaccctagctaacgaatatatacttaatttgtacttcaatatatataacatagctataatatatatttttcttaaaaaaaattatataatttataagagtattattattggacatcaagactctttagcaccttcaccttctaaacgtatactgttgtaattggctaacgatattttctaaaaattattataatattattaaattatatgaaacttgatatatttagttggaccaatatcaatattaatacataggagggtgttaagcattattggtgtcttttaacatctctcaatttataaatggtgtttcatgattggttaatgatatttcttaaaagttattttcttaaattatataagactcaatactttattataccaataacaatatgacaccgagaaaatttttaaacactaataatatctttcgaacaattctctatcaaaaaaagtcac

SEQ ID NO: 10626 - DNA, 784 bp, Cannabis sativa
tgttttgaaaaaacacttagtatatatatggagcctctttcttcacaatttcctccttgactttgtggtgaacttcaaggcttcttcccatagattccatgttcgactccaaatatatctcttttttggtgtatcgagtgacgtttgaaatcactcatggctgagtggctttgaattacccaaagctgagtgaatcttagggttactcttaggtcgagtgacatttgcaaatgctcatggtcgagtgacatttgcagatgctcatggctgagtgacttttggtcacttaagggtgagtgaattttgaaattgatcttggtctagtgactcttagggttactctttggctgggtgacatttacaaacactcatggctgagtgacttttagtcactcaaggccaaaattttgatattgttcttggtcgagtgactcttagggttactctttggctaggtgaaatttacaaacactcatggccaagtgacttttagtcactcaaggctgagtgaattttgaaattaatattggttgagtgaatctttgggttactcttttgtttgagggagttcatttccgtttgggctttcttaacctctttttcaatgtaatcttattatgaaaaaagtattggctctttgagcggtctcgacctcttattggttacttattggatgttaagggagctttatagcctcttgagccgcacttagcctctttcaagttttggatgttaagggagcttatagcctcttaggccgcactctacctcttgcattatattc

SEQ ID NO: 10627 - DNA, 1117 bp, Cannabis sativa
cacttcatctttcttctaacccttcattcatatacatatacatatttatatttatatatatatacactctccattattgtaattaaaagtggttcaaattcatagttatgtaaatttttagggtcaagcatggtactgtgaaaagaagaccaaattggctaaccaaaacagatcatatttaatagcttcaattattttcaggtacatatacttttcttcactatactttctccgcatcctttgttatataaatatacatatataaaggagttggtgtatttgaagagccagaaggcatatataagaattggtcacttattattctctttgaaatgtcttttgttgggttactattaatttttcagaatatctaaaacaattagaaaacacccattacccaactcaatccatgagactatactacttttgatatttttaatgatttaaaagtcaaaaagaaaaagaaatatgtcataatatgtgctgtattatatcatgcttaaccattatttaagtcataataataatctgtttgactactatgtattttaaaaatacaatcttttttaggagaaaaaacaaatctatgtattatgtacatatatagttacccctttccatgtactaatttattaattaaagaaatatcaaactaagacatattagaaaattttacacaatttaccaaaaatttgaaaaaaattacaaaaatacatcaatacagaaaatttttcatttgtactctttatacatttttaattacaaaaatacctttttagtaaaacaataaactattttttagttgttttataggtcttaagagaaaaaaaattattgggtcctttatttaaaaaatatgtgatgttttcaaaaactactaaaaaggatgtataattttaaggggtaagttgaaaaatgtctcttttatcaatcaattaactaaatttacttctactttttatttaattgaaatatacctctttttatatgtattgtacctaaaataacctgacataagaaagtctatcttgaagtgacagtggtaaaattagtacaatgtttaaaaaaaagataaaaatgatagaatttaaataagagggtaaaaataaaagaatac

SEQ ID NO: 10628 - DNA, 617 bp, Cannabis sativa
ttattatgcgctacaagggaccacaggtgatggaagggatctgataggccagaccctctcaaaccttcttttctaggggtcccttttaagtgtgtctttggcgctgatatgggcttccaaaataataccttgcccccaaaactagcttccattttactttgtaggctaattatcattgtctattaagtcgggggctcttttggcatttggccagctttttgattgccacgtgtgttaatccatgttttgggataacatttacccctaaatctctgcttgtatttttagaagttaaaacttgctagaagcatcctttcaattcccatccaaaaggtaagtgtaccgttgtgatgcatttaataagatacgacttctcttgtaacaaaacatgtgtccatccttgaattgtgctttcattcatgcatgctcaccttgttttaagatgaggatgatttgcattctaactcataatcctaagatgtaccatttattgcagagcagacggaggaaactcgagtaattcaatcatctcctcataaattgtttcttctagaggcattaagaccgtcggatcgggtgtgcttcttggaattcgaagggggccattggatcaaagg

SEQ ID NO: 10629 - DNA, 956 bp, Cannabis sativa
tcataatcgcaagtcacgttgtagagtcgtaagttgtgcaaattcttgtgagaacattgcttaagttatctttatatttggtgatgctttgcttatagtagaaacccttatggtataagagccataaatgttttgaacttgttttttttttcttttttttgggtttttgcaagaacacaaagattcagaagggcatttaatgagtaaatctcatatgctacaaacttttcctagtttgtcaaaaacaataagggtgtatgacccataatgcaaccataagggtgtatgacctataatgcaaccattaaatgcccttctaaatctttgtgttcttgcaaaaacccaaagaataaaaacaagttcaaaacgtttatggctctgataccataagggttcctactatatgtaaagcatcatcaaatataaagataacttaagcaatattctcaaaagaatctatacgacttacagctctgtagcgtgacttacgattatgaatgatagattacttagttacctttatacttgagtgatacctaactcataatagtaatatcttcggtatgacccataatgcacactatcactatttcagaaatcgcttaaagaaaatttagaaaaatattttgagagaagaacactagaaattttatttagtagactgcttttctgatgcctcttataatgaaaaggatgggtctataaatagctatttacatggggtaagatacaaaataggaaacttcctaaaaatttcctacaaataaacaaacatacaaaaggacaaactgacaataaatggacaaactaacaaaatgacaaacagagaaaaagacaatctgataataaatggacaaacagataaacatagaaagcaacaaaccgacaaacaaacaataagaaaaaattcctacaaatatcgtgactatcaagaacttttctatttattgctatct

SEQ ID NO: 10630 - DNA, 811 bp, Cannabis sativa
gcacacacacaatcacgtggaataattattttacttttctggattgaagtgcacaaatagggataatatgggatctatcaaattgattatatataaagataaataaatttaatgtttatttataagtatatattttgtaaaactataattattatcttaaatatgatacatataaaaaaaaaatttatattttaagtttatgcataaaaatatataatatcagttacttataaatattttttaataaatttaaaatagaatcgcgaaatttgaaaaaaaataccgttttaataaatattaaatttataacgtttatacacttaaaattttaaatatatatacacggttaacaattaattaacaagtaattatatatagctagttttgaagaaaagaatatcaaatcattacagctgtagatatgggccaatcgaggagggagagaggctaattatgaatgaatggaaatcatgttatgcaataaagggcttctatttggagctgaacctacattaattggtcccatgttaaaagaaagataaaagagctttttctctctttggttgaaatggacacaaacttcatttttggctcttctagacttttataggacctggtcccccacatgtatttatgtatcaaaaaatctggatgcaactaagtcgatcgatctcactttgaaaatattgctgaattaatatagactagaaaaatttgatctcaatttcatcataataaataacaatattattgtttaaaaacgagcaaaaaaactttacttacgttactataagtaattataacatgccaa

SEQ ID NO: 10631 - DNA, 634 bp, Cannabis sativa
attgatgtacacatccttcccacagtggaaagagatctaagtcgccacccttcaagtctttggtacagtttgaatttgaggaagttgaaaattttcctcttactacgagtgaaaaggaaagggttccttaaatgtttctcattcgactgaacacaactcattcccatattttttttcaatatcagacttcaaccaaccgaaatagttacccgaaaataagataccagacttctgtttactgaaaacttgaccagaccacccctcaaaagtcttgatataatttcccaaagcagaagcttcctacccattagccatcaaaaagaatatagtgtcatccgcaaatatcatatcatgaattttgccattgctttgttctatataaattaatctagaaagaacctcattatacagaagaaataagagatatggggacatcgggtcccctgtcgaatatgcctctactcaggtgaaatttcttcaaaggtctaccgttgagcaaaatggaatatgaaatagtacgtagatacgcaagacataatcaacttcataaaatgagagttaaagtcgaacaactccaagacctttttgagaaagtctcactccaatctatcataggccttattcatatctatct

SEQ ID NO: 10632 - DNA, 628 bp, Cannabis sativa
ataagtgtcgtgagtgtcacataggacatagcaatactgattatatttagatggtatggtgtagatggacccaaatatataagacgtgtattataccaatgatagtagtgtagtgtatctttaataagttgagtgttgaggagagaaggatgaaatgatgaaaatgcagaaagcaaagcagtaaagggaatgagataaaaggttatgccctttgcaacaaaagaaaagtgaaatgaaatgaatggaaaaacacatctaacgtgaccgactcacactcattcttcattccttttttcttaattaattttaaatattataattttaataatctatatatttttgtatctatctagagcgagaatggttgaaaacaacctgaagttgatatagagagagaaagagagaccatagttttgttcgaacaagaacagcaagtaagaagagaatttgactctagtcttaatccgaccgatgcgaaccgtttgatgctttgactttttcttctttccttggctttgaccgatctcttttactcttcactctcttctccttcaatgggagctcgttgctctaaattctctctttgctggtttcactctcacctcaaaccttccgagctcgaatcttc

SEQ ID NO: 10633 - DNA, 546 bp, Cannabis sativa
cgtccaagaattcgacaatttccaggataacttcggaggcattaacggtccccaagggaccttcgtccgcgtcggaaccgcaggtacaggcagcgtttttcattataaggataagaaaatttttgaggctcagaaactaattgatgatatattgcataggttagggttgggttcgaaagcttacgagattaaaactatggtcagttccattacggaaggtgagtatggcgttggtgattggtttggggtttttgttggtgcttgtgcttatgttgttatgaggaaagataagcggtctttgccgatgccaatggctgaggtttcttcggttgttggttgtgatgagtttgaattggggaaaatggtttctcgtgtggtaaagtttctaaatttgaagagaccagagtaccctgaattcaatgtgcttagttctttcgaaagggcattgcaaaattcccatatttttggaaacgttggggatgagacgagggagagaatccggcgacaagggatctttttgatacaatgtatggttaaatggtctct

SEQ ID NO: 10634 - DNA, 544 bp, Cannabis sativa
catcccatcacttctgaagctattctttcaaacatcgaatcatatagccacccaagtagcagttggccgtttacaatccactgctcaaacgaagggttcacttgacctacagagcttgcaacaccatctgataagtagaaaagggaaaaaactcttgtggtctgggtcacgtacatttgagatatccatctaaacgatggccttgaacaatagctatcaccatagttctccatagagagaaattattgcgatccaattttaagacaaagggttgattcaacgtgcttccaaactgaggcaccaccacattcaaagctgaaagttttcgtgtgacattcatcacatttggagccgatgagtgttgattggctattgagtttgctgctactagtgtagctggcctgccatcacctttcattgttcttgacatacgtcaaaacaagctctgataccaagttagaaatatgcaaaaatagagaaaaaaaaaagaatgaaataaatgtttttagttcagattgtaatcaaatgcattgtataaatagtg

SEQ ID NO: 10635 - DNA, 696 bp, Cannabis sativa
agatcctgagatggcttcttcgagcggtggtgtgcctccaggatttcgattccaccctactgacgaggagcttcttcactattacttgaagaagaaggtctcctttcagaaaattgatatggaggtcattcgagaggtcgatttgaacaagatggaaccttgggatttacaaggtacgtctatatttattctttattattatttccttttctatcatatattgtatctagctagcttgagtaattaagtttcgaacagtatatatttgtttgtcatatataattcatcagttaattgtatttattacgagtttatatatatggcaatccgttagttgtattacaaggccggcaggaaccggccgcgtagtcgtctctagtctacttttgatgaacaattgaagaagcttaaattattaattagatattttacatgaacatatccatgtacactatgaattgtgcaaatcattaatgaagtctgtaataattaatatttaatatttaatgtttaatagttatttgagcagtgtgtattgtatttattagtggtactgatattatggtttgcctgtatcgaatagaagaaaccatctccacaacacactcctctatcgatcgggaagtgtatagagagagatggatagtagttatgtggtcaaagggttaattaatgtacttattacatatatatata

SEQ ID NO: 10636 - DNA, 667 bp, Cannabis sativa
tacagaattctatatagaaaccccataacggatcaacctaaattgtaatcaaaattcatattgtaatctacatagaaactattggagaaactacagtgcaactcaaaccgtaaatttaaaaaaattaaaaaatcgtatatggggtaatttttcataattttattacaatataaaattaaatattcaaatcgtctatttcacacacatataaaataaaaaagtcactcgtgaaatagattatttgaaccctattttcaacgtgttaaattttgtcaaatttcttaaaatttaacaagatgtcttaaataactgcaacgtatatatcataaaaaaatcagattaaatttattttctagatacagaaacagataagagtgtatcattctatccatttcaaatgttacattgtaattttatgtgtacataatataatcattaaatagataaatagtaaatgacagtatagtatttaatacttttgtaatatgtaatcttgttattgatacaatttaatagcgtgtttcacttatttgattttaataaatattataaaaaatcgttaactaattataggacaacactttatcataaaataacaatgatcataatttgttggtaaaaacctttgaacttcaaccaacggccatggtgctatctccaaaataaa

SEQ ID NO: 10637 - DNA, 557 bp, Cannabis sativa
ctttacttataatttcgcaaagtgtgaattttgtattttgggtttaatctaatttaaaatagtgtagattggaaaatttgatcagttattttaaatttattactttctagtattgaattgtttaatatttattaaatatatattttttcacataatttacaacaaaataaaataaatatatgtttgttttatatattttcaacaacaaattaaaataagatatacaacaaataataaatttaatgaaaaaaaattatatgtaaaaaaaatattacattttattttagattatatattttttttaaatataagtatcaaatatacatttgatatattaaattctaaaatatattaatttgtatcgtatgtattgaatttttaaattactagtatgttttaaaatatatgaatgtgttgattggattagtttagttacttttatatgtgaatcaatatccaatccgtatagggatcttagattttttcaaattcaatctacacacaaatataaatatacgcactttaagaattggaataaattgaatcgtgcaaatcaa

SEQ ID NO: 10638 - DNA, 730 bp, Cannabis sativa
aaattctaacaattgtttgtatttgaataaaaagtttaagtcttggcccaaaataataataataattcaggttttaaaaaatttgtaatcaagcaacaatattaaaagtgaattagcgacaccatcgatctaaactctaaagtataaattgaagtagaaaatagatcatacaaaactaacaaatgtcaattaatagtagggtagtccacttaaaaagcaaaatttgatcattttatacgttcttaattgatattaattactttataagaattttatagttataattaatttgacgaatcaaaatttcattcctaagttatttaaagaaaaagaaaaagcttcatgcaatgtatatatatatgtagcatccctagtccctagataaataaaaacaaacaatatataaaaggttgaattgattagaatcgttatcctaagaacaagagtagagtagatgcaaagcaaagctaattatatatatatatatatatattatgtttgattagaggaagtaatactatattacacacaaataatttagtaagaggaatataaatgtaaaattagttggaatatatatttatataattaacttttaaaaagtgaagagtactgatatatatgaagtggggttgggctcaaaaagaaaactctgagccatctgatgcccatgactcatcacagcccataccccacttttgcacatgtacttccccaattattgcaactc

SEQ ID NO: 10639 - DNA, 830 bp, Cannabis sativa
gcattttgttttgttgtagacctttccacaagtatttgcacagatgtacctaaacaattatagattctgtgatgtaaccctcaaagttcaaaatgagaacaaaagttggcgtttgaagtacacgtatacagaacacaagattgcacaacccaggttccaaggtggttggcaatcatttgttgtggacaataatttgaaagtaggtgatgtgtgtgtatttgttttgcttaacgccacagacgacattttgtttgaagttgtaattttccgtgctgaagaaagctcgaaagattctgtaggcacaagtaagttatgatctcttttcttttgtctactattctgtttatccgcaatattaaaattcatttttgtacacttttcttgtgcacattttcagcttataatgaagttggaacacctggttttttcaatagttcttctgaaaaacaagaatttgggaagcaacttccttcgactttcgatgagagagttacaagtactgaaaaagatagctcttctgaaaagcaagaatttgggaagcaacttccttctactttcaatgagagagttaaaagtattgaaaaagatgctattgaaaatgaaaatcctttcttcaagactgttatacaaccatcaaataagtggcatgtggtaagaatctcgatgagctcaatgaccttattctatttaagatggaacatatagtcatttggcattgcatctaataatcttccttcttatcttggcagcgtgtaccattagagtttgctgacaaacacatcattaaagaaggtgatatggttctagcaattccaaatggtggacaatgg

SEQ ID NO: 10640 - DNA, 615 bp, Cannabis sativa
gtggagaagtatatgacagacatgaacaagcacagagtagttgtgacaggaaaaattgacccacaaaaagttttgaagaaattgagaaagaaaacagggaagaaagtagagattattcttaaaaacgacaataataaatcattattagattgtcgtttggagacaccaaaagaagaagagggtaataataataataataattcatattttaataattatcataataattgcaatgacactgaaatgctcatgatgatgttcaacgacgagaatccaaatgcttgttctctaatgtaattctaattaatacatgtatatatatgtctaactctgatgatatttgtaataatagtatattattcactgatcaattttgattatatatttggttatttttgtagtttatttatttatttagttcaagagcttgtagtaaaagaaatttgtctattaaaaaataacatgatgagttaaatgaatgtgtggtcacgaataaagggaaaaaaagtatgattttaaattttatttgttagatttacaattatgatgagtttcttccatttatcaaaaaaatataactaatattatccaccaaatggcagtaagattttgatg

SEQ ID NO: 10641 - DNA, 503 bp, Cannabis sativa
ctaaaatatatttatgtcagcactcagcactaattgtaacttaaagtttaaaaagaaaatattattaattagtaacttaaagtttaaaaagaaaatattattaactaaatgtaattcatattcattaaagcttattagttgagataagaattagattttagtgtaataattttatatcttatctcacatataataagatcctgcttaaattaagctacttcataagggcttttattatatatttttttattaccctattaaattaattttcattaatctatttatttttctcatgcttcacctggtgcagtgccacactattctctacaaattcacaccaaactcttctgcttcacctgcctctcacaattgaatttcaatatcttctctcaccgtaattctgatttctctctactcactttcagctggtgttttcattaccaactcaccatcactgaatgcttcttcatcttttctaaagtattgggtatcatttttttttt

SEQ ID NO: 10642 - DNA, 714 bp, Cannabis sativa
gtggtgtacggcggaggaggaatatcatcggtgagtggtggtaatgaattagaacaatctaacatatcatcaactccaagtgaattgattcttaataacccatgattaatatgatgattactattattattattaatcatcatcatcatattattatttgggttcattattttcttctgtatattattattattatttccaatattcttgtgaaaaacgcggcatacaacccattcatcctgaaaaattaaataaataaataaataattattagactttttctaaataataattaaaaaataaagaccaaacatttaaccaaacacataataaacttgtcaaaataaaaatcaaaactttattaccttagcagatttgggaagattgtagtaagagaattttccttcgagtctgtattcatgcataacccaattagatttctctccttttggggctcttcctttgtaaaacacaagagttttcttcataccaacaagatttgtcgaagacgaagaagatgatgatgatgaagaagataataaagagtttttaatatttcctttattataaatctctttatcttttccggtagctttccagtaaccggattcggttgcccgattagttctcattccggtcgggtatttccgatctctttgacagaagaagtaccattccttctcacccatttttgctctctctgtaaaaaaaaaa

SEQ ID NO: 10643 - DNA, 577 bp, Cannabis sativa
atatatatataacaggtaacagctatttatatatattttcccataaacaatatgcaaggtttttgtctatgtctgtatatttaccattgttagaggaaaaaacactcaaatatatggaaaggaaaaaaaaaaggaatataagtttacaaatttacataattacctttattactctattctatatcctttttggattgcaccagttgggggtaatttcagtacattagggcttatttttctttaaattacaaatgaaccattagggcatgactaggatatttttttggtaaatgaactctactttacctatataaagagtgcaaataggctagtaattttatcttcactactacaaatctcagatcttccaaagtatattgtctcagtatagaaaaaaatagctctaaattttttcttcctaattcttttcttttctcttttgggtattagtagttatatatatatatatatatatataaacaattcaatattttgagattcttctgtttgttttgtccccagggcttatatatatatactgatcagaaatggaagaaaaggggtcctttggaggtgt

SEQ ID NO: 10644 - DNA, 537 bp, Cannabis sativa
ttcaaatgagtattcaacacaccactattactcaataccatctagaaataatactttagagttagttagttaatatatgatggagataagtcttcaacttaaaaaattgaccgtaataattcctaaattcactatttttgtaactctgctcttttttcctatattttacaattattatctactttttcttgttgttatgttgttttcactagtagagattgtattacttttgttcatggtttggccaaggctaccgtacgcatagtttcattaggcatacctctaaaggggagggatttccccatttgaatgggggttgggtgacggttggggagagtgggtggctgggtgaggaagaccagagaagaaacatgaaaaaaaaaattaattatgatttgaactaatcttactacaattttaaaataaataaacgaatcagttgaattagggactaacagatttactaaaatcataattttgaagattgttatcgcaaatttttaaattgaagacttatatatatatatatatatatat

SEQ ID NO: 10645 - DNA, 641 bp, Cannabis sativa
tttattattcaataaatcaatgtacaactgagtatgacatatatgaatgaattgagaagtgacgggtttgttcaccccctcctctcgtacacttcttataaagaatttggcaattaattatggacacattttattttctaaaaaaattaaataaaaaaagtgttgaaatacacgcgcagtttttgtcgagtgaagtgaattagtgaaggcacggatcccgattggagctttatttgggtggaacgtagtggggtcgctcatcgctgctctgtggattcatgtcctatgtctcactcatttcgatcaacaaccaccccttctttttacttttactattgccttctgcttcttctttccaaaatagtacaaccatcccctatttttacggttttaccgcgtgaaataagaggggtcttctgttgggccaggcccagttgggccggactggacttaaatgggctgggctgggcttcaagattgaattatacgtggtttgtttgagtaaatgtttattgaaagagactccagatactccacgccattgctgtgttgtagttctatacggttttacttaacgtggaccaaataaagagtaaaagagaaagagagaaagaaatggttaattatggtttatattataa

SEQ ID NO: 10646 - DNA, 1372 bp, Cannabis sativa
agatacaatatttttaatttatagcatgtaattataataaagtgtacaaattattagaagcatatacatatcattataaaaataatgatattgatagatacaaattattagaagcatatacatatcattactcatttttaaaacaaaaagttatcgtgaaattaagatttaaatatatatatatatatttttatatatagatgtaaattttatttttaaatatatataattaatttatttatataaaatatctacttaatttttattttaaataaatataataatgctataaaattaataaagaatattctgttaaataattaagatattctgttaaagttaatgtaaaaaatcaagaaatcccattaaactaaaaattttgttacatacctacattttatatagaaaagatataaagaaatattttattttctctaatttgtggttttttttaatttttatatttaatcatgtaatgtagtttttatttaaaaatatctattaaaatttagtacacatactcatagtgtgcaattaaggtcctaatcaagactagaatattcaactttgattaattaattaggatccgtacctcaaccaaaacaaaagttattcaaaattttgttttttattctttattttaatattaatttatactttaatatatattcacttaatcaagttaaagagttaagataaacctaaaatattaaaataattaaattaaagaacataaagattgtgattacagccatgaaaaattaacttaaaaactctcacttacaaatggatatagtttttatatgtatttatatattaatgcaccaacatgatatatatagtaattaataatgtattactgttttcagcattgtttaggcatcagtgaagtcccacgattagttaacgatattctctaaggacccgatacttaattataccaatagcagtataatatcgagaaatatgctagacaccaataatattttttagcaattctctactatctttcacatggccaacattagttaagtgaattattaaagagaaatgttaaaaattattactaatgtgtagcactttttttttaatgtcatactgctattgatgtaattaaatatcgagtctcatataactttaaaatagattttaagaaatatcactaactaattataattatagggcatcacttataaaaagtgttaaaaaccactagtatccaataataatattctttattaaaatatgttagaatataattaagtaataattatgaatttgggtaaatattgaatgacaaacacattaatggcgccattagtaacatgattatatcaatataatctcttgacatgcatgcactaagaaaagt

SEQ ID NO: 10647 - DNA, 594 bp, Cannabis sativa
cccgagtattattactagtatactagagtacttacttggtttgtagagaagatgactggttgcatgagcttgatatcgaacgcggggacaacgatgttagttagggtttggtcgagagtaaggtctccgagcaagttgttgagaagagtgtgaagatatttgccgtcgtatttaggaccggtgagtgtgtccatgatggatgtaatgcttttgaaaaagctggcgttgtcattttgggggaagatcttaggtgtgtgttccatgtaaaagttgttgatgtctttggccgcgaacaaaggtcggttgtctttgttcggggccgcaagcatggtggtcactaggcctcccgtgcttgttcctgagattacatcgaaatagtcagcaagtcttgcttcttctccatccaattcttgtagtttttcctctaaaaacgccagaagtgttcccgggataactcctctaatccctcctccatcaatgctcaaaactgtaaacatctttcctgatgatgatgatgatccacctttcttcatcttattattaatattaccaaacttttcaataaccacttccatttcgagatcgaatatatat

SEQ ID NO: 10648 - DNA, 685 bp, Cannabis sativa
ctatagacaaagatgtcaaataggcatcgttggaaaaagaagatgtattccttttaatggtgtgtggcctgccatgttttgacataagaggcaagatatgatttagtagaaatagtcgttagagggcagccacgtcaccccttaaagggcttccgaaagcgcctcttggaattcctctccagggtgcatcctagtgttcatggggagggttttgcttattccgccttttggaaagttgtgagcattctggattcgggtgagtctcgtcttcaaaggtgaggcttctgggatttagatgggctcaaacctatctccgtttggatcgggccttcctacatggaagggctttgaccatactctcgaaataccacgtgtcacccttatgggacacatagataacaatttatattatcaaaattaaggttcaaatattttgttgcacgcgtaattaatattgttttatacgtatggtaaataattatttgaacttaattttcggtactgtaaactattcggttctaaaaaactataatgtatgcaatcatacataaaaattagattaaaaaggtttcttgaatgctatatatatatcaaaaaaaaaattagaaaggtgtactataaatttttccgttattttttaatttgagaagaacctatatgatgagctaagacatgcaattattaa

SEQ ID NO: 10649 - DNA, 784 bp, Cannabis sativa
acaaaacccactaaaagttgtctttttcaaattcagacctacagagtaatcataattcacaacaaaaaatctaaacaaaaattaataacattgttaaaaaagaccacacccaattatccctctcgggatcatgtaataactgagattacattgctaaataacagtgagctatctccctctaatgttaaaagtagtacaatacaattgaatcagaattaccactaagcatattctgtttaacataattgacaagtacccgtacccaagcctccaagtaaaaaaataaacaactttaatcatcaaattatacactttaatgtcccaccaaagctttatatataaataaaaatcgcaaatttaagttcatatttgttcaaagaggtgaaatgggagaaagacaaaccagcgcaggatttgatagtgtggatcttaagaagcagaacaaggacgctggccaaatggaacatgtcccctgctaatctgaatatattcattttattttttggttgaatggatgttaggaacaaccagaatatatttttctggaaaagtttttcagagggctttcccacctttcagatctttccgattaattgtttttcttccctttctttctacgtttcttcatttattttcaatttaatttctttttgatatccaatatttcacgtgtaaagcctggaagctgaaatcgacgaatgaaaggtaaaacgacattaaagcgaagaaaggactccgaactaaacgacaatacaaaacatttttaataggggtgttcatcaaa

SEQ ID NO: 10650 - DNA, 802 bp, Cannabis sativa
tcaaagtaagagacctgttgaagttgaaggttacaggtgaatcaactcaccctcaattctttctgttatccaactaacagtggcaagatccatctcaacacaaaaccagcaaatgcaataaacaataaaccagaaaattgaggatgaacaataagtagaacttgaattaaatgaacaaactaaattaaagatagcaaaaactcacagccactttattcattcatgatcatcacattacatggaggatagcttgatccaaaatgtacattgtgtaagagaaaattagagcaagaacattacaatcaatcctcacttgagtcccctccaactctctctaagaccctaaaatttctctatgcttattgtcctaaaacagagtacataaattgaaccaaaaaaccttgcttcattggatgctgaagcttgtcttgactggtttcagctccaaccaattttaactaacttttgccaactaggataggtaggtagctgatgtggcagagagagagtgagtcaaatccaccacatggtggtttctataagcctaaaataatatatatcacattacagcattgataaaaccaagcctttaacttcataattggcaccaaggatgaataaaaaaatctatggagatgatgctgaagcaaatgctgaagcctaaaataatatcaaagaacataaacaagattgaataaactaaacaaagatcattgggattttccaaagttcatttttttttctgtaactttccaaagatgattctttttctgaaattctgcaaagatgattctttttaaaa

SEQ ID NO: 10651 - DNA, 904 bp, Cannabis sativa
caaataaagaatacattggtgtattaaaaggtgcattgtagaagcacattaagatttttattacattacaaaatgtttaaaaattataggctaattacgatttttgtctcccaaattttcatatgtatcaaatcgcgttcttaaactttttcacattgttaaaaaaaatttcttaaattattgagattgttgaattcaagaatttttgttaaattttgctcaatttgactaatgtatcaagtattcatgtataaaattctacccccaactttcataagtattaaattatgttttttaaattttaatacgcacaaaatcgtaccccttccatgttaggatcatttagtcaaattgacatatgcctaaaattaatcatttagactcaaaatctctccaaaaagttgttctttgttggatgaagaactatttcaaagacttattcaatcttacactttatttccatagagaaaactataaacaatttacatgactggaataaattaagactaattaaagaggagttaacttctaaactatagcttatctttattgttgttgatactattctcattttttaatattttatataaatatttaactacattttaatgaaaaaaaattagaaatactaaactagaaggaaaatactaaaaaaaaattatcaaaggaataaaatcaaccatataaaactagaatatttcatagttcttttttcaggatttttgtagatttttttttgggtgttgccaatattatgatcaagatcaaatgctgatatatatttcttaaacagtactaaagatcaattattactaaaacaataatcaaaacaaaaatgccatatcttacctcaattgtatattatctatatggatatcaataatcaataacattaaaaataatt

SEQ ID NO: 10652 - DNA, 1154 bp, Cannabis sativa
tagtacctgtggcaactggaatcaccaagtcagctttatccggaacacgaccaacagtcacctcatccttaacaaaaatataaattagaacagattactttttaatgtttacttcatttcactttaatgctccaaattataacttcaaattaataatactcaccgaagcaatttcatatgcatttggcaaatcaaccttaaatcctatatgtcttgagtctccatcacctatcaacacagataacacttctctttattaacttatattctaataattaaaaaacaaattatgtgaaatgtaaaatagactaaccaataggttgaagaagccatctttcagaaacaatggtaggagaagtttgaggctcagaacttgcaaaaaccacccctatattcttcaactgtggttgtttgattttaaacccatgaatctgctttaaaatagtggtattagaagaaatgggaacaaaattagaaactaaaacagaggctctgggatggaataatttattaagaggagaagaagaagcctttggaagcttggctgctatttccattaatgttttctatggatgtaatctttcctttcctttttgttgaaaaataaatatgtaaaatgatatattgggacttgggagtaagggtaataatgatgagagtattggatgtcagtggataatagggccttttttttttgagtatatggcaaccatttaatgctgaaaacaaagttataaaataataataaaaaaaagctaaaaataaagtatttttttttcttattcttattaatatttggataacaaaaatcttgatgctgatcactctctatctctctatctctctatctgtacttcttaaagaggaggcaaaaacatatgaaaaatgctaacactacctaaattggtatgtacaattaattattaaatttaatataacaatttttatttattcagaagatatatatatatatataataagtaaatcttacataaattaatataataatattttttattcataatatattaactattacaaaatattattaattatttgtaaaacattacatcgtactgcaactacacactagattcacaattccacagttgaaatccacaataaagagagtcttatgtaattcctcagttcaa

SEQ ID NO: 10653 - DNA, 625 bp, Cannabis sativa
ccgtgcccttgtgagtattttaatctgttacattgttgctcatcaatgttcattattttatgtaacactctcttctttagggtcctggtgcaggaactagttctgcgatgccccttgctgttgccaatgcagacaggcagataggtatttgctagcacatattccctgagcttcattcgaatgtgttttttttctattgccccttttctctcacgtttaaggttttttgagttagtagctttcattttttttttttaaacatgcattttgtttgaagtgattagtttttaatcattttttttgttacatcattttgagctttttgacaaagctgtattgttatctttttatttgttatatacaatatgttgattcttttaaattcgctattattacttttaagctgtaaaatttagtgtttccattgatgtcctttctttctctttttcacaggtgaggaagaagggcgaccaactggtttgtcttccatggattcgtccagacggagaatatcaggaccaatcttgaattctggacccttctcaaagcagaagagtccaattgcacaagaatcaacatttagtaaagaagctttggtgtgtatcttacacttactatttctaat

SEQ ID NO: 10654 - DNA, 529 bp, Cannabis sativa
cacaagatgacttgtgttatctcaatttagctactaggtatttttacattgacatctaaaccccgacattgagaaagttagtttcaaccaccaatgaacaagctgcagtcttgaaacttggactaaactaacttaattatcaataaacaattaaacaactcgagacagccttaacagcttgtaatgtcacacattcttgaagagtagaactttgcgaactgaacacaaaactcagttgtagtaagagactttcatgtcttaagatatccgtgttgtttgcttcttttgtgtcttttgctgattgatctattatgttcggtcaataaaaatgcatttatttaacatgacttatatcaaatgatagaaaagaaaaaacaagagaggacttgatgatttagaagtgtttgtggagagataatatggcgtgagaggttatttatgtttctttgtcatgtattatttttccttttttgatattgaatcaatagatctgatatttaacaggttggaaccccaacttccatcgttg

SEQ ID NO: 10655 - DNA, 582 bp, Cannabis sativa
atattgcattactctgttatctgttagtggctgttagtggttctgttgtattactctgttagtggctgttaagtacatatacctgttagtatatgttttgtttagatggttaaggttattgattgatttttggtcccttatttaacggttctccttgatttgaggagttctgttacctcttctctttcttgcctatttaaaggcttatttccctgtaatttcaattaattcaattcaataaaatccctttaatgtttttccttttctttcgcaatatggtatcagagaaaggaagctatacttcctttcgatcttgattctttttccctcttcctcgccgtgcaatctgttcttctccggcgacgatccatgtccgcagttgaagaattcatttcttcaatcgacacccttcttttacagtcttctctctgaattcttgaaaagcatctctagcttcttttctgtcctgctatgtcgaacaatcatggaacagaccgtgacaacgaagctactacccaaaccaacaatggtgacaatcaaattcaagcaccaggtacggaactgttggaacttattttacca

SEQ ID NO: 10656 - DNA, 1106 bp, Cannabis sativa
tgatattgaaagtggtgtctcattttttgatggaaaaatattttaaatgaatctttattttaaaatatatattaaacctaaatactacatttaatgttgttaatatataatagcgggatctttcttctcattctgatatgatgttagctttcatagggaattaaggttgatacttgatacacatattaattgggaatactctatttgtagcaataaatattgaaagaaaagaaaattaataaaaacaatatatatggaaaatactaaggtagaatcaaaaacttatgtaaatacagatatttttttttcattatctgtcacttttatatttaatattaatatttaattaattttctttatattattttttttttaataatttcgttatatcaatataagaaaaattacttgtttttaaaaaaataaataaaaaaaaaagttgttagttaaatatataataaattacaatgcaatgttattattttgttttttttaaaaaaaaatcattttagagttattaggagtgcaccatatatttaattagtaaatttttttttcttttgagaaaaataaccttccttatattgatatcaatgaaataattaaaaaatataataatataaaaagaattaatttaatattattattaattatgagagtgagacataaatgaaaaaatatatatttatatgtatagacatttttttgtaactctacctaaatattttcctatgtattaatatataataaatacaccccacccgtgttttatttatacgttccactttgcatatttcatctacacaaatatttgaaaatataataatgaccgtcattaggatgaggtatatactgaccttgacaattttatgttgtgttcttattctaaatattgattttgcaaatggaagaagattaatacttagttcagaattaggcaagcgcaagggaaccatcaaaactattgaggtttgtatatatatccttgttattttgtatttaccctgcagtcattactatgttggaatgcttaaacactttatttttcttctatacttcaaataattaattatacaataatcgtattatttgaacttgaacatgtt

SEQ ID NO: 10657 - DNA, 625 bp, Cannabis sativa
cattttaagtcaacaaaatcaagagatcatcatcaaatcatacacaaactttttcatattaagaaattataattttttaatgtattaattatgtaacaataatactaataaagaacaaatatcataatattgtatatgagatatgagaatagaaataaatattaaccaatatagatatgaacacctatagcaataaaaaagataacaatgagtccaaaaaagacaatggagtgaacaaacatggaaaggccactagtttgcctgttgcagaaatcgactgctctactgttcccaggcacctgacacagcagtcccggcatgagcaacacgaacagcaccaccgcaattagaacaggcccccaatccgccatttcctttctttcttactaaattctcttgaatgttaatgctattatttattggtggataatgatgatgatgatgatgattatgagcacttgttcctaggtagcagagtccaacttaaaaggggtgttatttgttgataatgacattgacaaaacaaattaaagggccatgtgattgtgacttttaactctttctttgggaaactacggcatccacttcggacggcttcgtctcgcttctctcgtccttttcttta

SEQ ID NO: 10658 - DNA, 578 bp, Cannabis sativa
ccaaaaatcattttcaaatacttattcacttcaacccacaaatctgtattataataagtgtttacataagaacagttttaacatcataccttagttgcaagggaattaagcaaatcaacatttttttcattttcctcaacaccttctttctggatcttcatcttccttctccctcatctaaaccaatctgatctaatatccacatgtggaatatgagatatcttgtgccaatcctcccctacttccttctcgtatttctgctccagttttgggcacttcacaatagacaatttctttaggttggttagcctttgcatgctcataggaatacattccaaatccggacaagcatcaatctctaactctttaagagttgtaagatttccaagccaatcaggcaatgatgcaagttccgagaaataagatatgcccaaatattcaagtgaggagaggtgttgcaaggcctcaggcagaacaaccaacccagaagaatcacgtaatgaactactataaccaaaccaatcagaggaggttatggttttcccggacatattcagacgttggagagatatgagttg

SEQ ID NO: 10659 - DNA, 601 bp, Cannabis sativa
gcataaaacccaacatttatttagagcatccaatataagaaacacacaaatacctcctattgatgatccatccatgtgagccattttgattcgaagaatctccaacaagaatcaacacaaaatcaagattagagtgatattagagaggagaacaatgttgagctatcatctcttttctttttattaccattaaccataaaattttccacttaagacatatatatttatatacataacatatatgtcatacccttataaccctaaagggttatacactaattgtacttaagtgattttataatggtatattataatttaatgggtcaattatagtcttaaatgtactcttatgtgcctctaacataataaataattattaaccattccattatagttgttgacatatattagacacataattaataattatgtttatagtattaaagttatgattattttagtctacaatagtaattctaacataaattgctagtaaccacaaggtttattttggaatatgaataaataaaataaaattaaattgggatgatatttttgtaattaatgtttttatatgtactaggtgagtataccacgtgca

SEQ ID NO: 10660 - DNA, 1110 bp, Cannabis sativa
tacttaaatcatttaagctaggtagatcaatctatggaactaaattaaaacttagcaattaagagacttgacaatatataccacaaatgatatataattagccctagatcttaactccactatcaaagccaatagaagagtttgagcttctatatacttggttgaaagataattttcgtgacaagccgccatgatttccaatttatttatttattattattgcattaattatatttagttttaaagtaattttattaaaatattaacattctgaatacaatagagcttgtaaattagttcaaatattatactcaaaaatgcgaagaaaaaaaaatcaagaatatctagcaacaatatgtgctactcaatttgttaatcatctaacatttagtttcaagttatgttagggaggaactatatattcttcttctagtccaggtgtcccacaaaattcttgaagtataaaaattatcatagagcttattaataaaattagtgtaaataatatagaaaaaccataacctctaactaactattaatgaaggtgcaatttttttcacgttattactacgagaaaacaacatgaaaataatgttttttttgtcaaaaaaaaaaaatacaaacaaacaaaataaaattcgtaaaaatatataaaaaaaattccaattttatgtacatttttttttaataataataataatactctagtactatatatatgtaggattaaatttgcttataaaattaagatagagatgacctgttttgtctaaacttgtgattattagcagcccaaataggaatattgctccatatgaatacattttggccatggtaagagaatgagtgagatttctctatatgaatatgaaatatattatatattttgttactaactctaacttcaccaactctttttatagaacaaaattagccaagtagtacattgtagtttgcttgtatttgtagacttattgcactccattaaaattaataaacaataaaaaaatcattatcttcaatttcatcaatcgaatttagaaaaatggtaactccactaaaattgtggaaataaataaaagattgaaataaaagtaaactaatttctat

SEQ ID NO: 10661 - DNA, 872 bp, Cannabis sativa
  modified_base (687)..(697): a, c, t, g, unknown or other
aaaactaatccaatgagtatcacgtataaccataccataccacaaaaaaaaactcatcacatctaaaactgcatcaatgttaaccttgaagaagcccactaaaaggggccccaatgaggcacaatgagaagagaggaagaagacacgagcaaccttgttgccctcacagaaacaatctctcttggtttcaaaagagacttttgataatcatacaaaaaatcacgagccccaattgaccaccagctcaagagaaaaaaaatactatgcacctttttatttctcctataccaaccttcacataatgacaagagctagggaaattattctttaagtgtgtcttttgtctgtggcgtggggctagatgagtttttctattttctcagattgtcaaatggttgtacagggtttgaatgctaggaaggttcccatttggcaggctcacaagacttttgatgacacctttcaggtcttctctggtctccccaatgttcatatgtgttgaattcctcgtgcttataattgagctgcccatgacttagcaacccaagctgctagcctgctgcaaattccttttttaagtccttcactactgggaagtggcaccttttgttgccactataaactttggcttctaagcttttttgtctttcaataaaaggttggttttaattttattttttttttaannnnnnnnnnnagaagaagaagaagaagaagctaattccttgagaaattggcaacaatctataaattgatagttttagtgtaaagatgaataagtagttaaaaaaagctcctacggaagcttataaaccgtcattgtattattagtcatatttattatttaattgttatatttacactcaaaatat

SEQ ID NO: 10662 - DNA, 789 bp, Cannabis sativa
agtttttacaaggaagcttgcgatgcctacgttaaagccacagtccctcgggaagttgcccatactcctaaaggggctccccgaggtaagattgaacatttttatgggtggttcccaactgtccttaatgctgatcgaaatcgcctggttaaattttctgatagctaatataatttttacatttggaattgaattaatctcattgcacctaggtttaatagttggcatctcaattttcacgttcaagttacaagcagtagctcatattatggtattccgaaccaatatagtatcaatgcgtactgggctaattgggaactgcaagataacaagctcttgggaatatatggatactcgagttgatccccattcctctaactttttagatagtagtttatgtgagatttatcttgtttgttcttgagtatcttaccctttttttctcttctatcttgcttaagtctaactcacttgttctctttgtagaaatggtgaattttgctgaactcatgcgaagcccaactgctatcccagtgaaaaaagggaaaaaaaaatgtaataaaaaagacattcaagatacttggaatctcaagtggcccttaagaaataaaagtctgaccctcgagcaataagtgtatcaactgatcaaaatacctcgcctctaatagatcttccagcttctggcttgcaaagagtttttgatgtcgaggcggtcttaaaaaagcttgagaagagaaaagacatcatcacatccaaaaataccagtacctttgatgcttctaaaactaa

SEQ ID NO: 10663 - DNA, 554 bp, Cannabis sativa
aagtccttgatggttggtaggtagacattctctaggattttgagcttcaaaactctaagatttccttaaccataagcttacaagtactgctgcaaagggatggtcaatactcgtgtatgaaacttgcacatctttgtcatttttgaagtgatcattgatgttggagataaccatttgaccactattctttttgtcttcaccttagggcgagtactgaccattcttgagtgtcagtgctcatgtgatatacgagtattgcctcttggggagtatcaatactcatgtagcaccatttacctccatttcttgtgcaactttgactttatagtagtattcttagatacatgtttgttgtgtattatgacaagtagttaatatatttagcagttagtagttagtttagcttctggttttactaaactacccctgcacattagttaagttcttcattaaatagtcttaattaattcctattaaaactaaccattttgatgtaatcattcttacatgaaataaagaagtaatttaataaacattctctctctctctctctc

SEQ ID NO: 10664 - DNA, 861 bp, Cannabis sativa
tttaaatatcaaagaccaattccaataaaaatatgtatattgatgttttataaaataatatattttatagagaagacaggaaaaattgccatccattggcataagtatcaaactaatttttttatgtatatacttaaataaaaaaattatttatatatatcgagtccaataagcaccaaaatatatacttctattagagttgctttaatagcaaaaatattattacgaggtaccaaggtgcttaacactattatgaagtgtctctctataatttggttagcgattttctttaataaaaattgtaaaatatatttgagactcaatattaaattaaaccaataataatattacagagcaatagaatactaggcgctctataatgaaaactcttatataatattattttcaaaagtagtgtctagtgtgtttgtgttccctctttattgttattgctttaggaaacctattgttattaattgtatacgaccatgactagactaagggaatatgattgagactcatgcatatgtccacattattaatatttatttattttagtatttgtagctaccttctcagaatttagctttggtgagaatatttgacgcaaaaatatgtaataataatatatgaattaataaagtagtaattaggtatgggaaaatataaatttgatatatttattaactttcgttccatgttgcaaactattttattaacacttattacacaattttagtaatgataacttcgtatgatgcatggatttggcattaatttaaatttacacatatatatattgtacaagaaaatttaaaaacgttttaattaatttaatctcattatttcattgattgttat

SEQ ID NO: 10665 - DNA, 1213 bp, Cannabis sativa
  modified_base (748)..(753): a, c, t, g, unknown or other
tgaggtgaatgtgttaaaaattttatatatctcttatccttgtattcttaaaatcttgatttatctcatcttccattgaaaagggataagcttttgattgttagagattttatatatcaatggaagataatcaagatatatagcaactcaattgtaaaataatacaaggactaaaaagattgattacataaatgttacaatacgtacactattatatatgtatatgaaaggtggaagagaagaatatgtatagaagcactcactctcaatcttcagtgtagattaatggagatcattatgacttgaacaatgtattacacctttgtccaaaagcttacttcccttatctctaagcactaagggaactctctaagaaatagctttgggaattatcaagccttagggttttctagcaacgtgttttttttataaaaaactcggtctatgcaaatgagcaccaaatatctatcttatagtgtttaggtgatcacacttagtattcaaacacaccacacctcatttctctcataaatgagtattaattcattttgtaacaactatatcatcataattttgaattccttaaattaaattgtataacaacctttttattacactaattatgtatgatcaacacaagagttacaagtgataacaaattgtaactcatctccaagttacagcatgtaggttacaaagtgtaggttaaaccataaattactcgtttatttaccatacacttaatatnnnnnnttcacataataatatatttatcacattttaatctatacttattatattatcaaataatataatagaatgtgtgtgattcttttcgataataaggtccgaccgtttaccgagataggtcgagagataaggagcaaatagattgagaaagagtgagttgagataaagagagagagagtgattaattcaatttttctaattagccacaggtaagatgaggaaaatatgtaaataaaagaataattttgtataattagttgaaggtctaaattttaatatgggacatttttttaagcttacaaaataaaattttcctaaataaattaaccaaaattagcttttcttttttttagaaaaggaagtttaaccagtattttaaacatcataaattacggttcttaatacaacctttgataaatcaaatatgtcttatcaatattttgtatatattgattcactttta

SEQ ID NO: 10666 - DNA, 740 bp, Cannabis sativa
  modified_base (453)..(456): a, c, t, g, unknown or other
tcgagacttgtgtctcgatctaagctaagttgattaactatcattagggttttgttacctagcttgttggaccaaactaggcttatttgattttatttgtgtttttatttttgtcaattaaattgttaacgcatagcttgcattccaaaaataccataaatattttgtgtgtactaaattttttgtcttatagttagaagctgcagattctgacacaacgaaaagaaaacaaaaaaaaaaaacatgaaaaatgaaaaacaaaactaaaaattaaaaggattttttttttttacacttcaaaatattttttttttttgtatttttatggaattttacacaaaaattcctatagtaactaatggagcaacctaaatcgcaatcaaaatccgtataacaacttatattgaaataattggcaaaattaccgaaacaactcaaactgtaaatttaaannnnaaaataaaaaataatatatgaaataagtttccaaactaaaatctgaacaaaagaactcacccaaccaaacaaaaagatcttggacaattaaagaactttatgagagtgcaccgccaaaaaaataaaataaaataaattctcaacaaacaaaaagatattaattattttgttcttttgtcatttcccttatcaagttcctgtttttatttttcaaaaataatattatattatattacgttaaagaaaaaataagtcctacagaaagttatagtaattattggcta

SEQ ID NO: 10667 - DNA, 1443 bp, Cannabis sativa
actatgttttgaccataaataaaacttgataacttctccaatataaaataaagggattatttcgtaaatatacaaaaattctataattttaaatatttttacgatttttaaaattttaattataaaaaatatattattttgatgttatttttttattatatttttttttattatgtttatattatttttataaaataccgtaaaatattaaaaaaaaaaatgtaaattttatttgggtaaatttttcaaataaaacaccatactatatagtatatagtatacatgcacgtctatgaacaaaacataaatttatggaaataatcaataatcaatattcttaagtgacatttactaattaagtatatatattatgtgtcatagcttaaaaattgtcatggtgactttttcttacatggtaaaacatatatacataatattaattcaaaattttcttttacaagattttgtattctattgacatagattttttaattattagattaactgtcttaaaaaaaaatttatatttttatattatatatcgaaatacttgattcgaattaatatatttttttatggaaataataataaacaagtgttaattaaaaaagatacttgagtttgttgcaaattttttactgtactagtaaaaaaaatctgattatagctatattaaaagtaaaaaaaaatatgacaagttattttatatttgtatggatacatattttatgtattgatataataattctagcaaggaattaaatctaaattaaaaacctttctaacaactttttttttaccaaatggtgttataattttacaattctcttcagttattctcttagttcaattttcaaaaattgaaaagtataataaatgtgtataattatttttgtttattcattccatttatagttaactactataaataaaaaaaaaaattaaattctcttaaactctccatagtgtgtgggctcagactttgggaccaagttttgcaaagctaattaaggaattttattacttgtcttccatttcatcatttaataataaatttcttcaaaaaaaaaatcatttaataataaataattataataaattgctaaattagaaataaaagataataaacaaaaaagttatacatatgaaaatgtggaaataaaaaatttatatttttttcctgttaaaaattatgtacataaatgtgtaaatatgtactttcttgaagccacatggttaaatatttttttctaaataaaaaaggatagtattacacatctcttcctcactcttttggtcattttaacaatcttggggctcatatgtaagctataggtgtcttatttgagactgtcctaattagatcatcgataactatctcaagagcacaattggcacccctacatcatgctagcctttagaagaaccaatctttaatggcgt

SEQ ID NO: 10668 - DNA, 857 bp, Cannabis sativa
tccatacaaagccttgtgtaatttgcatactaggttgggctgtgttgtatcttcaaaaccaggtggttgtgtcatgtgtacctccttttttctaaaataccccattgagaaaaaagcgcattgtttacatccaattgtctaattttccaacctcttgtaatggccattgttaagacaactctgatggtaatcggtttgacaactgggctgaaagtctcagtgtaatcaaagccaagttgttggtgaaacccttttgcaacaagtcttgctttgtatctgttgagagagccatctggattttcttttattctgagaatccatttacatcctatgggttctcttcctttaggtagtggcactatagtgtaggtcttgttcctgattagagctaagatctcctcagacatggctttccccatttttcatattgcatggcagatttgaagctcttggaaatctctacagacaagtgtactttgggtttgtgaatccctgctttagccctggtggtcatggtatgtgtgtttgtggaaggaatggaagtggaaatagtgggtggaacaacagtggactcaacagatacatttgggacaggtgtagatgacatgttttgttgagtactggtgatattggttgggagagagggtgatgaaggaggttcagatggttgtgaaggtgtaatggttggactgacacacacaggattaaacagaggacactgagttggaatggagttgacaggtggggtggtttctggtgttggaatggtttcagaaatgtgtgtggtgtcatattgggcagctggtataagagcagaaggatgatactttattggtgtatcagtttggttttggaat

SEQ ID NO: 10669 - DNA, 1071 bp, Cannabis sativa
ataattttagttttggtaataataaaacaataaacgacaaataattggataaagagaaatggaagacagtaagaaagaaagtttcaataaaagaatgtcatgtaatgccaaaatgtttattgcatgcttatcacaaactccatcatatattttatgaccaaaacccaataattctacacaaatattaatattaatacatttcaatacttgagattcattcatataaaactcttgttgctctttgaaaatgaccctccactaccacgttccttacttcattatataatatttatgtgtgtatttatgtaattctctctctctctcttactttatatataatctaattggaatcttcaccagttgtaatctcatccttctttcttcagataagattggtggttgagtcattttcttttttttcgtttcctttggagattatattacaggtaataatcgaatcgaagctaatcaattttgtttaatataattccaataatctcacatggtttattttattttcccttgctgatccatttttagtttaattaatcatcagtttttagttctgggttcaggtaatttggcttaatcattttgattatatgcctcagatatcaattgggttatttctaattttgtatttttatttggttttgaggatctaatttgttgttgggtctcttttgtttttttcgatttgggaccagattattgtgtttttttaggatcttcgtttgtttttagattctgggttcgtatctgtaattctctcaacccaatcatctgacacggcaaccaagtttgactttttctattgctctgtcaaattaaaagtttgttcttttattttcttcacagacttaaatactcttatctgaaagaatgaattagataatggattaaattttgatgtaaaatgattgctttttttgattactttttgtagtgtttatggatctctaattgtttgattaacaatagattttaaagaccatatctagatgaagaaaccaagccaaaaaaagaaagaaataacaaataaaattgggggtgtttatacagtctaaagtg

SEQ ID NO: 10670 - DNA, 667 bp, Cannabis sativa
ttctcgcagactaaaaatgttatctaaatatctttttttctttaagaaaaaaccagatcatttttcattacaataaatcaatcaactgttaaatagaaatttcggataagcattcatccaaatacgttctcttatactagtaactgtagttacttgttgtcgtgtatgggcaactaaatatctttttagtactagcaactaagaaaatttaattgtgtaaatttgaattatgaacaaccctaaacaataattaaaatcacgtgtagggataataatacataataaaaatcacaatacttttctaagagagagagtagaagaattagtattctacaaataaaaattggaacccaaatgcactttagtatcatccgagaccatctctcattaaaaaaattgctatatatttagtacaaaaaaaagaatgtgatatatttgcattaattttttacattggacttcaaagcataattacataacttgatgtaaaatttaatatttttaagtaaaaacaaaaaaaaaataactttattattatgtaaggcaataaaaaaaaaatataataggtcatagttaatgctattatacatcaatatactaataaatattaaagttagcatgattagtatttttgctgctgaactttttacactaaattttgcttcca

SEQ ID NO: 10671 - DNA, 1196 bp, Cannabis sativa
tgatgccatggatttgatatggcccggaagcttccggatggatcgacaggtagcagcagagcccaagatagagcctctcaagctcgatttaaacctgcgactctgattatatagatatatatatttacatatatgtatgaacatcaaacttccactattctatgcaagtttgttcttctgtaagaggatcaaggtgatgtttttgttcatttaccaagtacaaaactaacgtatttaggtagagaagaacctagcctactgtgagaagaaggcagtagtaccaagatggaagttagttcttactctttgtgcctgtaatagtacctacaaactatagaaacacccaactgaaaaagtccaaaagcctattttcaatttctgttggtgtttagtttggatcccactgtgcatggaataataaatccagtgcaatattatatgcttatgacactgattttggagttattccattgaacccaattaatttatgtttttgtcttttgttaataattcaatcgtcagtaattgtactcttcatcatcataagatttgagactaaacctttctccttttaaaaattactttctataaaccttgagatagattcaagtcacaaggccaatcatagaaactattttttttttctttttcctgcataggaaacgaacgaaattgcatgtagttgtacagtggtacttcccattgaaaaaatgtagtcatttttggaccactttaatttttcaatgacaataaattccttcaccaaaggaagaaaaaatcaaagcattcttgattctttcttctttttttccgggaattatttcctgtctttcagcgtacatgaaactttctcccccacacttataattttaagaacataaatatacggtctgtagccataggagttataccaccatatcaccaacacggtcctaaaacgcaagatttctgaacttagttatccttcctatctatcctgccactgccagagttcaagaatgctcaagctgaagcaaaaataagactataaacaacaatatcacacatttatctaatgcttctaactctttcaccaaaaagagggtgtcatgcctcatgctttagctttcagttcctacaattatttctgaaagaagatcacctctgaactaattgagaaatatttctggggaaaaaaaacactatagatggaaact

SEQ ID NO: 10672 - DNA, 779 bp, Cannabis sativa
gagtcatttcgaatggctcctccaattttgtcattatgagagataatctcgttgaaatcacccatgactagccaaggaaaaagtggtgttgaatcttttaatttttgtaagagttcccaagtgaaagttctttgagtgacactaggagcaccgtagaaaccagagaagtgccaaaccgaatcatcaatagcagagatataggcatcaataaaatttattccatagtttataattgatacattaacatcagctttccaaagaagcatcaaaccaccccataatcccacccgagcacttcaatgccattttgaaaagtaaaagtattacgaaatttagatacagaccctacactaagcttagtttccataataaataatacaacaggtttcttattagtaatgagcagacagagatgacgaaatgctctcgggttgcccaaaccttgagcattccaactaatcagaatcatggcaattggcgaggctgagattcagcctgcgccaaagaagcaccagaaaagttttccacgagtgaactatcaggggtagaatccaatgtcaggtgatgttgaaaagtgttggttgaatcagccagtggggtacttcgagtacgacatcacttaagtacttgacgaacatttccatttgttgaaacaaattgtcttttagtgaacaaagatgacaatctattgctggatgttgcattcacttcagagataagcgctggtgcaagagtgtgaacaactgaagatgaggatgtcatcagagcagccgttgagg

SEQ ID NO: 10673 - DNA, 604 bp, Cannabis sativa
tatatatatatatatactatatttgtctgagacttccgttgtggattatgacagaagacaaagttttgggagttgagattgagagagaaaaatagggaaacacatcgagaaatttgtaagggaaatgagaagagagttttgaggctcgagtgtttgttcaagaactctattgcaaaatgaatcttggttcttacttgagattaattatcaaagtagtgtttagattgaagcttctacgatcattggttgttacagattcttcatcatagtggagccacggagaccaatttgatattggttgaacaagtataaatcaggtggtattctttacttgtttgaacatttgttttcattgttttgacactgtctttgttgttttattctatgatattgttccaacattgatcttgtttgtttcaacattcaagttgattgaatctgtttgtgatagtatcagattacaaacctttcttttagagagaaaaggattagaaatattagcaaaaacagtgcccaaagctatccataactctgactctcttaaggcctcaaaggagtttcctctctcaaataaccccagaaaattaacaaaaataaaatacat

SEQ ID NO: 10674 - DNA, 827 bp, Cannabis sativa
agagtttaagacgaggatgatacatcaaaaccttctgaccttctataaaattctttcgatgaatattcttgtcatgaaaagccttggtcttctctttgtcaattattgagctttcataagcttcattacgagtctcttctaacctatgcaattcaagcattcattgttgtccagccgcaatcatgtccatattacacgttttcacagcctaccaagccttgtgatctagtccagccagtagatgacatggcttcccatataccaaatgatatggtgtcataccaataggtgtcttgtacgcagtacgataagcccacaaagcatcatctagcctagtactctagtcttttcagttcggattcacagtcttctcaagaataagtttgacttccctgttagagacttttgcttgtccattggcttgagggtggtaagcaacagtcaccttatgagtcacactataacgtcaaaagagctcctctatgctcttattgcaaaaatgagtgtgtctattactaattatagcttttggtgtactaaatcaaacaaaaatgttagagcaaatgaaatccactaccattttagagttatctgttctgattgcaatcgcttctacccacttagacacatagtccactgccaagagactgtatttaaagccaaaagaagacgggaatggtccaataaaatctattccccaaacatcaaaaatctcaactattagaataggactttgaggcatttgatccttggctaaaatattcccaactcattgacaccaatcataggccttacaataagtataagaatctttgaagattgtaggc

SEQ ID NO: 10675 - DNA, 1081 bp, Cannabis sativa
gggtgtatttgatttttttaagatctagacatctcaatgcatatataaataataagattctatctctaaatctcaatattgaaatatttagattatttattttttacacacttgaatgtattaatttttggagttttttcatttttatacttcaaaatagtttttttcttacatctttacggaattatacgtaaaaattctcatagcaactaacagaataacttaaatcgcaaccaaagtctacatagcaacccccatagaaaccaccagaaaaactatcggagcaacccaaatcgtaaatttttttaaaaaaaagttaaaaattgatatatgggataattttcttaattttttagtgtttttaataatatgatattgacttaaattttatttattttttttaagaaaaatatttaatattcaaatacaaaatgtttttaattttaaaattttaaaatatctatatttttaattatttgacattttttttatgaatcaagaatttcattgcacaactaacaaattgtgattacaagctatggctctccaaggattaaaaaaaatctatacatgtatcattttttaaacatcttcttataattctctaaaccatgtcattttgaattatttgacattattaatattatatctcttataataaacattattaatttcttatatatatatggatatattagtggtatataaattaatatcaataatgaatttgtatcaatgatgctatatgcttcctcatcctttactgtcatattttctttacttttatctaacaacccttctttttgttgctcactctccacttaactatccataatcttttttgtgatttcatattcaataatttcatgatcatggattaaatttactttattcactacacgacattcattatttgttaagtaagaatttgatttagccaaattttaagttaataccacttcaaaaggatcttgatcttcaatattgtaggctcaatcgcttcatgtattcaactaatggcacttcatcattattctaacaactctcataactttttttatttgagttattgccactataa

SEQ ID NO: 10676 - DNA, 1220 bp, Cannabis sativa
cggaccttgtatgtccacgaagcgagcaggtaatgtctccagcctctatttacttctcaaatgaaccagctgtatccttatccactaatttagtcggggtaatgatgatattgtaccacgggctctagggacttcgatgagtcacatgtaacctccactcatcaatgtcaatgaattatcacacgacgaagatgaagcatcatggagtctgggctggttctcgtaaagaagatgaagtaaatcgttatccatccggtggttacatccccagtaatcaacataattcatctacaaaagcgggaagacagagaggtaagaactagacagagctatgattttcttttgcaacgacaaaacacgtctgatatgccgaccagatagattcaaacgaaaaaggataaaatttcattccaaaaataaaattcgcaaatcaaagatttaaagaaaggaaataaacttggaaaattcccaaaaacttcaaacaaaaaaattcgaatagtttctagcaaaaataatagaaaatcgatggaaatttgggaagctaaaagccataagcatattctccctagtttctcctactctcaatcgacaaagaacaacctcaaaaaatccatatttcacagaattaattaaaaaataatgcatgtatttaaagaatatagaagagaagaaagaggacttactgacggtttagaagctcttgaatgcacctggacgacttttgtaaatcaagctccaagcaagaattcttcaaagattttagagagaaaaaaaaaattgtgctatgattttctttgagaataaaattggttgaaagagtataaaataatttttaaacccttatatagggtggttagaatggcggttagtaatttggaatttaaattttggatttttcttaaaaaagtgtaatcatcacatattaaggagtacatacgtcaagcacgcatgtcgagtacatacgtcaagcacgcatgccaatcaaggttcatttttcaagacaagacattaaattcccaaatattgaaaaattaatcatattttcactcctttcattgcatcaaattggatcaagacatggcacgaagaacgaacatgtgtgacgtggcaattatcttgatgacatggaaatattttatgatctagacgggcaatgcattccatgatgtgtcgttcaagcttatttatcattcataaacaacttgtttgaagaataagat

SEQ ID NO: 10677 - DNA, 660 bp, Cannabis sativa
tatgtcaattagttcaaattttacaaataagttcaaattttattaattccaattcatatcatttcccatgtaaaaaaaatctatataatcagattgggagatacggttcataaataacttaacaatggtaaaaatattatagccgaaagcatatttataaaatcaattaagtatattattttttattattacaaagtaagataaaaatattattaacatattttttatataaataattgaaaatatttataaacggcacgcgtcgcgcggtttgtaacctaattttactaatataatcactaaagctcaaattttattgattccaatttagatcatttcccatgtaaaaaaaaaatcacatcattgattcatttcagtggttataaaattataatatatggttataaattcttaagttttaatttataaatttgtaattataattacagttacaagaaaactttattattacaaatttataatgttctttaaatgacagttcagttctttagttttttttatatataattttaatctttttccaaaatctccctataatttatgcacatatattttttttttttccaaatatacattgtatttaaatggttaaatttaaaatatcctgtccaaaaataaaagaattaaatacccttgaca

SEQ ID NO: 10678 - DNA, 560 bp, Cannabis sativa
tcaattccaattacattggaagctttatacggtctatggcaccccatattcagaagtgaaagagaccttttggttgtgtttggaagaagaaatttctcagtgtcaattgccttgggtaatcctaggcgatctgaattgcattttcagtcaggaagagaaggtgggaggacgtaaagtctcctataatgacacaagatggcttcggaatttcatggaaaatacaggtagtgtggatcttcagtttataggcaataaattcacatggcaaaacaaccgcttctctggtggactcataagagagcgtcttgatagagccatatgctctcctgagtggttgatgaacttcgcttcggcaggagttaggaacttacctatttcaatctcggatcatgcgcccataattcttgactcacacttgtttgctgttaaaggttttattcccttccgtttctttgaagcttggtcttgggaagcttcttgcaagaaggaaattgaaacggtctgggtgtcctctggggtcaatgctactgcctcctttatccgaaacattcatcactcga

SEQ ID NO: 10679 - DNA, 529 bp, Cannabis sativa
atcaagaacggataaaggaggattagctgctagtacatagcatactaaggatgatttccagaatgaaacctcatcctcaatatcttcatgtgtaattttgaccttggttttactctttgatccatcaaaggagggggcctagattctttatgatactccctgttcgtaggactgggatgtttgtcgaatttcctgctgcaacttccttcaaacacctttgatttgccttaatgaaagacgaaaagtcatctcgaatctcctcctggcgcagtatctcaaacagtgaggatctcagagataatggagctttgaagacgtcctgcaattgaggatcaataacagggctcttactttccaattccgcctccacatttgagaattcaagaggttcgctcaattattcttccagtacatttagagatcccttcgatgctaaaatcgaaccttgtttcttcttccttgcagttgctttcggtctcccctgccctcttcctcgagttttggccatggcttcagctcgcagagctgc

SEQ ID NO: 10680 - DNA, 990 bp, Cannabis sativa
gaagacgtaggttttgaaaatactaaagacgtaaggagagcctatgtcttcaattcttatttaataaacgaagatataggtggagtataattttaaatttccgtggcggaagaccctacgtcttcggtttttatataataatcgaagagaaaaagggtctgtctctttcaattattacataataaccgaagaggtaggacccttttctcttcggttattatgtaatcaccgaagacgtaaattttttttatttgtttaaatctaaatatatattaattttgttagtttaaattatatattaattcttttaaaacaattataaattaattataataataaacatttactttgaaataaagatcaatttaattatataacaaaattaaaagtacaaaatacattttaattatattataacaaagttaaagtatattttacaaaatatgttaagtccttaatattaagaaacgtacacaaaataagttttgcctaaaatttatagtctaaaactagttagtacaaatatcatattaaattcgataaccactaatattgctatggtagcaacatcgtctccacattgtattatttcttcttatcacgttgtaaaattaaatttaaattagttatatattacttaattataaggttagtatattagttacatgtataacataaataaattaattataacttaattaccttttcatttataaatttataagaacgaataaatgtagagctttcacaatgtcattgatgtaccttaatacataaaaatgacattcatatcccaatgtttattttgaacaggttgcaggagttactcctggaaacgttcctagtaactcgttggagcctcaaagcagttcatatgccttaattaaactcaataatatatataagattcaattagctatagttggtataaatttaataaaaattataagtttaaaataaaaattgagaagtaccttttggagtatgtag

SEQ ID NO: 10681 - DNA, 590 bp, Cannabis sativa
aggcaaatagtaacgtaacttttgttaaaacaggaacagtttcttgaaaatttactttggatatgaaattttgagtatttagaaatatttttgttattcttaataatatagcttggtaataaattgtttcttttaaagcacgctccattcattctgctcgtaataattcaataagttctccaagtaaaaaaatattagacattttattttttgaaaccaccacttttaatattatttgacggacaataatttttatgtatctaatatgaatttgcacattcaataatttttgaacttggtaatattatttgttttgttaagcgatcattgaataaagtagttcatagttttgttagagtttctttacactatcttgattgtaattttaggttggagtctattccaactgatttgttactattgttggtgacgaaatttgatggttaataaagtttaattttccattaaaaaaaaataataacaagtgttttaagtaaaattaaaagaatagaaagataattatttattaaaattacaatattattcttttcaaatatagaacgactagttttcagaaaaaaaaaaaaaaa

SEQ ID NO: 10682 - DNA, 879 bp, Cannabis sativa
actaacaaacccagcttgcttcgagtacatcaattgcttgttttcattgtgtttattctggctgttaatccctctcacattccagcataaaaacctatccatttgaggaagagggatctccctcccctcttgtgttgtgcccagtttcctgttctgctatgccaccatcaatctcagtgcctactacaacatcaacatcatcattaagagactcaaacatattctttatcattgtcccttctgcctccttcattgacactacttttttccctttgctgaccttctgaaacccttcatcatcaagttgcttctctacattcattgctggtttcttaggcacccacacttttttccctacttctttcttctcctcttttttcctgcaatctgaagttctatgcccaattccagagcagttgtaacaaactaaaggcaaccattcatatttaacatctaaatccacttcatgatcaaactcatcaatgaaactatttttttcaggaaattcttgtgctagacttacttgaattaggatcctgggatattgtagcctatccctattcttagtaagattgtcgatttgtaggggaactcccaactggcctgcaattttcaacagggaagcttctccccagtatttgatgttcaggccctttaactgaacccaagtaggcacatttgtaacttcttctttagtgaaatcgtcgataggattccagggtttcatcaccattggcttacgatcaaaaaacacatacccctgctgcaacactttatctctttgttctagactttggaatctgataatgaatattcctttagctagcaatccaaccttaacgacctcatccttccagattcttctcacaaacccttcca

SEQ ID NO: 10683 - DNA, 832 bp, Cannabis sativa
cgatcttctacaatcttcggtggcggaatgaattgcagtttccagtacattatactgaaactgattctcttgtagtagcaaaagaattgcaaacttctagtattagatattaagattagttggttagtttattttgttaattccgttattttgtatgttggttatgttcacataacaacctcagctatatatagctattcctttgtactgcttcaattcattcaatcaataaagactattttacattttctttctctgttttctctctgtctttagtctttacccactattatggtatcagatgctataatccaagaaccctaaacaacctcaacttcttctgccttcaacaatggtgcgcacgagagcacattcgtctgctacttccactgatcatcccgtggacgatgctcttccgaatcatgttcctccagcatcccagaattctgcagatcttccacctcatgttccaattccagctgcatccactcatcatgtcaatggagatcgaccggcctatgaggatgtatgcagtccttactacctcagcaccgcagatcatcccggaattgctcttgtcactccggtcttggcagataggaatttccagccatggactcaggagtttaaactctcaataggggctcgcaataaaaccccttttcttgatggtacgcttcccaaaccttctcctactgatgttttatatggttcttggattcgttgtaatcaaatggtccaatcttggatcctacactcggtttcacccgagataaaaagcagtatcatgtaccttgatactactgcagaaatgtggactgaacttaacaat

SEQ ID NO: 10684 - DNA, 705 bp, Cannabis sativa
gggcataaaacccaacagttgtgtcctcctcagttcatagatggtccaaccgaaaataacctagatgctccacaataggttaatcccctctatattgtctggattcgtactgatcaggatattttaagttaattgctaaactcaatctcagaggccatgttaggccatgttcttcgatgtcgtgtgtctgcagaactatggctgcttcttgagaacctcttcaccacactgtctcgagctcgcatcttccagcttcaatttcaacttaagtctctgaagaaaggatcaatgtcaatccatgactatgttctaaaaatgaaatccattgctgacggtctcaccactactggacaaccattcaatgatgacgatctcatcctctatatactcagcggactaggtctagagtatgactcggttgttgttaatcgcacctatagaggagatcgtatcacactttcaaatgttcaattcctcttgcaaagccaagaaatgaggattgatcagctcaatactactattgctgatcttgtagcaccatctgccaactatgccacccgaggtagaagaaattttcctccctcaaaccctagcagatacaccaaccaccgcagccatggacgtgggtggctgtggtggaaaccaaaatcgtgttgtctgccaattgtgtaacaagccaggacaccctgcatcaaaatgttatca

SEQ ID NO: 10685 - DNA, 808 bp, Cannabis sativa
ggacgaaaacaacttgagagaaaaaatcctagtttgtatcagaataatctgaataagattgactcgtcgactattcagaattttaactaaaaccacgtaaaaactttgtgttgttcttatttacaattaatttctgtgctaatcctctcacgaaataggcttttttatcgctaacgagaatctacgttaacagtttggtgctttcattgagagccttcgtgaaaaaagctcagaaaaatcactcctaaaaaaaaaaacttttatccttgctaacaacagggaaaatgtcaataatcaacctgaagaaattactcactgtgctagaaaagagtcggcaggttcatggaggcctcccaactcaaggaaaactcgatctacacgatcgacacattcatggagaaacaaacctaaaggtggccaaaacctagaaactatgaacaaagtacccaacaatgacgatggcggcacccttagaagcaggaattattatgaccccaacaagtatgttccgttggttgagttggaaaattgccaactcaagcaatagttggcggaggaaaaccaacaaaatgctgagttggaataggaggcagccgtagacagggcaacccaggagaatgctgctcaaaaccaacctgatcctgaagtaaggaggcactactacaatttagccttttagtgacactctttattgacccgcacaaaagtgcatgtcactaaagagttaggagtcatatttagtgacacgcataatgagattctaaatttttggtattagtctctcataatgtgtgtcactaaaaatatg

SEQ ID NO: 10686 - DNA, 771 bp, Cannabis sativa
ttatgccaatttccactaatatttaagtattaattaatctgtaaaataaaagtgaataaattagtggtttgagctaaaacagattagattaaggtcaactcagcccatgtcccaattttttttttctttcaaaaagatcacattaactatgagtttttatacaaatattaatttttttttttcaaactttatatttatattttgataatttcgttcaaaaatagaatattcattcgagcatcattgtaaaagagacattcctttataataatctaatactttaaaatataaccaaacaaatgaatagaaatgaaaattttgtttcaattttattttattttattactttcaaccaactgccacttaaaaaaaaataggtaaattaaaaatatttctgaattaagttaatattgactttatataaatttaactatatatgcacctcccctttacactagtagatgtaaatcctagttgcaggttgtaattcactccagctgacttgacacttgacagtcttcttatctttacctctcccttgtatgtgaccatgtgaatatagtggagcctgttacaaagttgagacttggttactttagtttgagtttcttaactttgtgtgagaaagcttgaaattaagctcagtgtgtcttgttttttttgagtttctcctttttttttattgttagtttgtatttgaatttattgcttgcctgacttgaatcaaagccttcaagagcactgcttaagggtaacgaataacgataagtt

SEQ ID NO: 10687 - DNA, 512 bp, Cannabis sativa
gaaaaaaaagaggaactgccatgaatgtaacaagtgacaacacattaataatttttttttattttttaattgaaaaaatataaaagatgacataaaataatacaagtgtcaatatgaggataaatagaagtttttgaaaaaagacactataaaagtgtacggtaaaactataaaaaataccatatagcagtatgaaagtaacaaaatgtaaaaaaaattaatataccaggtaaaaaccccaaaaattaattacacaataggaaacaatatctttgtattaacactcaaaaataaaaaataaaaaatctctttgcattaaattattaattgtgtaagtatttgtgtaacatatgatgcgcttttaatgatttagccattaaaaagatttagaaaaagtttgagcttacgtaattaaccatataaaattcaagttgcatattagacaataaattagggtaatgagaaacgaatagaataaatttgaatacttcccattgccatagttaatatat

SEQ ID NO: 10688 - DNA, 548 bp, Cannabis sativa
gtattatgccatcattattattaattaattgatgatatatatgctttcatcagaagagtctatagtataatccacaatagtttagtaacaagttatattatgtatcttttgcttcataatgataccaaaagatacatgatttgctatcttttgaattattaattgtatatatataaatatatatattatacccatcttgataaatagttagataacattaattttcataaatctccatgtatgaagatgtgctggacactaccaaagctatatttgtatacaaatatgccatttttctcaatttgcccctaattcaagttacaaattacaatacaatcactggtttattttagtcacaatataaaccttttcttttcttttgataattatatatataagaaaaaatatattgtaaacttaaaaaactttagcacagtatacatcaagcttagaaattgggcgaagtagttgactgttgaagaaattgggccttaaatcgtttatagtggggaaagcccaagaaagcccaaaactctggccagtctcac

SEQ ID NO: 10689 - DNA, 717 bp, Cannabis sativa
aaaagtaagtacgaaccatgatcataaagattagaaaagatacaagtggacgaatcctttcaaccaattgataatgaagttaatttagaagagtacacttcctagcacatgaaacaaaacaaaattagttttagtttgatataatggaagatatttattattgatgagttgggtattttatgataagggtatagaagtcatgcatatatatataaaaataaaaatcgatccaaagcttaatcatactcagaaaggtccaacttaaagttaaaaggctaaatagggtatagttgattgaagctgtacaatgataatatttatatatttctatattgatatatatcacaatcacaaatcatcacatacattcaaatacatgtaaagtgtgttactttggcaaagtgacaaaatgagcatgtgggtggcattcaggccctcctatatactatattcctatatctataataactataatgttatctttttatttatattaaagaaagctatactaagtccaaaaattagaatcatggtatattggatactattttgaaaagatgcttgcttatagcaatttgatataaacatatatagtgagagttcaaaatataaataatgactagccgcggttgatgtaatccaatctactatacttgagttgattacactacaacattttctgttattagggcagaccctactaaaattaccggcaaa

SEQ ID NO: 10690 - DNA, 1339 bp, Cannabis sativa
tatatatataatgaaaattaaaaagatgcgaaacaacttacttccatggaacatctccaagtagcatccaatcaccatctttgtcttgataagtaggagcatattcagatccactgtaaccttccgtctccgagtaattaccgatacaaactcctccgaacatattctccaaagccttcaccaactcaccgtagcttttatacaccttcacgtcaatcttcctcaagtaaggagctccatcaacgctcactttcacgtaacttcctcctcctcctcccgaattcgaaacttccactaccgacaccgaagaagacgatgaatactccgtcgaactgctcgtttttgctttcttcatcgccgtaataacagtttgatgatgagtattgttcttcctgtaagatcgaatcggcggccatccaacaaccgcttgctgttgcgtactactcttgttatttccggtaataagaacagatctactacacttggtggatttagatctagaatcctcagctaattcctccgccgcagctctcttgttagaacctggcaaacccaaactgaggttaagagagtcatcgtcgtgatcttgaatagtcgatttgacagtcatgatttccatggaaaatattttgagttacagagagatgtgagaaaattaattgattagagagaagagaaagtggtttgtgtttggtttgagagaaaatggtaatgggaaacaagcttttatacataatcaatcaaagggatggatctttgattgagatttgtgaggaatgatagggtgtgtcacacgtcttaactccgaagacttaattggacggctgggattttggtttgggaaaaggagaggcgttggattggattttgattagataagatgatgtgggtgattttgattggtggagcatcagcatgtgaatgagtgagagtgggacccaatctctgtcttgctttgtcgagtgattgccttgtcggcaaacgacagtgtatttaattaaataatattctcattataatcttgtctgttgcttaattagtaattacatatatagttgaccatatagtactattgtctattgcattaagaaactaagtattaacttaataaccgtcttaactatatcttatctttactgttattattattattatattctacttattaattatataagtatagtagctaaggagggactagctagctaggctaatatatttatttattgttgaataaaagtgaaaaaataggacactttttagttagattaatttgtcgacaaaacatataatatatatatatgattttaatatgtgtaacatgattatatgtgcatgg

SEQ ID NO: 10691 - DNA, 697 bp, Cannabis sativa
atatcaatttaatttgttgtgtttgaaataatttcaggtgcatcatgacatgacagctccattatctcattattacttatttactggccacaactcctacttaactggaaatcaactaagcagcgacagtagtactcaacccatcatcaacgcactgcatcgaggagttagagttatcgaattggatctctggcctaactctgcaaaaaacgatgtcgaagttcgtcatggagggtatatacatatttacatcatttattatatataattacaatttacttaattaattgggatattaattaatttgtttttggttaaaaatgaattaggactctgactagtccagtggcattgagggattgtctgcgtgctattaaggacaatgccttcaaagtatctgagtttcctgttattataacgtttgaggatcacctccctccacatcttcaagccaaagtggcagaggtgattgtataaatatatatacatacatatatacatatactaatactatggtgctgagctagctagtgatattttttatgatgtggtcaattatatattttaatttatatgtacgtcaataaattaagatcgtaacaataatttatataaacaagtcgtatgcaaaattaagtaataaggtcatataacaataatttgttcctatatatgtgtgaattgaaatatgaactgc

SEQ ID NO: 10692 - DNA, 1236 bp, Cannabis sativa
attattaattacagaaaaatgaaaataagtgaaagaagagaatcactgtgaatttagagtgatagtcattttattatatgttcagaatcctgtggaagaaaaacaagattgattcttttttctgttttgtggtttacgtgattagaaaaggcttctaaagcctaaacgctacaaagcttaagcaggcaaagatttcaaccatatttttgttgtgcttctgtagatgtggctgaaaaaggcacccagtcattgcaaaatagtatgatgaaccagttggctcatcttgatatcaataccttgattggaagttgcatgcctcttgcggctatgcgcattggaactattatccacaacattgaggtgaaccctggtcaaggtggcaaacttgttcgagctgcaggaacctgtgccaagattctcaaagaaccttcatcgagtaaatgtctcattaggctcccttctggttctgaaaagtgggtggattctcggtgcagggcctccattggtgtcgtgtcaaatcctagccacggggctaagaagctccgaaaggctgggcaaagcaggtggttgggtcgtaggccaactgttcgaggagtggcaatgaacccagtcgatcatcctcacggtggaggtgagggtcgaagtaagagtagtggagcctggggaaggacttctcagacaccttggggaaagccgtgtaagtctggatacaaaactggacctctcaagcgcaggaagtagagcttgattgttttagtggtggatgaagatgaatttgagaataatatgatgttttattaattcatagtgagtagtttttgtgttgaaccagctgtgaattagttggacactggacagaaagacagtcttataataataggattgtttttgcgtgtagcaaggcccaaagtttactgatctggaagagtttttcgtgagttgaaatttaccattgtagagtaaagtgtagacttttcttccttttttatttatttaatggattttataatgtataggcacatgcgtgcctactgaaggcttgagttagaatttattgtatgctgtgaaattttctcagtaataaagaatgtctcttccttttttattttggttttaccatatgagatatataagtaaatgtttattggtcttttgagggtgaaagtgggatttttgtgaaactccaacatgtaagggatatgattatatatagtgttggaagagtaattaggccta

SEQ ID NO: 10693 - DNA, 1240 bp, Cannabis sativa
gtggtgcgcgacctaggcaactatgtgggtacattcatcaaaactgatccgaataacttcatcggagtttggcgcgactatcttcgggttcgtgtcaagatcaatatagagtgcccgttaaaacgcaggaagaaggttgagaaacaaggaggggttcactgttatgcgaactttaaatatgagggcctatccactttctgttttatttgtggcatccttgggcattcggagagattttgtgaacagcttttccatactccactcgatcagatacagaagccatacacattggaattgaaagctactcctcgacggaagaactacgcaatcggggagagatggttaaggtccggagctgcttctagagccggcggaatggcgttttccgatcatgctacgactggcgagagatctgcgcccatcaatggtaatcagaccaacaacaatcatgggaggcaatcacggctgaatcacatcccacctaataatctgggatcatcatccaatcaatcaactaatgaaaggggaaattcaaataagatggctatttccttgcctcaattgaaggaaggtggtgacataattgatcaatcttcaatgacagataccatcgtgggagatactgctttgaagccaaatatgataaataaggaaactagtattcttattttggatactaagaggagaaggactgatattgttaatgggcttgggctgaacaacaacctagacaataacacacatgtggaagttactaatgatgagcttggtgatgttgggccgatccagggtcaaggtgaggatatggataccgatcttttgaaaaataccacaaaaaacttgtttggggcgggttctgtttcacaggcccgccggggattatgaatgtgttgagttggaattgccgtgggcttgggaaccaacgggctattcagttccttaaagagatagtctctcaaaagaatcccaatttcatttttttgtgtgaaacaaaatgtgataaaaaaagaattgaaagtatgggccgaatgctaaagtttgaaggtgtttttggtgttgaggcccaagggagttcgggtgggctggctctcctttggaaaaataaggatgatgggcgtgtgttgggttattcgaacagccatattgattttcttgttgaatcatctgagaaaggtgcgtggaagcttactggtttctatggggaacctgagaggaacaatagacaccgatcatggactct

SEQ ID NO: 10694 - DNA, 663 bp, Cannabis sativa
caaaacgaccccttggtcgtggaagtgtaaattacaaacaagttggtggaatggactatgtgttgggttttgtgccctaaataaaactcattcaatataatcagatttactaattaatataagatctgttatccctgaaatttggctaccattttagtggggaacatgtgtcaagataaatggaatatgcatcgatggaatcactttcaataactcattaattgcgtaagtgacagagagtacttgcaattcactgactataaggtcttatgcgaggaaattaaagatataaaaactattgttttgttttgaggcagaaattgagacatcaaatttgtttcacttaggaagacaaaagcgacgcatatcgattgtgaaagcacttagcgaataatgtacaaagtgtaacactcgagtggactcgagacctaataagcgaggcgcatatctcgctataggagggcgcattcttgttactttcatcagttaactgcagacatctttcagtaagacttataatcatgacgagtcaaatgttgacatttaaatgactaccaagaaactctctgttaataagaactacgattgtcacaatgaagcgttaagctttcaaacaaagaagcaacgaggagtacattattgacctcggaaagataggggaaa

SEQ ID NO: 10695 - DNA, 619 bp, Cannabis sativa
aagacaaccttcttgttcttcaatttaatgatatttcatgtacaatagacaacataataatgaatgaattatcctttaagagacaatattagattaaactaagttcaaatataaatctaactcccacctatctacaagttacagttaaaaaaagagagtgaaaattcactttttaacatctgatatttctttggggggtttagtattatcagaatctattttgcagtctttttgtaattctaacagccaagaatctacctgaaaaatcaacccaataaaaaaccaagttaagaattttcattaacaataaataaaaattacgacataactactcaatgttttagatttgtaaccgacaggaacccatttcaatgtttttagcgagtttcatcctaacaagttctgtttgtgacatgagtttgcatgcacacatgtaagtacacgattaatactcgaaattgaatgaaattaaacagaattacacttttagtaatatttggtagttttgccactaaaaaaattaataaggtcctgctggttacaaattcaaaacattaagtagttatgccgcaaatactctctacggaaaaaaacccaagtaagacatgactgtaatgaa

SEQ ID NO: 10696 - DNA, 804 bp, Cannabis sativa
attttataatatggaaaataaaatgtaaaataatcgaatgcataaaataaaataggcaccatataataaaacaaattgatttataattagttatacactcaaaaaaaccctataaattcatatatatatatgggtgattaataattacatgttatataactttatataagagattaataacagttacaaattctatttttaaactcaaaataattataattaattatatacatttaaattaaattattttttaattaaaatattaataagacattttttataattaatatttataaatatcttttattttttatttataatgaaataaataaaatcagactagtatcaattacaaataaaataaatacacaattatcgtaattacagatttaatataatcattaaaacccgtatatattatatattatgctagttttgtggtccttttatataattgatgaaatttattaatagttgacagttgctagctatatatagaaagataacaaaaagctttaaaagtaataatccaaacatgtcattatatgtagtaaaattatatgaggatccatttgggaatctgaagatgcgtataaacaataatttggtgactttttctgtcaaaataggtggtatagtactgtataagataatgtgatcttttaactgtagaagcattaaacaaaccaaatttcatctagaaataactattacaaaaacttttcttaaatgtaatattgttttgaccatttttggtaaaacctccaaatcaagtctttttcaagccggtttgttcatttttat

SEQ ID NO: 10697 - DNA, 690 bp, Cannabis sativa
ataattttaaattattttacacacaacaatttatacatgttttttgtattcaacagtaatataactaaatatttttatatataactaaacactgttttcagatagggtaatttctaatttttacggagcgtaagataaaatttaaaaaaatgggtcttgagaaataaaatgaaattctaatttttttttttttttaaattattttcttttttcagaagccttatgagctaatgttaaaaaaattaatagaaaaagagttgatcagattcaaggaggcctcttgggcaatgactccgaccctgtcctagctaccctaaaatcagtcttgtttccgggcaatcatatttttcatttcaatatttaaattaatcaaattattttaaaattcttataccaaccaaagtataatattaaggtgttgtgaaaagtatgtcaaattagttgatatttcttagttattttataaatttaattggatataaaagttttatttatttgtttatttttagaaaaaaaggtttaagaaactccaccttggatgagcaaaaaactcaacaacaagaggtcaccaaaccttactaacagtagccgataaagcatacttagctaaggtgtgagttgccaaattaactgttcgacaatacaacatgttcgtctttttaaaccgtttgtaagaaccaaaattattaa

SEQ ID NO: 10698 - DNA, 521 bp, Cannabis sativa
tggccagaaatggaaggatctgcagaaaaaaagtgggcataattccacatgcacattgtgaatattttcattaagaacatgacgcaattgtcgaactacagtaaaattgcatataaaccagaaaataggactgagcattcctcggtgcattagcataatcatttcaaaagatagaatgaaaaaattcaaaccaatttaaatatctctaataagtattcaaaaaaccaacatgggaatggaggcacgaggcaggtaagcaagcatattctcctttctctcattcagaaagaggataacaatataaaaacattggacaatatcaaacatgctatgagatgacacaataaacaataaaagtaaccctgtacaataatgactatcaaagggtacttaccttatagttaagtgctatatatttctttaattagcactatttataaaaataaaatgtgaatcttatagatctattgactaatgtggggtccaaatgttacccttcaacttccatttatttgtttatt

SEQ ID NO: 10699 - DNA, 511 bp, Cannabis sativa
aatggctcatttctagaggccaaacctagtggtttttgctcttatgtgtggcaaagtattctttggggtaaagagcttattagacaaggcctctgttggcgggtgaagttgggcaggatggtgagaattaatgaagatatgtggctgcctcagcctacaacttttgctcttcatactccagcaatagttgctcctagagcgacagtgaattatcttaaaacaagcaatgtgacttggaatgtatagaagatcgacagtatttttcatgaagatgatgttcctattgttcttggcctcgccccttgtacatcaaatgcggatgatgaccttgtttgggactatagtcccaatggcatttactcggttagcagtggctacaaaattgccgatatgaccccgtctaagactgaaagctcctcttgccaaaacatggagaagtggtggaataagttatatggcatttggaggtccctccgaagatccgtaatttcatttagcgcgtttgtaaggg

SEQ ID NO: 10700 - DNA, 516 bp, Cannabis sativa
ttttttttttttttttgtaatgcttcctatctccctctcactctctctctcttggatgacttttatttttttttttcttttgccattgaacatattctcctatctttctcttactctctcaagcattagattttttttttttaatttatgtttcaacatattctcttttttctttctcagacatcagacttatttatttatttacgttttaacttattcttttctctcttgtgaagttttgctcttcttgttttctttttctttaaaaaattaaacacactctcattttttttttctccaactattttataccatttttctttaattaattatattttaacttttacaaattttacactagatagtagatatttaataatagtgtctttatagaaactaatatattatcattaggtgggttttatctcacaaaactttttctcaacacatttaaaaagaaaaggaagagaaaataatttaggatatatgttgtaactaaaatacttaataacctag

SEQ ID NO: 10701 - DNA, 588 bp, Cannabis sativa
ttttttaaataaatgcaaaaagaagtaatttatgaaattataaatatcttatttggaattaaaaaaaaaaatatagctaatataaatagatagatacaaatatatttaattcaaataaacatttttttttttggcacttgttttaaatttaaataaacgcgttatttattttattttatttttaacaataaacacattatctttctttacaaaaaaaaaaaaaaaaaaggtttataaaagcaattgaagagtaggagttttattcagaaatcactataacatcagagaaagtagaaagtagaaaaggagtactttaacaatggaaattgctaagaaaatggatgaaggagtgaaatcaaggtcttgtaatatggactctaattccataatattcaatagtgaagatcatgaaaataatttttgtacaacatacattaatagtttcaagattcgtgatgagaaatattatgcttctagacaagtttttcttacaagttataaatttacaaagaaggaagaaaaaatgggagcaaaaacaaaaaaatggttgaagaataaacttaagatgcttctcaagggcccaacaaa

SEQ ID NO: 10702 - DNA, 1000 bp, Cannabis sativa
caagcacccaggttgatttttgagatgctgttttgtttgtttttagctctggggcccaggacttgaatgcttcatgtctttatggtatagaatactgaaagataatgagttagaaataactaggtggaatctaaacacctattgcagtgttcccgaagtcaacctgcgtgcagggctaaggacccctcccaagttgactcctatgacttgggactactcaaatgcaggttgttttttttcttgccacatgtaaatatttatgtccacgtcaccagagtcagtttctgggtaaacaactatatttgaacccaaggaagagaagaagaattctcaaaggcttaaataaggccatggacatttgtcctaagagccattttctttctcacattgacacttaggtggtctttggttggaataaatgataacataggaataaaactaatgagaattggaataataataggaatggaatggaatcaaatttaaaatgcataaaaagatttgattaaaagaaattgttaaattttttcttatcttgcattgaaatggtatttccttctatttcaaaatagattagtcattccactaaaatgatggaaaattcattccattggaatgacatttcaatactttaaaatacaaccaaacaaatgaatggaaaaaaaatgtttttctttcttttccattccatttcattccttctaaccaaatgccatattagggaaactctaaaaatacttttaaggatttatcaagtctcatatgctcaacctaaatgtctaattaaggatgggcatcctcccatttatatagagtttttactcctatttgaacatgaatgaccatcataaaattttcattgttcacaatcataaattgggcatttatgaactttaatgggtgatttggatattatttgaacagttacaaatattcccaacattccattattaggttattggttaattatcagggctttcagcttttattgattctttct

SEQ ID NO: 10703 - DNA, 668 bp, Cannabis sativa
  modified_base (519)..(548): a, c, t, g, unknown or other
aaagtaattatcatagctctgatattatcaaaaattttgttaaaattttataaattaaacttcgaacactacatgataatataaaacaaactgatgcaataggtgtaagtgtaacatttaaaatatatcactatttatttcttttattttttttaatttcttttattattttttttaaaattattaagatttttagactttaaaccttacagatgaaagcaaattgtcttggttaaatgtgttagccgaaagacataaaataatatgtacgagtcctatttgcacataattatttatgtgtacctacataactatctataatatacataaatacatatctttctatctataacataattatctatgtgtaaatacataactatctataatatacataaatacatatctttctaattttataacatatatctattctatataaagtgtgcatatataactaactgaattcttggtttataaaaaattcatgggtaactttttatttatatttaataaaannnnnnnnnnnnnnnnnnnnnnnnnnnnnnaataaaataaaataaaaaaattaacaacttttcaaataatctagattatcgcaaataagcttgtgttgagtgttataggaattgataatattagctttaggtatctgatatcttgtaggt

SEQ ID NO: 10704 - DNA, 839 bp, Cannabis sativa
attttatttagacaagtggtcctttggtctttcttgccttcatacaattccatttggggcattctgaagcactctggcagaagtgcatctataattcttttcacgcatggttatgtgtcctcttcttctaaattgaacaggactccagttttctttctagaaatattctctgttggctttatcgactcttcaactttgcatttcaagcattgagttttatcacttgaatattcccttctacgaatgcaatcattgatatgatttctcaaattgtccccacagggcttgtctttttatgttctagctttttctttcttttcatttaatcttctgcgaagatcatttgtggagagacttccactgttgttatctaaagttggatatacctcatcgacatcatcactttaactattagagtcattgcgacaattctttttcttctgggaagtagacttcttgacttcgacatcagtcttatctttctatgcagctctacctcccgaattagtttggttacccttccctaaagtaggatttcctttatttttctatggaggttggctgacacttttagacctcttttgttgtttagtcgaaggagccttctttgaagtttcacctattctcgatttctctttatccttgtgaggatagaggtttcaggatctttacgatcaactcttccaggagcctcagttgttggagttgtttttacattagggttccttttggttagggctatcatcacggcttcaattctcgtcattttcctagcagtatcccattgaatgatcctatcaagataacatgctttcagttaattgaaattttctagccat

SEQ ID NO: 10705 - DNA, 985 bp, Cannabis sativa
ttttagtgtaattaatatcttccctttgagtaaagtcttttgtgactaaatgtgttttatacctttcaatctgtcccttaattctttttagttcttaaaatcaacttacaacctatttgttttaaaccattcggtaaaaggactaactcacataaatcattcttgtccatggactctatctcatcatcaatagcttctatccatttaaaaaatatggactattaattaagtgcttcaccataagtaagaagatccacaaaatgactaatatcatattctcattctctaagtaaacaaaattatcatcataccttgttgacttcttttgtctttgagatctccttagaggagatacttttggagtagcctctatttgttgatcattattttgaatgacatcttccccaactagaatttttattttcaattgaaaaataaaatataggtcctaagatcatatacaattggaagcctcctaaactattaatcaataacaatatgggctaacacaataatgaactatccaatcaacttaaattttaataaaatttataagagttaatgtaagtctaaataaaagtctaacacctaaattaaggataaaatattttttgtatgcatggatatttgtttaaatacacatggtattgtttgaagtttattttttggtactataaactatttcaaatattaaaaaaaaaataagataatcataaataataataacatacacaattatgaaaaaaaaagtatactttaaaagcccaaatagattaaaaatgtaatgaagtgtactctttatgggatataatataaatttttactatatttataggatgcttttgagtgcatcccaaactattgatgatgtttgggatccttttgtattttctatatttaaatagttatattaatgtttatatttatgttatattaaatgtagctatataatagaaagtatatattattttttttaggggaatta

SEQ ID NO: 10706 - DNA, 756 bp, Cannabis sativa
aatttcaaaattttatattaaagaaaaagaaaacaaaagcaaactactctcatttcctattccaacatcattggaacacaaaataccagctaaaaattacagaaaaatacaactctacctcagaagttccatagcacaaatacattgacgacccaaaacaaaaaaatcaaattacacaatagcgctacaaagatacgaacagagtaaattagattgtaatgtaccgaattgaattgagaagagacttcaattagggtttgagaaatgcaaagtaaaagaagtgtaacaaagtttgagaaggttggattggaatgaagtaagatgagagtgaatgtcgatgaggattggggttatgcgtacctggtttcctcccaaaaactccaaccgtacaagaacaagaacaagtacactattatcactacactaccactcttctactgcatttataactaaaacggctgcgttttgaggtcaacccctctttttttattattattatttttttttttatttttgtgttttgtttttgtttgtttgttttttgaacaataccaaacccctttgaatgcataaaactgtgtagtatgtagggttttctaaatgttttatattgtatgttagagtttttcttcttaaattctaagtcacctagtttttttcctcggtcaggctcgccgctcttctttgggcttaggcatggcttggttaaggtatatagttttcctgttgtgattaatcttatctatgtgacatgat

SEQ ID NO: 10707 - DNA, 507 bp, Cannabis sativa
cttgaaattgtaggatgtaggggtatacattttcctcatggaatagactggtcggggatccgctaatgggattgcaattgttcgtctaaatatagggaatggggtgagtacgaagattattttttgttctcaaatgttaaacggaccagaaactaggataacactctcgtctcgataggaacccgccgcttaatatttaaattatttttttattaatattttatattttataatttgttaaatattttatataataattagtatattaaatattgaataatgtttaatttttaatttttatatatattaatatttttatacaaagtaaattttcaaaataaattttattttcatatgtttggagattttctaccctgtcttccatggagaataaagatggatagggataaagattaaaatttctcagtaatttcctgttccatggagaataaagatggagattttcatatccttacttgaaagtataatacaatcgtgtgtagtact

SEQ ID NO: 10708 - DNA, 719 bp, Cannabis sativa
ggggtcatgccgattaaggattttggagctcagtttgagaccgggtccaatttttgtagagtctgaagtctaaaggggtggatgttcaggaactgttcgtttatgatttaagtttattggacacgatttggataacctgcatcgacaaggtacacaataattctcttagtaacataaagcattgtattgattctatctctatttatttcgcagattaaggttcttgtttgtttgatttatcaaaggctgttgagtctccaacttgactcccccctgaagattgggtcaaaatcaattgtgatgttaaagttggttgagttcaatgcgtgtggtagctttggctagggaccataagaaatctgttttgtgaatggctaccaacatgcttaacttctctgatcctcttgttggagaagctgtatcctgtttgttagctatggacacatccgcttctttgaatcatccttttgtaataattgagaatgactctgcgatagttatcaagacgctacaaggaacctgctccagttggggtattggtaactacgtaactcaatgtaaaaatctctctaatcttttgataagttgtaattttttgtttatttctagattctgtaattttgcagtaatgtggctaaatgggcttttgcctaaaatgttaccaatatggtagaactttaactttcttctataccaaacaattgttgggttttatgccc

SEQ ID NO: 10709 - DNA, 731 bp, Cannabis sativa
cataattatttcaatatcaataaaatatctatataggtaatgctaggcatcaaatgtgccttttaacttattttatatgattttgcttaataatttttggaatgatatatttattggcaaaattagttatttatttgaatgatcttatgtataatgatctggcgaccctaattatatttgtgtgacattagaaattgatagtgattttttttaaagaagaaattgatagtgattgattgtcactttttttccttttaagattttactcatgagattttaattaatgagattatttttttctcaaaataaataaataacacaacaattttgtattggatccacgtgtaattttgacaaaaattacttatgatcaagattaatgtgaaacaaactttgaaataaagttttattatagaacaaattaaatagttttattatttacttatcacactctaaacaaattaaataaataaatggacatatatattcagacaatgaaataaaggtaataagtaagtgacaagactaaaacacaattacaatgaaaaaaaatggtggtattttcaatgttaatttccttcggtttctccactttagttgtctctttcaagtaatggaagtatcaataaatagcaccttctaattagtaagaagaacatattatatatcactagtaatttattaaagcaaaaagagaatttcaagaaaaaatcttagtgtgatcatcatgg

SEQ ID NO: 10710 - DNA, 747 bp, Cannabis sativa
ccatcactccaagcacctccattatattttctcgattcaaaccaatacctataaaacacaaaattaaaataaaacataaaaaacaatcacaaaataaacctaacaattcttttttttttaaaaaaaaaaaaaaaactagatctagcaaacaaatgattaacaaatctgagagggagagagtttggattgcctaatggtgattccaaggtctagaatgaaattgggaaactcaaaatggagcactgccattgcactaccacgcgttatggttgtccatgtttgagagtgacgaaaggggcagtgaaccatgagatcaagaagcttaggacaaggacaacacaaaaatggtgattatttttcaaaacaggtctagaagccaccgattctgaataataaatcttggaactccgtggatgtctgctaatatctatttcaatttcgacgatcttcaagcccatctgtttgagaggttttgtgcttttagatctcacgagcttggttgtacctttctttctttgaaacgatgctagagttacaccaaaaaattattgaaaggttttcgaagttaggacttaactgagcagtcctcctcgttggtggctcatgtcaggcggggcttgcagagacagaggtgtaagagtctggtggttcatatcgtatggtgcgtgtcgccgactaatggtcgacaaccggtgttgggcctggaacaaaaggggaaagagggaaaccgagagagagagagagaga

SEQ ID NO: 10711 - DNA, 556 bp, Cannabis sativa
tgcgtaaattaatattaattacctcttagataatataatacatatagagagaaataacttttatccattattgctactaattgcaagacgacacggcttgaactagatacccaatagcaatactcatttgagaaatgttaaaaggcacgcatgatgcctagcacacttataaaatataatattattattattgcaatttaatatacttattttaatttaataaaaattatataaaaccattaattaattataagacgtcactttagtaccccataacaatattcttgttatttttaatatttaaaatttactttttcaacctctataaataaaacttttattgagtacttaataattttttaagccaactagtttattattttatttttactttaaactatatttaatatcataaaaatatatgtatatatataaatataagttatatgatctagacaatatatatatattaatatatatatatatatatgctcctctctctatgcatgcagcctcaactttaatcatgggacagaaagaattataaaaggaaatg

SEQ ID NO: 10712 - DNA, 639 bp, Cannabis sativa
ttttgggttcacacgctctgtgcctctgttgtgtgtcgtatgaaaccgaattaaaggcgaaaaaaaaagcagtttatggtatatttataggcttccagccaaaaaaggcaaaaaaaaaaagtaatttgcaatgaaagtacatagatgaaatattaacttataaaataaaaatagatttaagaaaatagataaatagattttggtgggtattttttcttaattatttaattaattaataattataaatctaataaaatatttataaaatgagagaattaagggaagaacatgtaggggtactctaaaccatttaagactgccacatcaccgcctctatcttttatttatatatatatatatagatttaacattttaaatacaaaaaattaaaaagttcaccagaaatactacgatcagattgataccgagaatgtctagcaacataatgtgctattcggtttactaattgtctaataaaaaataaattaacatttgagaaggtagataataaaagttggcaatctttaattaaaaggccgaaagtaaacctaattacttagttgctatactaaatttaatattaaattaataacaaaccaatataattttaacactaatattttttctaaccataaaaat

SEQ ID NO: 10713 - DNA, 523 bp, Cannabis sativa
tggtccaagttttctactaacccttactcaccctttttgatttttctctattttatatatttggtttgggtaagtgtagagattgtttagcaactttgggtaggtgaaacctgttagaattgcagatgagaaagaagatatacatttttctatcttattttgtgttatgctacccaatccagtttctaaaagatagaaagggaaatgtttatgagtaattattattgctcagttggaatggttattgtttggttcagcaattaaacaatggatcataatttcaatggaataacaattccctcttatttattgaaaatctttttccaatgacttttctgccactaaagccgatgcagctagctcagtggtgagttagggagtgggatatagtgcactgtgctttgctcaatgattaatctatcagaaaaagtgggtgttttgctcaaactatttgaataagagttgggggctgcctccatgcgtatctcaatccactccctcctttgttgtactgttttaagtg

SEQ ID NO: 10714 - DNA, 1021 bp, Cannabis sativa
agaggaattaaaagaaatgtagttttgctaaattgcacagaaaaatcagtttaatctcaaaatcaaatcaaaagcaaaagcaaaaggacataaacaacaagacaagcattattaggttccatcacaatcctatcaactaagtatcaatttcaagatcaaagacccaaccctgaggctgcaaaaataaattcaataaatgacttcctattgaaactgtagattgtacatcttaaagctatacaagcaaatgtgtaacttcccaaattaacaaaattctatctcagagcgttcgggaaagatactattactactgtctaccaataagaattgaatgctaccataccaacagaatgagatagattatttagcatacacaacgccagaaggccctaacctttaacttgcaattaaaggaagctgagtgaaaaaaacttcaaactacactactgttgtctctggaagtcaatcccaagattagatcgaattgctcgctgttaaccattctgtgaatgtgaatcaaattcgcatcatctgcatattatacaaagccgataaagttaacactatggattatcggaaatattaccagacaaaatcagggttataatagataataaacagtggcaagggtacctatcctaaccagataaatgaccctggaatataaatttccagtatctaccctaaccacatgtatgaccctagaaaaaaaaaattctgaactgcacatccttcaaataaaattaaccgatttttcggaaaaagtctccgtgttccactttaccagaaaattatggagaatgaatatgaaatagactacccttgatgtatacatatatacatatggtcaacaaaacatgagcatgtaatatgctttgcaagaacaaacagataaaatggatgccatcttttgaaattgtactagtactggtacagaaattttaccatcttctgggcatttctcgccttcagagttttcattgctgcatctgcataggcttgtgctgtttctgcatcagct

SEQ ID NO: 10715 - DNA, 614 bp, Cannabis sativa
ataaaaaatataatgcaaaccaaagtagataggtgtttagaattgcgcatttatatatactctttgaaatagaaagagaaaacattaaaagctgttgtgttgtgtcgttgattcaccactgagccgctgataagggcccggcggacgcaactcaatcaagtcctccggtgtatcacttgcggttcctgcagagttgccaaaataaaggaaagaatgggtcacaacaagccaagacgattcaatggtcaaaattctcatcgtggagaaggcagtcggaaccgtaatcaacttccactgtaagtaaaaatttcaattttccacacccacacccacgcctactttcctttccattctttttggttccttaatcattgctaatgctgtatcacttgtttctcttactgttttcagtgaacaagagttcccacagtccgatcaaggtgaacatactttagccttcaccttttgtctataacatactcgacatattgccgcttaggtataagattattttttggcgcctgataaacatattgtcgttgcagccattgaagaagagccatccggtcccaaaatccaacttgcgatgtgggtatgcgttcttctttttatat

SEQ ID NO: 10716 - DNA, 670 bp, Cannabis sativa
gaaacccagaaaacctttgaattcagtaactttcttcggccttgaccaatcccttatagattcaatctttcccagatataccatgattccatctttactaatgtgccctaggaaggactcttgggatagctaaaattcacacttttaaaatttggcataaagtttgtgctcccgtagtcataaaatcattcgtagatgctgctcatgctctgcttctgattgagagtacacaaggatattactgataaatactataacacatatatcaaagaaatccttgaataccctattcattagatccatagaagttgttagagtattggttagacataaccagaaattcataatggtcctacctatgcagaggatacttgtccttaattgtaaccttgtttagttctcggtagtcaatagacgtgcaaagtgatccatatttattcttaaagaacaacactagagctccccagggtgacgcactgggtcgagaaaatcctaagtcaagaatcccctgaagttgtatctttaattccttgagttcagtgggagccattctattgggtgccttagaaactggcttcgctccaagtgctaagtcaattacaaaatctattttttactgtggtcgtaaccctggaagttaacccaaaaacacgtccaaaaattcttgtac

SEQ ID NO: 10717 - DNA, 1224 bp, Cannabis sativa
tgttttaaggagtgtcctttcaaacttgtccaaattaaccatttctattttttttgtaaaggaattaaccattctatttaagggagcaaaatatatagtaataaaaaaaagaaataacatcttgttattatgttattagtttaattcaatattaattcttatacatttttatcaaagaactattatatataaaaaattactaactactagtaaaaacataatctcataccatagtattgttaaacactatatagtaatgtttacggcaatagtaacttaaattacaaatttttattttacagatgtataattattttctacacaattatactaacattaattaacacacaatgttatgtgtgtgttcaacaatactcaataaaaataaataaaattgagaaaactcctagtattgttttgtgattatgattaataaaagtttcataattgttgtacacttgttcgtgcatgaacatgaaattacttagaagagtttgatatttgatggggcatttactaatctgtaatgagaatcaaaataattaatgagagaattgaattagtttaaaatagaaaataatcgaaaataatattttattatgttgtttactaaactgaccggaaaggaaactagaatcgtattattttgtttacatagattgaaaaagtaatctgaattctttattttgaccaaattgccattatattagaacatgtaattattttctgtttatagatttttaaaggatatatttgtcttttttatttttattaataaaattaaaataaattaagttaagaaaggaaaaagtatttccataaaaatagaggcaaaaaatttctttttgttttctctctaatttgtgtgggtctcaaaactttctcaatttctaaaatttagtaaacaattatatgagaatcaatatcatactattcattcacattccctttaagtaaacatgtcaatggtcagggcggagccggacttgaatgcaaaggggccaaattataaattttagtatcaaataaaatttttatagcacatacttacattcaatattaaaatttaaaacaatttcttttgtatgttgaaaattatctataatgaaatgtcaaaataaaacaaaaagtagttattcaaatttctactctatattatctaaattgtgaatatttatacacttctaatcagagcaacaataaattttaaatttggtaaatatt

SEQ ID NO: 10718 - DNA, 1678 bp, Cannabis sativa
ccgttgaagctacgtccaagcttcttgtagtccatctaaagttccagcaaagtttttgctcaggtataaatatatataattatatataaagattacatttgtgaatacaacaaagcattttctgaaacccaaaatttattgctcaaagttatatatatatatatttatatatatgaactgcaagatatattatcttaaggtctctgttttgtgaattttttcttcaaaaatccgaaacccccaaaatcttactgctcccttctcgtctctttttatttggtctactccaactctcaggtatgtctaaaatatgctttcacttaattattcattatggcgatttttttgggatggtgtaaatgggcctgccttgtatttatataagattattctttaaaaaaatgcttctcggcaaataaatttttgggtttcagaaaatgctttgttgtatttacacaatacatatatttatatattttttaattttgctaaattatttgtcaaagtttgcttctatttgtgaactccttctgcttgtgggattgaaaaaattttgtgagctctgctagcttttgtttgtgtcaaaattttaattgtttaatagttgtgattaattaaaaatggattgtacgtttttttttattttgtaaataaatttagggtattgactaaaattagtgagactaaaaaatgtaaatttattttctctcactaaaattgtcattcaatttctcttccaccagtacataaatggagagtgtagtgagttataatatcatattgttgtcatgaagacttactcaaatttattagattattttatatgtattttttgttcaacttataaattaagtaaaactatttttgtagtttaagttataatggaagagagtagtggctcaattgatataaagaaaagtgacacttttgacttgaagaagagaaaatgtcgattgggcactgaatgtgtagtaagaaaaaataaaaataacgacgaattgttctatggttgtccattttagaaggtaatttcttgtcgaattttaagaattcaagaagatatatattaattatatgataaattttattgattatttgctatgttcgaaaaattcaattatgcagtagatcgatgactttgaaattatttgataccaaagaagtagatcgattgttagtagcgacaaattcaattatgcagttgttgttgaaaatgatattattgctttgataaaatagttgatttgttgtcgaaaataaacatcatgtttgctaaaatgttacaatggatactgattttttttatttatttatttgttgtttaaatgtttgtatatatgaattctgaataataaatatttttatatatatacaatatatatatttgttgtatatatatacaataaatattttgtatatatatattgttgtgttgtaaaattttttatttgcttatttgtttcttgatcaaagaaatttttttttttatatatatagtattcactgttgttgatcagtatatatatattatcaaaattctctgaatgaaaaatattcttaattttaatatataataatatatttttttaaaaaatatatatataaacattaggcggagtggcccgccgctaataatgacatcaacttttcagtctgacactagtattagtggcggggg

SEQ ID NO: 10719 - DNA, 735 bp, Cannabis sativa
cgttttcaatctaacacaatcaaaccaagtaaaacttttcagccaaaatttcaggtgcttcaacagtgcatccctagaagggatgcattcttttctgtttttggcattcagatagttttaatttgtacattgtgcaaaattttgcaaaattcaaaataatttataatatcaaaagtagggttcaaacgatctatttcatatccgtataaactaaaagagacacccattcaacaaactctttgattcttgttttcgacgagttaaactaatccaaatttcactggaaaatttcttaaataataactacaatgtacaccatagaatttcccaaaagttcttatcacaatattaagtgaaagtgaaaccaaaatcaagaaaaacaacttttcagccaaaattcaattgttaaaaattcacaagtgaaaccaaaaacaaggaaaagaaccaaacctgagataaaattataggtccaccttgagaagcataaagtttctcttgtttcatcaaatcaacaatcttagccgtaaaccgcttcatttctgcctgaaataaatctttataaatacatttttataataatggattaataaaagagaaaaatattaaaaaaaattgacagtcaaagtatcaaactttaaaaaccttgaaaggttcattatctgatcgcaacacaattcccggtataaaatgcagccaaagaggaaacccactgttcaaaatccaaacaaaaaacac

SEQ ID NO: 10720 - DNA, 587 bp, Cannabis sativa
gaaaataaaaggaggctattaatcctttactaaccacatgttttccttgtgctgcagcaaatgagagcacgaggaagcgtgttgtattctacacagttggcgagtatcttttgctggctgctgtaagctcacttcaggttttatacattcgccgtcttttcagcaagtcggttgcctacaaccgggtttgagctatgcattaacagcgttagtctgtgtcggtttagtaaaacaggatgaggcttgtaggtggttttggacgatttactttcacatcatttgcatacatgtatcaaagatgatttattattttattgctaacaactttgaaacttccaaacacagctataattgttgttttacagtttccacctttacttgtgtctcctatatccagacgaacctgacaaggtatagatacttatggaagaaagtaaaaaacaaacaaacaaaaaaactgagagaaggtgaaaagaaaaagggaaaaataaggtagtacgattggataaaattcttaacaaacaatgtgcttataattactgtttttagtgctgaatttggagtatgttatgttttttttttttttt

SEQ ID NO: 10721 - DNA, 542 bp, Cannabis sativa
agagttccttgaatctaataacctcaatagtttggaagaatacttaacggcaaatttaaagggcaaaaatcttatgttatgtgaaaacaaaatgagtaatttgtatcataaatacttaagtttaacaccccggttacaaataaatatttaagtttaattttttgcggtaattaataatacttaagttataattttagaacttttgtaagtactttattgttaagtgtcaagtaaattgacaagtgacaatttttcattgttccaagttatttaacttttatttttaatttaaaaattaatttgaatctaccaataagaaaatgagacgtgaataataacttgatatttaatgggtaggtacttatagaaatttcaaaaatataacttaagtattattaatataaaaaattaaatatttatttataatttaaatataattatttatcatacacacaaaattaatagcatttgtcgtatgaaaattgaaaagtattttgtcattattattgtggtaggtatttgaagttattaattcataaata

SEQ ID NO: 10722 - DNA, 649 bp, Cannabis sativa
atactgatgttacaaatatctcaatttgtattttcaagttgttttttccattggtgaaaaaaatgtgcacgatgaagggtgatgtagatatatgtggaggtgttggacaagtaaccgtgaccatttttggctgcattgaatgtgaatgtgaatggctcccaccaattttcatattattgagtgtttgattaattgtattgtactactacttgtggatggattggacaaaaccacactgtgacccttattttgagtacacaaactaagccacaaacacatcagaaacaaaaaaatacaagatttataagatatgggagtttgatttgatcatccctacttcaaaattttgttaaaaacacacctcttgttgtttgtaagacaaagacagtgacactagaactaacacaatgatatgtttttcttcccaaatatcttctctctctcacacacactcacacacagaaacacatatattatatgtatatatgtatataaatatatatatatctgtacacgttatgcatgatgggtcaatcaaaagacttttcaagtcatgcttattgatgtgactgaaatgggcagcttcctcttcatcttgacagttggaaagtgaacgatttcatccttctctgctatccatctgtgtatg

SEQ ID NO: 10723 - DNA, 579 bp, Cannabis sativa
agcccacatgttttcatacttgaagagtctatttttacaaatgactccaacagtagtatcaaggataatagacttgtgatctgaggtagtggctgaaaggttgtggatcacagcattaggaaacaaaactcgccaatccgtggaagtaataccacggtcaagacgggcacgcttcatagctgcacatttgggggagttcatagcacctttttctcaggtgaacccaggtcccaggaatccctggtcaatcaggctagcccgattaaccatgcggtgaaaatcaaacgcatacctcgatgagttaccaggtcttgagtaattgaagcactcattgtcatgaagtgtgccattcatgtccccaagcaacatgactggtttagtatcaaataaaaccgaatcacccatctttagccaaaaatattccttttcttcgtatcttggaggaccatatacaccatggaaagtgcaaggggccccaggagggtttgaggtgatttcaccaaaaattacaaacttgtttgaggatagaatgttatagactaaccctttcatccaacataaaacaaagccccccgagag

SEQ ID NO: 10724 - DNA, 954 bp, Cannabis sativa
aaaccccaaaacacaaactttttaagggggtgagtgagtgagtaagaagacaacctgctaaagtggtgacatggtagagtgaaccatggagaccaccaatggcgaaacgaccgaaaccttcagcctgagaggctagggctcgcaagcttgagtcaacatgagcataagggaaggtaaaggtatccatgtgaggagggtaagatgtggttgagctggttggaacttgtggtggtggttgtgagggaccgtatttatagggcagagctccttgattttgattattgttatggtgtttgtggtggccgtttcccattaatggctatgtttagaagctctaaaaataaatttacttcattacaatcaacaaactgttactgataataactactgaaactgaaattgaaattgaaaccccaccattacactgatcaaaactgaaagaaattaaacaaaatttattgagatatataactactgattttcatatataacgaaagtatataataatattatcaaaaccaaaactaagaagaagaataatgattaccaaatggacattgaagctcttgaattcctatatgaaatgtgtgatttaatacccattagaatttcccagaaaacatataataatccatacattattcgcataaaattaaacccataacaattattcatcaattcaataataataataaaaaaaaaaaacagatcaaaagcacaaacaaacagtttcattctagggattccgtggccctaatttgatctgaaaactaatattccaaaaaaagtgtgggagaggaaaggtatactaactcttgacgaaggaggcaggtggcggtatcggcggagatcggagccgtcgtcggagagagatgataagagggacagtgagaaaaactaaagaaaataaaaggaaataaaattattaaagtttttgttttaattattattatt

SEQ ID NO: 10725 - DNA, 877 bp, Cannabis sativa
cccaaaaccgtggcagtatctaaaattcgggtcgtgaaaaccgttgagaaagaacattgaaatgggtccaaaccaaaccaatgtttggaatgtttgatgaggtccgttagagttagacacgtgtgttttaccactcgtgtggatctttgatgaggaatggacggctgtgattatgactaggaatctagaggagaggtgaaatctaggaggaaattagacaatatatcatttttatatttgtcttcttttatttttaccgtcttttctaaagtctatcatttttacttcttttttaaatattgtaccaattttacccatgttacttcaagatactctatgtgactctcttatattagggtattttaagtataatacatataaaaagaggtatgtttcaattaaataaaaattagagataaatttaattaattgataaataaaagaggcatttttcaacttagctcgaaatctagagccacagccattccgtgaattgtattgggtgaaaatgtcttaattgggtagtagttttggtaatatgaatgatgagaagaatggtaaaaaaataatgaaagcatttggctaatattttcttttattatttcacgctgattttattgattaaatcttattattttttaaaaaaaaaataaaaaaattattagccaaatactttcattatttgctaaaataaacagaaaacataaaataaaataaaaaaagagagcaattgatgaaaaaaaaaatatttacggcataaatattttatgttttgaattttataaacttaaataccatatgttctttttcgaaaaattaaatatttatgttacatttatgttacttatgctattacttttcttttaaatataccaaa

SEQ ID NO: 10726 - DNA, 823 bp, Cannabis sativa
cccttgtcatgaaatgtatctcttctgttaactatagcatcttgattggtgggaacatttctgacaccttctcctcctttaggagaattagacaggaagaccctttgtctctttattttttccttttactggttgagggactctctgctgcgatttgtaaaagggagctcaacaatgattactctggtattctaatttgtaggggagctcccgttgtttcccatcttctttttgctggtgagagtattcttttcacctctgttaccaagcgatctagtgtggctattacggacatcatcaacacttatcgtaaagctactggccagcatgttaaccaggccaatcttctatccttttttccccaaacactcaaattgagtctcaaaatcactgcagaacatctttggggctaaacaatgaggagttcataagaaaatatttgggggttccccattgtgtggaaagaatgcataattcaatctttcactaccttattcaagtttttcttctaagatgaatgtttggaatggtaaattcttctctaaggcaagcaaggaaattctcattaaagttgtgattcaagcaatctcgtcttatgccatgtcatgttttaaacttcccaaagtaacttgtcataccatgcaacaaatgatatccaaattctggtgggggtctgcttcaaatgataaaaaaaattcattagaagaagtggtctgccctttctatttctaaattcttcggtggtgtgggattctgaactttaactagccataatcaagcgcttcttgctaagcaatcttggaggatttggacaaatcctgct

SEQ ID NO: 10727 - DNA, 611 bp, Cannabis sativa
agagagagagagagagagatgacggggagcgcggagctccacctttgcttgcgcctctcctcatgttggctctccctctcgagtggtatctcgccttggtggtgactcttatttttttgctcatacacttttaaagtgtacattgtaattctccctctcattaatttagattagagatctccaaaaattacacttagcaatttttagtaatcaacaactaatgcttataaatatttttattttttatttataaggaaatgaataaaattaaattagtattaaattacaagtaattattaattatttttatttaatttgtaaatgaattacaattatctaataatgatataacactaaataaatgtaactattataattatataattgatgtaattattaaaactttctccataaataaatataaactcttttacactatatactacctctccttatcggctcctgtttctgtcctacctagattatgagcaaaattatttacttatctggagaattatattagggaataagagtataaaagaagtttaatatcaacaaagctgagtaatcatgaaaatcagataaaattctatccgctaccatttttgaat

SEQ ID NO: 10728 - DNA, 526 bp, Cannabis sativa
aagtatttctgtgctttttcaatgctgtgcgtgtgggtatagcaaaacttaccgacgtagcatctttcaatgcaatggacataaagtagtgtaaggaattgccgtccaactcatgaagctagtcaccaacagcatgaagacacctttcaaaatagttttgggaaaattcttttgccctgtgcaccataccaaaagaagttgcccgaccctgtctttggttgcctttactcggcatctttagaggagaagtagagctcaaagaaggatcaacaatcacaggttggatgaccagaggtggacctaaaggtggcagaggtagagtggcctgagtcatgtccaaggcaacccctgttcgggcagctttggattgagtacgcctgcctgaggggctgcttgatgattgcttcatcagatcttttatcctggaggccatgtatgcaaaagaaaaatagcaaggtcataatacaaataataaacacaaaatgcaagtaagagtaaaaaaaattactaccatcagtttctttgg

SEQ ID NO: 10729 - DNA, 750 bp, Cannabis sativa
ctatcaagagcagttaaaatttgtaattcaattcaaatcattcccattaagcattaattgaattgttcctttatatataaatgtatatatatatatttattattcataagaaatgaatccataacagccgacatggccatgtagtagtaatcattgaaacaataaccactacaatcgattttttttcttttattgcataagcaaatgcatttatcaaataattatgttatgtgaattagtggacccaataataaaattgaattcaaattctatgaaacaagtttagttagtcttaatgatgaggatttaatgatgcatttaatttttaacatgagttcaaatcttccattcactcactcttaagcccacaagtgtatatatacaatttgtactcttttcattttttttaaaaaagattttggtaagcattatattaaagcctaaaatattttgataattgggtaaatattatatttaatatgattttatatataaaaaaaatagaaaagattttggtgaacacatggtgccacttagccaagtcgagaacagtagaatcaatcactatgaattttaaaaagttaaaataattacaaccaaaattagataaaaaaaagttaaaaaagtaacaaaaaaacagccaattttgtagaattgtttgtcttccacagtaaatatttgtgtagtattagaaattataaatagaactagtaggtgtttatcttactaaactaactttttctcttcaga

SEQ ID NO: 10730 - DNA, 732 bp, Cannabis sativa
aatggaatacattctttcacgggagttctttggcaaataaaaaagactggttttatgcatatgaaataagtttaatgactgtttttattatttataagaataactcacctctgttccttcagatagaatttcaaatgaagaacgtgcagccaactgtgtagttgtatcttggttctcaaaagccattgtttctgaagagcttgcagcaatattcctcaacttttccacactttccatcacttgactaacaacatcaaaggacttacaatcgaaatttgttgaattggactgcaccatctcaacatcttctgacaaggaatctacatcattgggtgacatgttcccaactgtcattgaaggtgaaccagcttctgaaacctctacttgcatatctgaagctatggagaatgtaggagtgtgaatacgtctacgaggttggtgatctgaaaaaaacatagtgttctccattctgttcttgtcgtttgaagtgggactagaatcataattgggttcttctgttgtagacatattagttttagtgtttccctgatttggttctatattgtttgaaacttcagcttcattagtcatatctgatgaagatgatgaggttgtttcatcgttactttcttcagtcagttccatgtccattttggatgtttttgagtttaatacccgagcttgactctcgagaatgtgttcattgagaggcttgctgacacccacttctga

SEQ ID NO: 10731 - DNA, 597 bp, Cannabis sativa
tgcacccaattattacagaatgtggcattgcttttttaaatagtgggccttagtttaaataaatgtgaattagaaaaactgcaatgttactgagtgtaatatttctgtatttatggtgtagatatcattactcatattatataatattcctagttatcacacttcctacaattgtctgtttttgtttttacactatgtaatctttctttgcatctccttggacaggtatgatctgaatgttgaccttttggatgttcatgcggacaagagcacattccatcgttttgacaagtttaatcttaagtacaatccctgtggtcaaagtaggctcagagaaattttcctaaagcaggataatcttattcaaggtataatcttttattatcaatatttttccattttctttttaattgtcttatgttaatctttatatcgaagtacaacagtcttttttttaacccttctagctattgttcattttgataatacattttgctgtagtgcttgcttcttcttctctctatctctcttccctttgctcatcttaataaaaaattgatccttggatcattttgtattctgataattgaaaacaca

SEQ ID NO: 10732 - DNA, 1378 bp, Cannabis sativa
ggcatctaagtgaagatgttgtatacaataaagattatatatgacttggatcgatatgtaatgacctaactcatatcaagtatgttatttactataatgacctaactcatatcacaaagataatcaatataagatcagcctgaatcctgagtaatcatgaactatgtatcatattatcagtttctttgattcactcgttaaagtttctcaaagaagatgactcttacaactctctattgggaatctagtaatatggatggctaagaacatgatctacaattatagaatcttgacttttctaatagattgaatgttggttccctttaagtgttaattttggaactaaaaagttgtgcgcaagttcagattggatctaaattatactttcactagtgaattaaaggtactaaagcataaagaaggttatagaagggtaaatagtaatttgaccaaaactaattacgaactaacataaggagatctaatcactagaattaattatatcaatggacactacagtaaaactcaatatatataattctataattactaagagttcaatttaatatttataatggagtaatcatggaattaataaaaaatattatttggttcatgagattcaattaatgatctagtttattgaatgtaacaccctaacctgtaaggcgccacatgtgtgctttcataaattagtttataataataaactaacagtttaagacaaaagtggattaactaaaactttgaaaaaaaataattaatgtataacttaaattcttttctaaaatattactggattcggggatccccttggttacaaacttattactaaaataccactgtaattgtttgttataaaatattacaaaagatagatcccgttaaccaagcacaaaatgacagacagaggaaagcaatagaaagtggcatgagaaagtggataagctcattcgtctagttagttcccagcatagcagagttgtgggcacatcccatgcacctggttttggtgttggaggagcatcaaatgaacaagcccatgttgaccttgccttcgatcctgtagcacaaccattgggtcctaacaatgtctctactccaccaaattctatagcacaaccatcgtgtgctaccaatgtctctattccattaccaccgcgtttcaaaaaggtttctactccagaaccagcaccgccacctactggtggtagttcagaagaggtaatcttaatgttattttacgaactgatctaatgctaaattataaatatggtcaatttataaactgaattgttgcttgtttgatttggatatgcagacctgaccgtgttggatgcactctcggttggaacccagtgggatggtactaaaggtt

SEQ ID NO: 10733 - DNA, 672 bp, Cannabis sativa
aaaacaaacaaagtaatgggtcagcctatcagcggagtcagactacggcttcgagttcagctataaccatatctcaatatagctagacctctttggcatgggaaggacgactctcgtccagaggagtagagacttagagaaacacaatcaaataccctcaggggtagtctcgaaggagtagtcaaagaggttcaggtgtagtcctacgttgcattcatgtgacaccaaatcataaagaatcaagggtttgtcctatgtgtcagacctaagaaaggcacacaacacataaagcaatatatcttttgtccaatgtccatgatatttattgtacacgatcgacggtgcatagccacctgtcaagatcagacgatactatgtggtacgaatgatggttacccttctattgggtctcacctacccgactcaaagtcaatattataatgtattttactcaatcaatgagtttatttcatatacaaagtactaactcgtggactaagactctttaacacccgaaccacataaaaatcattatcttctttatttcttaaatgttttttttttcttagcaaatctattattagttcagttttcgaaaatcacagtaaacctatactaataaaaatttaatgaggttggccacaaatctcttaataataaatatattattta

SEQ ID NO: 10734 - DNA, 791 bp, Cannabis sativa
gaaccatcaacggtttgttggctacgcttgactccggtaatggatagcatttaggtggattgctaccatagaatggtttcaagagagacacatgaaaagtaggatgtatgcggctgtttgggggaagttcgagagtataagctgctgaaccttgacgagcaaggatgggaaaaggaccaaagtatcgtctgcaaagcttgctattcaggcgctgtgcaactgttgattgtcgatacggttgtagcttgaccagcactaaatctccctgttgaaactcaatatccttgcgtttcttgttagcttgttgtgtcattctgtgttgagcacgctgcagattaactttcaactgctgcagaagagcatctcgtgacaataaatcttcctccacagcttgaatggtggtggtaccccgagtgtaagcagggatagatggtggaagtcgaccatatacaacctgaaatggtgtcatgccaatagcagaatgatggctagtattataatggtattcagcccaagcaagaaacttactccattgttttgggttgtcagcggtaaaagctcgaaggtaatgctccacatacctgttcgtaacttcagtttgaccatccatctgtgggtggtacgcggaactcattttcaacttagtacccatgagttcaaataatttcttccaaaaggcactagtgaaaatagggtcacggtcagaaacaatagtttgcggcattccatggagacgaatcaccatgtttgtgaagagttcagccactttagtagctgaatattgtgttggc

SEQ ID NO: 10735 - DNA, 541 bp, Cannabis sativa
atttaaacttgaacggcggagactttaacttttgtgtctacttaatattttaatatgaaaccaccacccttgtttgtatgacttttttttttcaggagtcatctatgtaacgaaccaaaaatccatataaaaaaaaactcattttaacctaaatttctttaaataaaatcttcaaaaattcatataaattatttttttcttcaaagtatgcgcatacttaaaatattaaacattacaaatctcaaaataattgtttcagagtgagcccaaaagtttctataatggaactttaaaccacacactctttcaaaagtactctgacaacttccacagtggagccacatatacatttcagtagactccaacgtgcactggtttatcttgtctttcaacttaccttcaacatgaagcaactacgcaagcaaaaatgcttagtaaatcaacctttcaaaccatgcatacattacaatcaactcgggagagaaggacaagaagcgaaacaaccacttagttttaacttacgagaggaagaaacatacat

SEQ ID NO: 10736 - DNA, 582 bp, Cannabis sativa
ttctcacacatatatacgtacgtattatttatatttataggttactctggagccttaccgtggttaacgagaataaaaattgcaattggagctgcgaaaggcctgagtttcctacacgaggaagaaaagccagtcatatatcgagatttcaaagcttcaaatatcttactagattctgtacgtaacttattttacttttgtcttattttttctcttatccttgtcttatcatgtaccaaacatatatatatatatatattaataataaataaattcttttttatgtatataattgatgtatacaaataaataatttacttttattattattttattacaggattttactgctaagctttctgattttggcttagccatagatggtccacaaggagatgaaacgcacatttcaacgcgcgtaatgggcaccgaaggctatgctgctccggagtacataatgacaggtaataaaatcaataattgatgatttttattatagtactatacacattattattattattattatcgatctcatgattcataaattaataatgggtgtatattggtgacaaaatttca

SEQ ID NO: 10737 - DNA, 795 bp, Cannabis sativa
caataagtaggtcctctattgaagctgaatttcaaagtctggcaagtgttgtcacagaaatgacctggctacaatctttactccatgacatgtttcatcaccagttatccctttcatctggtgtgatgataatcaaagtacagtactgctcacagctaatccagtcctttatgctcgtacaaggcacatcgaattggacttatatttcatacgagagaaggttctacaacatcagatacaagtaaaacatgtgcctgctcaagctcaattagctgaatgccttaccaagccaatttcaagctctctgttccgtgatattcgatccaaactcagtgttgtttctaagtctacattgagtttgagaggagctgtcaaggagaaccaactgtcaaaggagttagttaattctattattgattatttaggactataacaaattcttgttgttcctataatcggttgtgattgttatataaaagttatgtactgtactattcttttcaatcaataatacacagattgcattttccaattactcttcttctctttctcttgatagcatcttttcatgactgcatcttcacagaaagcataaacgtattattgagacatgttgtgagatttgattatatacacacactaataatgagtgaaacaattcattactttatttttctctaatttttttagaattttaatttcttgaataattcttttttgagagtgttgatgtgttaattcggttgtgatggtgctcatgtggggaattatcaaaaggttagttagcagttatat

SEQ ID NO: 10738 - DNA, 980 bp, Cannabis sativa
  modified_base (113)..(119): a, c, t, g, unknown or other
tttggggtcatttgctataattttcccaaaaaattagataatagaccaaaaatttataaaaaaaaattacaaatatacattaacatggaatttttttttatttttactctttnnnnnnntttatttacaaaaatacctttttagtgaaaatttttttatagttgatttatagttgttgtgaggtttatttcatgttatttttttagttatttctaaacaaagtgtatttttgtaattaaaaattttaggcgtaaaattgtaaataaaacataaaaaaagtatttttaaaaattctccaaatatatataatagaacaatccatccatagtccaaataaaaaaggttgtacaataatacaaaacaaatcaaatagacaatcatctaacaattccatgaaagtattaatcatgatgcaccatcggcagcagtagttgttgtaattgtgataatgtattagacatgaaaaattagtaattaattaatattatagtaaattattaaataatatgtgcaattgaaataaaagcctgttattagaaaaataggcaaatatgataggaaaatttgagtaaacgaataaattaggtgaaaaatgaaaacttaaccaaagttaagccataatattagaataggtatactttgttcctctccccaaaatacacttcctacacttaaatctattcctaatcttttctttctctttctctcttctctaacttcacaaacccaataatctatcattccccccatcaaatcactttaaatttttgcaaaaaataaagatattagttactcttagctactccaagctcacatttaaggtgcattggtggtaggatttttttttatttgtcgtagcacgggcacgacggggacagtggataagagatttccttattttgctttttgttgttaattgttatatttaatttagaatattattttgattcttgaaatagggttgttgctatttttttttt

SEQ ID NO: 10739 - DNA, 540 bp, Cannabis sativa
taacatgtcctaatatggaatatggaatgcaaccttttgaatctccacaacctttatttatcaaaacaatcccatgttgattagtagattattacccctcaaaatatgaagggttatgcaactaagctcggggctccaattactttggaactgaggccagagcagctcatgcacataattttactgttgtcagatttttttttacacatatatacatataaaatatttatatgaacaaaattttcacaaatgggctcgatatttggactccatagtgctgtcggagaaaggtgataaaatgaaacgtggagtgaaaataatctttctcagttcatcaaatgagtcacaaaagggtcaaaaaaagcccataaagaccattttttttttcttctgattcagaaaaatggacatgcttttaggatgttctttgcttctgatcttcatcccacactacaagttatactcaaaaaagaaccatcaaatctagccaaatctgcagatttggaatacatatataaatgtatatttatatttcatcat

SEQ ID NO: 10740 - DNA, 553 bp, Cannabis sativa
gatagaagtatgagcatcaacacccacacctacgacagaggtatgagcatcaacgcgcacagtagagacaaagatgagcgtcaacatctgttgaccttacttttagccaatgatagtgactcaattaaagtaattagaaataataaataataataattaagcaaaaagaacacaatttgttatagagattcgaccctgtgataatgggtatagcgcctgttattctgaattatggccacctgacgtgacacctccatggtaaaaagcaaaagacatattgaagacaggtcaacactaaccggctaggtaagtgtcgtacaacctcccaacctgcaagatcttatggctgcatagttgacacaagcaggttcatcctgttatcaatatcatctgcaaagacaaaaatgtaaaagaattgttagatccttgacggacctatagctggctggccaagcatacaggcatgccctaacacttgtgtttttcccataagccttctaatttttcctcatcactcctgcgactccacagtagttcgaattgcccacgtttc

SEQ ID NO: 10741 - DNA, 979 bp, Cannabis sativa
tgttttataaaaattattgatcgactggatctgctttgttgaatgataatatatttaggctctatgtttttttaaaatggtacaaaatagacttggagcttaattaaaacttaataatactctgaccttgaggtattatgactaaactagctagttgttttttttttttttttcacatttattcatacaaaaaactgacttaagagtctattgcttatcatttaacaaaacaaatagtcaaactaataacttttacatatataggtacttttacaaaacacaaaagtcataacattgttagtggtcaccaatgatcactatatcattagattaaatatcgagtctagagtacatttcaacttaattaaattaatcaaacaaaacatatagtacatcacataatggttctacttttataatattttttaaatatataataaaaggacaaaatccattgtcaatataagtttaaaatatttttttgaaaatccaaatatgtaaatatattaattaggtatattattttatgttatattgggtataaatgatagtgaaaaacaaaaacaaaagaagtgaaaagagaagagaagtgtaagtgtgtaagtaagaattattaaagagatagagaagtttggtgcagtttttattatgagtatatgtacagcaagaaaaatagaactgtagacaacgtgggaatgaaacattattcaaacactgaacaaattacagaccttttttatttattcagaccaaaataaataaaagcaattgacaaatcgagcagaacaactgcttaattaaatcatccacttatatattatggggaacccaacaaaaaaaaatacttactactactctttaatatatctattcttctctgccacttttgtcttctatctatattttattcccccatttcttctcacattcttatcatcaaatatcggtaaatagcggtatctgtattcaaagttttatg

SEQ ID NO: 10742 - DNA, 540 bp, Cannabis sativa
attattattattattatttctttggcttgaatattagagttgaaaaagaaaattgaagaggttttaattttactttttcatcattcattattctctaacactttcattaacaaactagaactaaagggaatccaaagatatgatccctcccctccccactgaagtcctcaaacttgatatgttgattttagcttcaccaactagattgttcacaaaatacaagagatgtctcttaacaaaactaaaattgcaaacctaaaactcacaacaatcttaaggaacagagaacaaagagccatcaatagtccaatgaggaaactttgtagagttaagacctctgccactagacatttggccaaaggcacaacaaccaaccccatataactctcttgaaagaagcatccacaaataaacacaaatcatgtatttttgaagtagtgccaacaacaaatatcactagggagcaagccttaatcaatgtcatccggttccgaaaatttgaaggatctctattcagtctgagcaatcaaaccataagga

SEQ ID NO: 10743 - DNA, 501 bp, Cannabis sativa
gtcaaaactaaaaatcaatagttacaaactgccaataagggcttgctagatgaaaatgaggttctgaagagagaccttgaggacctaaaaaaggagaaagacttgttggatatcaatcatggccagcaggctctccttcgccaaggtgtttacatgtggtatttaagtgtataaaaccaaaaacgtatggtatttataccacaaatatcccttaattaaataatatatttaagaaaagaaaagatgacatcatatatttttaaatggtttcgtaattaaatttacataattcacgagttaacattatttctgaattttagttgtatatacaatttagttttttgttttgaacaacctttactaaatgacaatattaattagcttgatcgaatgttttatgcattagatttttggacatcccatccaacatttgatctgatctaattagatattcaaaaataatatccaatttaatatgatcacaattaaatatccaatgtt

SEQ ID NO: 10744 - DNA, 673 bp, Cannabis sativa
ttgaaggaaaaaattactaatttttaaaaaaagtaaattgtaaaactttacctttatatcttcatctgctaaaaggccccagccacgattttctgttttgaacaactttgtcttagcatattcacatttttgaaatttctgctcacagttcaatgaagagacatccaatatagaagaacaaaagaaataaggtatcagttccacaacataaatggagaactaagggttaaaactcttcaatccatacagtggatataagggcttgtttggcatagacccttaaaaattaatttgtgtttgaaaacataaaattattctttgtaaccaagtagggattgtcgacattgttcttcgataataggtttttaaaaacaacttaaagaaaacagagaattctgataacaataaaaagtaaaataaaaaataggcctggtttcttatttattttgatagcaataaagccccgcaaataaacagtgactttacttgtttatttttgacaaacttttagttgctaaaacaggaacattaacacctatcagaacaaaaaaaatagattaggcaaagcatttcggcataaaaagtttagaaagtagtgtaagtattaaacatttccaatgaaacttgtgatgattcgtgatagcaaagtaaatatgttttttgctatcgtgcc

SEQ ID NO: 10745 - DNA, 560 bp, Cannabis sativa
taaaagggtaaatactattttgtaacttgtattttgtaaaagttactgatcaaactctaaattaaatgacaaatcagatcttgtattttgttaaatgaaaaatcaccctgtattatccaaaatagtacaaaataatcatgcgctcaaatttcatctattttttaaataaccaacttgaagacaatttctaatatgaatagatacaaaaacgtaaccagtctgatcataacacctttagattttaaaaaacacagggtataaattatcatttaacaaaacggagggttcaatcagtaacttttgcaaaacacaaggttcaaaatagtttttagctagactaaatacactactaatcaattcttggcatgtcatgtaggaaaatcttgtgaaataaactatggttctggatcaatatctggttttttaagccaagacaatgttcaagttggagatgttgttgtaaaagaccaggtatgaggtttttgcttacttttgttttgaaattatcaatcttattaatgtgttgatttatttatttctcaactttcaggttttcattg

SEQ ID NO: 10746 - DNA, 637 bp, Cannabis sativa
taattaatcttaattattgtataggaccataaaaatatataattttatttactttgaataattggaagtcaataacttcacgagatttctagttttaggctgtctttctcttatcatctttagcccaaggtaactgccaaaaaaaaaatcaaattaagattagggaaaaataaaagattattaattaggctaatactttatttcacaagcaatttaattaattacaaaagaaaatctatatacaaacatactatcgataaaaaattttatttttagtcataacaaaacttgtgactaaaagtgaaaaagttgtgactaattgtaaattattattcttatactgtgactaaaaggtccgtggcaaaaagtattaatcacaaaaattacaatttattgtaactaaattagtgacaacttatatctaaagactatattttaataacaagtaatattttattgtgactaaaataaaagtcacatttaatcacaaaaaaattatgttatgactaaaaagttatcagtaaaggtagtaattttttgtagtgaaacacattattgatgtgtgtccgtgttaagattaccacttaataattagttgtgtgcgtgtagggtttgattagttaaattgttgttatta

SEQ ID NO: 10747 - DNA, 822 bp, Cannabis sativa
atttataagcaaaacagtattacgtgtggttttgaaactttggtatgtataactaaacttcggtttgagggtaatgcgttaaaagatgctgttatagttgtgagatcattgaatattgcacacataattagattatttggtttttagttaacttaaagaaacttcttatgctctaatattagcatacataaaaatattgttagatctctaagtttggcaataacatcacaaaggctaaatcataaatattgttgtcattggaatccaatatagatacgtgtgtccttattataaatataagaagctttttaataatttattttgtagggtttgttcataaaataattttatccaatttaatttgcatgatctaatctaattcaatgtgtaaggtatgaatatttatacttgtgcgtatattggattatattgaaaaaattgaaaattcacacttatacatattagattttgattgatatgtacaaataatccatcaaatttactccacacatattcataaaaaattatatatacaattaactttttaatgtaaggaaaatatagtaatttaaaactgtaatacatataatataaatatattttaaaacttaatggatcaaatgtatattttctttttatatataatttttttccacatactttagaacaaaattaaaaaaaaattatatatttttttttcttcctttaaatatactattttatttattttaattttttatataaaattataataatttattttattaatttgttgctaattttgtaaaaaaaatatagatatttttataaatattaaataat

SEQ ID NO: 10748 - DNA, 728 bp, Cannabis sativa
gccgtcaaatcccaaggctcaaccctagataggcggtggacactaccaagctggagtacggtaggggcatagggaatttctggtggagcagtgaaatgcgtaaagatcaaaaagaaaaccaacgacagtagtatttttaggtactattgcatgtaatgtatgtttaacagttttagaaccatcaacgattagtgatcctgcagatccatttgcaacttcttagagatattgctttaatggtatttttttttctcgtatttcaaatacttaataaagtactaaataaattattgggtgtttttttaatagtttcagtacatgtggaattattaacaatacattccttcacaatcattaataacgcatttttgttttccaaaaataaaatttttaaaaacaaaaatcttacgtttattttctgattaaaaaattagaaaacaaaagtgttcctaaaatgcacctatttattttactagaaaaaaaaaaccccaattcatataacactaaattcttatttccttcaccatctacctttagcctcccttaccctttttctcttcgccatctctaccattctagttcgacaaccacccaccagccaccattgatggagacaagactcactccttatcaccaaccatcacgactacagaaccccctcctctcttgactcacccgcgactcaaactgagtctattcgctttatgccaagctcggtctaaaaccct

SEQ ID NO: 10749 - DNA, 1038 bp, Cannabis sativa
tcataagttactcaatattgatttgattcacgcaatttaacttgtattttaagctatttcaatgttctatcaagtcaagtctcacacttcaattacaattctgaagttatcgactccatatttcacctctaagggagtaatgaatttaagctacaacttacttgaaacgggacttgtagatacaattgaagctccaaaaattgatgaccgaccttcaaagtcaatttaaacattagatcatcatctacgttcaaaaatagcctaaatatatttttccatattttgaattattttatttccatttaataagacctccatcccttataaggtcagggcatttctctctagaaattagagcatctacacttagccatttttttgtaatccatctcgggagaaataaaagtcgaagtagaagtagctacattattatcgtgatacgaggaatgaactactataaattctttgtgtctctcttatatttacttaacttataattctttcttactaatctagtgtgcgagtgtggcccaaagatctgtgtctacatttctgcatcaacaatccttaatagggatgtgaaattctcactagaatatgggtgtttttttgccattgaagcttttatttgtggctttttttttatttgtgatattttatatggaacacttgtataatggtgtctgtcaccattttactattgttattatagtagggattgttataattatgaagagggggcaagtctctatttgggtaatttagtatgttcttgaatggctcaaaatactttatatggctattcctcttcgtattcgaattaagaggatctctagacttttattgatcccatattttatagatcgctctttcatcaacatgatctcaaatatggttggtcggtttgtcattttcttttattataatctgaattatagggttgttattacttaatttttattggaggatctttgagtgattactattgaaaggtgtgatttatcacatgtttatttgggttgtaaacaacatagtttg

SEQ ID NO: 10750 - DNA, 582 bp, Cannabis sativa
gacagccacaaacagctttccaattttctacccctattagtttgtaagaacttcaaatgaaatttttattatttttttgctagaaattcataaattttgttaaacaattcaatcaaacttctgacataaatcaaatctaagtaattgtctaagaatatggcaaattactcacaatcacccttgaattaatatttttgtaaatatacatattatccaagtgattatgtggcatgattctatttgtaagaaataatcttgttaaaactattataacattaaataccataaattgtagtcattttttcaaaaagatgatataacataagaaaaattaaagtgatggataaaggacaagagtaataggtcacataatacaaagttcaatctatacatgcaactcacaatgaaatccattcagagaaaactaaaatttataaattaataccccaaaatgttatagtggtagttgcaaattgtaatccgaaaaccaaaaaatagagtaacaaataaactggaataaataatgtctaaaaacataaataatttgatctagaattagaaatagcaagctttgtcttctag

SEQ ID NO: 10751 - DNA, 543 bp, Cannabis sativa
gaaacactaacactagacaaactcgacccaatgatatagggtcttctcgtgataacatgaatcgtggaaaaatgcaacctgacaatttagagtcatctcatatgaatgctgataccaatagacaaatgcgacatgatgatcaagggatcactcaccgtaatgagaggaatccaagtggaccacatgcatcagggcatccaccgtggcacctgcgggggccaaaccaaaacgaaagagatagcatgtatacctactttagtagggccgcatctcaaatttcttccagaggcgtaggcctactcgagaagattcccaagaaatagaatcaagcacttatcgagtgggtcaaggacacatgatcagagtaggtcgaccatatcacgtgcaagggaaaggcgaacacgaagagaaggaaatactcgtcgccattatcatgatgaacaagaaagcatgagtaactcacagagacaccagtttgaaaatctctctacaatatcaatcagtagtgcaaggcaatctgaacctgatctttgtgagcatcta

SEQ ID NO: 10752 - DNA, 716 bp, Cannabis sativa
gttatttcctcccttgttggtatcatattcagggtgacattgtcctgtgttgtgacaattgtgctatttggctcttgttggaatgaagggtgagtgcattgatgtttcttgaatagatttctgaatttgtcgatgaagcattgtgctatttccttatcgtctctaatccaatcttcacccgggttgtttttgatacattgtatgtaattccgtcttcgccggactatggtagaggctatgaagaatttcgagcacgtatcaccttcttgaagccattgcactcgcgatttttgttgccaatgaatttcttctctttttagagcctcgttgagttgttggcttgctagctctattgcaatgtaatcatccgggttttttgtttcagtgtcttggagatgagcttgagccttctgtacttgacgatgaacattctggaattgagttttgttccagtgctacagcttctttgttgtggctttaactttcctaaagaaatttagcatgggatcactatgttgtctctttgcccaggcctctttcacgatccagaagcttctggggtctcttgcccacatgttctcatacttgaacagtttgctcttgcagttggtgcctcctaaagtgtcaaggaggagtggcctatggtcggaaccagaggcagagagatgatttatgattgcatttggaaacagtacacgccagtccggagaggcgag

SEQ ID NO: 10753 - DNA, 619 bp, Cannabis sativa
ataatcttttgacccataataacgccaaaataaattatgccttcatttgttatatttattcacttgtcgatgctagtttcacaaatagcgtaacataataaatgtaacttgtaaagttccatttaaaacctaattatacacatgtgaatgtgatgttattgccaaagactttggtcttttcactcacttcaaaattaaatgatgtgtcccactatttattagtgattgggatcttaataattccattctcacagtcgcatccatatctgtaagtccactcacatagttgcacttgaaaatgaactaaaaaaaaattagcattaaatttagatttaacaccaaaaggaaaaaaaaaaagaaaagagtaaaggcattctattctattgatatcaaaaaactatatataaagatgttaagttatttttttttatataatttagttgttaaaatattatttaatttattttgtaaattaaatgatatttttttgtgtaaattttgcagtgctttttttattttaagaaatttttatttacagcttatattttctttcaggaaatttgtcgtataagagaaataattctatttatagaaatttgcttaaatttgaaaattttaa

SEQ ID NO: 10754 - DNA, 549 bp, Cannabis sativa
tattatttatatagccttggaaatgtaagagagaaacattttcatataagccatttgtgttaggtattttccagttggtttttccctctcgtgaactattatatatcactttgttttcattctaagaaaaatcatgacgtgtctcaatgtaaaaaaaccttagtacagtaatatagtgaaacatgttattactttacaataaaccttagtatagtgaaacatgttagtaccttttctcattggatttggagaatcttcattacatttaagaagctatataatgaagattgcattacaaattactaaataatgtaaagtaaaatgactttaatgcttctttttttatataaatttcatgtataaaatttcaataattttgtcaatttattatttattttaacaacaaactaaatattgtaatcaattttcattactatttttatttcgtcactattatatcacatcaaatcaaacatcacctaagtttcgatgtaccaacaaacaaagaagaaaatatcctaacactataaatcattaatattgtaaaat

SEQ ID NO: 10755 - DNA, 538 bp, Cannabis sativa
gtgatttaatggcaagtcaagagtaaggatgcacatggtaacaaggcagtgcaaggaatatggtctcgctcttgttcgtgtttcgtcctactttattttaagcagagaacggagcagaaaatccccattagtaataaagacagtaatagagacccgtttattttggaaaagctccacgggaataggacccgtaggaacatatgccagcaacactaatagatagatgttgatagatgagaagaattgtaggccaaaattatagagtagatgattgatttggataaataacaactccttttatataaatatatgctttcttttcttgtccaactaaaaaaataaagaaggttatattatactttgattgatttagttgcatgttacctaaattggcccctcttcttttctttccccaaacaataagttatgttagaaatacatcaaattaggatgaaatgataaatttaatccatattttctttttcctaattgaaattagtaaaattcaatctaagataattatagtaagaattgttat

SEQ ID NO: 10756 - DNA, 1112 bp, Cannabis sativa
aatttcatatataattaccacgcacagtgtatttttaaatataataatgtaattactagactgtgtaatataactagtaattaaatacttatattcaaacacactttataaataatatttgtgatgtgcaatattattataatttttttttgtttaaattataaaattttaataattgccccctaagtaatcctagctccgcccctgatttaggtggcgtttggttggaggtaatgaaatggaatagaatagaaatgaaacaattttcatttcattcatttgtttggttgcattttaaagtattggaatgaccttccaatagaatgctctttctatcattttggtagaatgactattccattttaaaaaagaagaaaagacattctaatgtaacaagagaaaaattttaatgatttttttattaatttttttttatgcattttaaattttatttcattccattactattcttatatttttattcttcccaaccaaacgtaatcttaataattgaaagaaagtgatgatcataattaaagggcagatgagatgcattttttttttttcaaaataacgaaaacaagaagtaacgattttgtgggcaatctttgctgcaaaacggatggttgtgagtatgaggataaatgccataattatcaaccaaatgattagaatggttgtgtatggacatgaaccatcatcttcatcactactaatcttatggtttgacaatgagaaatcatcattaataatacttgggtacaacaacgccttcaaggggaacactaccatgctcaaaaaatccatatttactactaatttgatttgagagacaataagtggtggtagtggagttagattgtttatgagagttgttttccttaatttattgactaaaaaaagataaatatagttagagagaaaatataattatatcatgttaacatagttcactaatcatagctagtttattgttactatggttagtaattagttaaatttgtttaggccgttttcatttcagttgtaatgtctgttattactatttctcttctgtataaatacttgtacatttcataataatagagtgagctctttcaattgttttcttc

SEQ ID NO: 10757 - DNA, 929 bp, Cannabis sativa
cccccctcataggctcgcacgcgagccttcataccacgatgcaacatttccccacttacccatgcgcatgacacctatccacacatgtatagtcttctttcacccttgctctcgtcattgcatcactaagggactaaacatcgaataacacgagtacttcatcgggagtcgaacggatgctcgatcacttgcacaaaggttccacgactcacccaaatgccccgactcgcccaacagcccatggacttgcacaacatcccatggggtcgcacaatagctatgggctcgcataccaagttgtcataattcagaagtcttagtattttggccataactttgtcgatataaattggaattggattattcaagatgcgttggaaagatgagaaagagacctttgaatcttatgttcatggcaagatctaatttttaacatatcactacaaaaatcctccaacaattgaaacttagtaagttgatcttactaacaccactcatgagttgttaaggggttaaactccgagttgcagggttatacctcgaaacttgcaagcatggatttccaagattaacaatcctcatgccatatgcgttgactcagtcattcttcgagcgactcttacagttgatgtctctcaactgttgggactaatcattgactaatctcaaaaatcaactctatcgatttttggggttaacacttgcccccagtctacaacaattcttttaagtgctcttgtcgactgaataagttaagggatctgccttgccgaggtgtgagaccctcttggttttctctgaggtagtgccccctttgtattgggggcttcccttggttaaactttacttcgtgctgatatgtcgagcaacaattttacttggcattaactgaacgactttaagggtggatatttggtccaataagtttc

SEQ ID NO: 10758 - DNA, 552 bp, Cannabis sativa
ctggccaattaattctaatgttctgtgttctaattcaaagtttataacgatttaagagtttgtcatatttaatgaatcgatccttataataaattatataatgcagatgacacatgaattatttatatgtttgtatatttcccactagatcaatttgaataattaatttcacacttttttgtgtagttttatttttgaaatatattcaaatgaacactatttcattcatatatatatatattaaatgggattatgtaaagaaaattattagtttaaagagttttttttgtttgaaattaacggttaaaattaagttaaatcaattgatcaattatttttttaaaaaaaattagtttaaatatctaaatttaatatatttattaaaatataacttaaataattatttaaaaatattaacaaaatttaataattatctttttatatgaatcttaatttaaatttaaattagatgttaatttaattaattaatcatacattgtaataaatttattagttacattattcaagatatcaaactttatttatttattt

SEQ ID NO: 10759 - DNA, 571 bp, Cannabis sativa
ataggataggaacaacaacatctgaggctgcaacatctcaaatgagtgatgtgtacagctttggagtatttcttcttgaacttgtgacaggacaagaggccttgcgcaacgatatattgggatccaatgccagcttagttcaatgggtaagtagaaacatagtaatcaaaacacattgttgagagtgtcagtttattttgtttgatttttcatgacttttttgtgaaggtggaatcaaggttgagtataaataattttgtggaccaccgtttagggggaagcttcacactagagggaatgagagatttgatcaagttaactctacaatgtatgagttttccaggaaaaaggcgaccgaagatggaaagagttgtcgttgaactcgaaagaattcaagagaaagagatggaactaacaacagttatgggggaaggcactgccacaactatcacactaggaagtcaactatttagttgaaaaaccagaaagagaagcaaagttgttgctggtgttaggcttgaaaatttaccacaacaacaatcaaacaactttggcttgggagtaaaaattg

SEQ ID NO: 10760 - DNA, 661 bp, Cannabis sativa
ttttgcgcaatattttgtggactccccgaaaaagaaaaaatgttgactggatctatagtgtactttattagtccaactcataaatattattaaaacattatttaatactaaatataaattatacacaattttcttgatctagttgataaatgagtatgttattcatttaacaataagtattgctagcgggtatctgttgacatcacataaagtgtcataattttaatatttatgaattcaattcaattaattattttccaaaccaactcttgtcgagatctaaatgctgccaagttgattgtgagtctccacataatacattgttcaaataagaaatagtctggttttctatacgaaatatacagagcaaatttgtacattacattaaactattaaagtttggatcaatatcaattcaaacaaaacttgcattatgtaagtggggatgacaaagccacaaatacatagttattgagaaaagcaattaataagaattgtatatctcatatatggataaaatttccaaataaatagctaatgtgacttaagacttgagacttaagagtacttccatactctctggtagttcacatactgacgccccaacattacaaaagaaaaaaataaaagcaccaacatacaagtatctctccataaaata

SEQ ID NO: 10761 - DNA, 575 bp, Cannabis sativa
aggatgtgcaaagcttgacaaggaagatagcagccctgattcgcttcttctcctgttccattaacaaatgtatcccattcttcaatatactgaagaaaagctaaaattttgagtggaacaatgaatgcgatgaagcattcaaacaattgaaggagcatatgcccaagccaccaattttgaccaaacaaatccacagagaggatcttttcctatgcttggccgtctctgaaaaatgcagtcagtgtagccctggtttgggaagaaggaaaagtctagcaccctatttatcatgtcagtaaaaggatggtaggtgcagaagtttggtaccctttgatagagaaactagccttctatttgttgatagcttctcggaagctacgaccttatttcgaagcacattcgatcaaggtcttaaccaaccacccactaggataggtcctataaaagccagaagcttttgagagaatgatcaaatgggcgtcctacaaaagccagaagcttttgagagaatgatcaaatgggtaatggaactcagttagtttgacatacagtatgtctcgcgcatctctcaaagg

SEQ ID NO: 10762 - DNA, 646 bp, Cannabis sativa
aaaaaaaaaacataaaaaaattacataaaaaaagcccaattagattttttggcacaagcccccaattagcttgagacggggaccccaaatctcagtctcctgctgaaacctaaaccgcaacccaaacgtcggacactagtctggcttgaaccccagccccagtctggacatcctggcccttgactctcgatccttgcccactttctctcaccccacttctcacttataaaaaataaaaataaattttacaaaacacatttttatatttttgtttttaatataaactacaaaaacaaagagttattaaatacttttttttaaaaaaaaaaaaattattattattgtaatttaaaaagtaaacatcaaaaatattacacaatgtagacataggtttttagaaacagagtaatggtcgactttccttgaagtggttaaattatataaattactcagttcgaacatcatgtacaaccctttcaaaaaaataagaatatcatgtacaatgcctttcacttaagttaaaatcattatcatgtataatgtgacaagcttgtaattgtatcaactatcaactcaataaaaccattaaatgttatggcagttgtggtggcggaggaagcggagggacttgtggtggcagttgtga

SEQ ID NO: 10763 - DNA, 604 bp, Cannabis sativa
acattcaatttcagagtactatatatgtgcacatacatatgtatatcaaaatatatagaataataataataaaaaaaaaccaacagaaatatatttaccaaagacatgcgtacatatgctactatatatatagcccagatcttagaattatgaagtggagatcgaaattctggtaagaaaacaaacactatattatcatataatttaattaaaaagagttataataagagattaagcgaaaaaaaaattaccaaatcaatattcctaatttcatttttgataatatattaattaaaagcagcaacagctctaaataatccaaaacatgaacagtcataatctccctttgagaaaaaaaaaacacatatataatcactccattataagcgtataacctgtaaactcttagctaattaaatgaaaaaaaaaaaaaaaacttctttaccttgcatgagataatcaccaaaagccttaaaatctttcccttaatttattccatcgatcacatcaatcaagaacacaaaatcattgacgctcacacaaaccatcctcgatcaaaagccaaatttatgtatttttttcttgagaaaaacatttcaagaaa

SEQ ID NO: 10764 - DNA, 572 bp, Cannabis sativa
tcaaacgacagggggactccttcacctgaagtttgtcttttagaaactgaaatcgagttggtgagagagccttggttaaacaatcagcagtttgatcgtgagaaggaacatatctgacttataactgtttttgcataactttgtctctgatataatgtacgtcaagctctatgtgcttggttctggcatgatacactggatttgtagtcattgcatttgcactcatgttatcacaccagataacagggatggcagacaaggaaatggccatttctttaagaatactttgcagccaagataattcagcagcaagttgagatagtgccctgtactcggattcggtgctggagcgagcgactaccgtttgcttctttgaggaccaagagatgagggaatctcccatgaaaacacaatagccagcaattgattttctgtcatccgggcaacaagcccagtcggcatctgagaatccaattaaattcatattttcactaggtgagatgtgtagtccatgatacattgtacctttaagataccttagaatccgttttgcagcattccaatgagcagta

SEQ ID NO: 10765 - DNA, 689 bp, Cannabis sativa
agttctattaattatatatttagtgtgcaacttaatataaattcgtaatatatatatccattttagatattgactttattgctttaaattggcccacataacccaacttgatcaaatagcatatattgaattccaaaataagattacatagatatattgtattactttttcattccttaatttccttccttgagccaattgatctcaagttcattaatgttatgtactttaacatagccaattaattgaataggtttggatcagcccagcgtggataaatatatacagtccttttattaagtgtaaaaataaaaaactttgagaaaagtggctttccgtttttctttttttattaccaaagtgaaagttaaaaaaaggagaaggctagcccatgaacttgataagtggttggtgtgatgtactcaaaagtctttcaaatataaacgccaccaccaataataaagttaaattaataactaaaataatttcaaacacaagttgaattccatattgttaaggtatctataactataatgttggtaaaaatatatatagtagtacgtgtattttgataggtgatgattatgatcatgatcaaaagttcatctcgagattatagttttggatgagctataatattattaaaggaaaaatctaaatattattgatcttccaaacactttttgatc

SEQ ID NO: 10766 - DNA, 591 bp, Cannabis sativa
ccccctttcaattcacttatgggttataatgtcttgctcgttctcttcttgggattttggtcatatggctttgtgtatagggatgtgctcgatcatgataagtacctgcgctttgtttcagagttaatgtaccctagggaaagtagttgtgcaaggattggacgccttttgattgtacatgctagaatttttgaagaaggcaaagtccacaatgcttttatcaatatgtggctttatctaagaactatgtttgaatcacagttaacttgtcactgaaatggtacatgagagttatgttggtttatgactctgacctgagtgttggaatttggtacgtataccttgaggatatacttattctatcaagtaggtttgttagtgattttcaaatctgtgattaaaatgctttgagaaaccatagaagagatctcttttattgatctgaatatcttatgagttatgaggaccagcctttgcttccttgaattgtctgatataattattgtattactgcatacttgaaaaatgggattgcaacttatccataccaaaaatacaaaaagtctaagtggtaccctttatatatatata

SEQ ID NO: 10767 - DNA, 753 bp, Cannabis sativa
gtggaaacggcagggggggggggggggaaaaggtaattggatcaaatagaagataatttgggtgtgttaaaactagtgctttaaatgaggtgagttttttaacacgatacaaaatcggcacagggaaggtacgagcacgattaggtacaaaaaaatacgaatttcggtacgatacggaacgatactacaaattgacacgacatgcataaaaaatatatccttaaacacgatacaatacgagaaacacgaaaaatatgacacgtaaatactagttcatttgttttactctaatacaatcaccctagaaaagacttagttattttctagaaatcctcattagtttaactaataaaaacttagggtaaaatgctaatatacctttatttccctcttaagtaatttaaaagcttaagagtaaaatgatcaaactattacaccgtttcactgttataatttggtcttttagtgacactatttagtgactcccacttctgtgcgtgttactaaagaattaggagtaatttttagtgacatgcacaattagattctaaacattcaatgttagtctcatataatgtgtgtcactaaaaatatagagagtaggggtgttcgcggtgcgggtggtgcggtttttgattattttttcaaaccaacccacacatgcaatttttttaatttctcaaaccgcacccgcaccgcgaaactaaaaaatcacaaaaaccgcactgcaaaaatggtgcggtgcggtgcggt

SEQ ID NO: 10768 - DNA, 504 bp, Cannabis sativa
agtgttggtatttgatatctgtgacaggaaaatcatgctgatatttccgaagaattgttacctgaacttcaggaggcactgcttaaacagcgttctaattgcatgtcaagttttgaattaacagaatcaagggataaacgttatcaaagccacattcaacatcgattaactgaacttgaaggtaactatttcatataaacgttgtcatttgtctcagttttgagagcggaagaagttgacattgtcattgggacttgaatcccagtctgctcctacacatgcactcacacaaccatttgagtagtctcaaattgcattttttggggcatgtttacgaatttatttgttgcattcccaaatgtccttaaaaaacaagcacttatccagatatcatatttttttaaatcagaattaccttcaagtagaggagaggagttacaaacgaagtgcttgcttgagctttatggattaaaggtaaacttgatggattgaaatttatttgaa

SEQ ID NO: 10769 - DNA, 529 bp, Cannabis sativa
tttaaccgaataactcatggagaatgtctcgtccggagatggccatggccacatctccgacctcaagttgtattcaatctaacagggaggacattttctttattatgataaaattgaccgtttacaacttgacaaaaattgtcaaaaaatttgtaaagtgcggcatttagtaatccataagtaactttaagaaaatagaggatccaaaataagagagagagccacccgaaaagaggaattaaaatacagagtagcaaagctgaagcgagagcaccaaacaagaagctgaactttgttgcattattattctgctgcagtgttgcgtagttccatgagaagacataagcaatgaaagccacaaaaaatgctgagatcatcgcaaattgtgtgtcgaatggagaaaagggctttgattgaaattttatttggacaaaggcagctaagatagatatggtgaacataataattgtatgatcccacattattcgtttcctgattttacttaaaccagatcaagtgtttccatgct

SEQ ID NO: 10770 - DNA, 719 bp, Cannabis sativa
aagataattcctaacatgaacaaacgcagtaaatgtaattataattttgtcataacacttttagatcagattattataaattttatttgacagaaaattaattcagtgtactatttagtactattttaaaaatacagaatctaatttattatttatcaaaataaaaaatctaattagtaaattttgtaaaattaaagtctaaaataataaattctcaataataaaagataaagtataagataatatgacgcgtggaaagaagacgttaatttattaaattgataatcaataattgtatggtttaaaaattatttcccaaacctatgaaggaaggacaacgtatcatgctaactataaggatctgaactttataaatatatttataattatacatatatcttttcaattaagtgaaacatcaaaatcagtaggggaatcatcaattaataattaataaaaaaaatagttcataatattgattgtggaaagaataataattcccatcgatcgaacactattattcctccatttttctcactttcacatcagttagagctcatattgattctccccttttgtttattaatttgactagtagtagtttattaaattttatatttttaaaaatatatagattaatttataataatatactaactcaataagtaccttaataacgtagacatcaatgttaatttggaaattagttctgatgacgt

SEQ ID NO: 10771 - DNA, 882 bp, Cannabis sativa
tcagtttaatgctcctttaaccactaaccaaagatataaagtacaactaaccaagcagagcaaaatgatttctcatcgtgacaaacactacttcagaattaaaacaaagcatttttcaaccttgaaatgctaaaacattttcttttattggcaaaaatagaaagatataatgtatgtagtcataagtcggaacccagtaaattagaaaagggaaaagaaaatgattttttttttttaataaaaaaatagcaaaggagaaaagggtattaactggcattgagtaacaaatgttacacttttggaaagtttggcaaaaagaaagtgattttttttttttgtttttgtttcttcagcaaccaaaaactgtggagtggaagctgaagtgagaaaaagaggtgactaaaaaagtttcatactttctgttgcagttcctttgctaccaaacagaggattaaggattaaatgaggctcacttgagcggttcttcttcccgagccttgtgaccttgtttcggatataacagtagtagctcaacgccaccagtaatgaagccactgctattgaagcaaacacaacaatggccgccagtacaactctctcttttcttctctcctcgtcatctgcctccattatttttttctgagctttgaattaataaaggaagaaagaaaaagaaaaaataagctttgaagccaaccctaaccctaaatgggatggaaaataagttcagtgaagggaagagagtggaccagtaaaatctgagtttctttttggactctctctctctctctccctatctccctgtgagtcactgtcttgttttgtggcgcggagtacagtcttattggagagaaaaaatttgcaacaagtcctcatttatat

SEQ ID NO: 10772 - DNA, 654 bp, Cannabis sativa
aggaattgacagattataaaagaaacatcatatttatgttgcattaagtaaacccatgtgaacctagagtgatcatcgaccaatgtgagaaaatacttgtgatttgtgtgagatgtaatgtggtatgacccccaagtatcacaatgaattagatcaaaaattttagcagaaaatttagttttattaacaaaaggaagtttcttttgtttagctattggacaaacataacaaggttctttattatgcaaatcactagtattacaaccaagaatatttttgagtaaatctaggcgcttatgagagggatggccaagtcgcaagtgccatgtttcagcagtaacagataggattcgagggactttcatgtgcagtgtcaaggacataaagatcctcttccaatcgtcatcttactggcactgtcctacataatgaaaccgtcagcagtgaatttaaaaataataggagcattgttagttagatggctcacatatataacattgtacttgaaattaggagcatataagacattgtttagaataatattgttaccaaggttcacggttccactttgatcaaccataagagagtttttatttggtaagataagtttagttgtaggaaccttacatatacattggaatagtttgatattgg

SEQ ID NO: 10773 - DNA, 753 bp, Cannabis sativa
  modified_base (399)..(400): a, c, t, g, unknown or other
aaacactctctaattcacttaacgagtaagatcagcttctatgaattatgaacacatataaatgataaacaccctgataagaaattaaaacataattacattatatattttcttaaaattttgcatgaaacattgaaagttttaaactacatactgttataataattattgtgagattagtattgacccaatgagagaatatatatcactaccataagttctaacatagagtttgagcaaaatttcgttatgattgtagtttcatgtaaggttaggctaattagtaattttttttctgaatttttatatatgccgaatcgtgtctttgaatgtttttggcagttaaaaattttcttgaactattgagattgtttgatttaaagatttttgtctaatttnnttcaattttactgtttcagtaattgtttatgtagtaaaccatgctcctcaaattttgatatctactaaatcttgtccctcaaactttgatatgtactaaattgtgtcccttgaacttttatccatgttagaatttttttattaaaatgagaaaaaattctttaaatctaacaatctcaatagtttagagagcatgatttggtacattaaagttcgaaaagaaaattactaatcaggctaaatgtaattatgcttgttcaacactacttattgggtttagttcctacttttctcatctgtagtggcatatgatactgattatgcttatgttatatgttttgtttttgtttttgt

SEQ ID NO: 10774 - DNA, 575 bp, Cannabis sativa
atggaggcttacacacatggaaatttcaattttcaatgaatatgaacgttaacatttctggttgtacaatatatccttgtttatttccattgctttgtcatcaaatttgtttatttataatgaaaagcaaattggaagttctgctttgcagcaataacttaattgttttaccataattttaggtgagtgctataaccgtggagagagaatagacagttcgaaattaggtgctgatcctggtttgcctagtgagacttcttcagatgcagaagtacctagagattcagaaaatagtagtagatctgcataccgctgcaagaaatgccggagggtagttgcattgcaggacaatgttgtggatcatgttccgggtgagggtgaggcatccttcaactggcagaagcgaaaaagtggcaaccctttcaataagtctgaggagcctgaatgttcttccatttttgtggagcctttgcagtggatgacagcaggtgagctaatctgtatatttgttgaacttaattttgttttgaaccttacttgtgtattttgcgacttaattatcttttggttttgtt

SEQ ID NO: 10775 - DNA, 741 bp, Cannabis sativa
ataaaccataggtaattgggtaatgaccaaacccggttgtgtgtcatcgtcggttgtttcctcctccgtgacgatgcgtttcttccctgggaattgacgacggcactctctaagttctgcagcatctccattagcgatagctctatgcaccttcaggagattacgagtagtgggattagtacaaagttttttttgcagaacccaatcatggaaccacttcgccagtggcgaggagaaagttgatttttcaggtgcttcattcttcaaccaaacaccatacattgggaaaaaattgtcgttggcgtctttgattatggtgggtgatttgaagcacgtactctgctcatgagtaaggagaccgcatttgaaacacaactttggaagcttctcatatttatactgtatccataggtcattaagtctttgccttcgtaggtagaagcctgaaaagatgggtttgttaaggtctatagtggccctgaaacgtagggaactcatgcccacaacgtcctcaataccagttgggagttcataaactggtgaggctgttgaagctaactcctttaagttagataaattccagtaaaagggagggattcgatcaatgtggacccagataggggttttgtcaaacctaacttccgtgggtgaaagccaggcaggccatggcatgataactatcaacgccccgcaaacaaaccacggccttcgtgccaatacattcagtgcgtcctctcttcg

SEQ ID NO: 10776 - DNA, 585 bp, Cannabis sativa
tatatcaacaaaaaatatatattaccttgtcttatataataactaaattaaattaattttttttttttttttttgaaacgaataactaaattaaattaaatacttattatatatcagacatacgattttttttattttttttgccgaagtaacaaaaatgatatagtattaaatttagggttaggaattttggcacaaaaaaatcaataaggtagttgaaagaacggacaaatattgctagcgttttaattaaaaggttgcaatgtaaatacaaaagaattaagatgggaaacttatgtgcgaaagctttgttggattgaagatttttgctccaaaaaactgacaatgcagaattcaaatttattgtagtctttagggacttaataatcatatttttttgttttcaaatttgtttttttattttgaaaggttgtttaatttttatttatttatttatttttggatcagaaagttaaatctattgttaacaaaaccatttttaacctagcaacacctcttaacaaaattaaggcctgaaaatatttatacgagtataagcctataacttttcaaactattccctat

SEQ ID NO: 10777 - DNA, 536 bp, Cannabis sativa
tctaaacttatcgaactcaacaattaaaactaagtaatcataataaacgggtatctagtgccttaagctacttcgttaagttatagtttcaaccacttacgaaaggtaacatgtactacaatgttttctattaaaaaagagaatcacttctaaatgcaagcagacacatcttcaaagaaatacgagtgtatcgaagccttctaactaattaaacttcaaagaactcccaaacttcaacatttagaacccgagccttctgaactgctaacactcattaaaatataaacatggaatggcataccctttggttcacagtaaatcagtatggtatgtatcattgaaaattacttcacttgcttctagtattacttgatctaagttcgaaaaacataccatacaatgttattatacgaaaattaactatactacagtcttaacttaaatatttcataccttaaaagatccaccagctaaaaaatacaatctcaactaaaaaccgaaaagtaacctagttcccacttccccgcttcacatta

SEQ ID NO: 10778 - DNA, 1348 bp, Cannabis sativa
ctcgggttccaaacctgagaatttgacctagtgaactgggattggggagtgtacttgatcattagctggctcgataactatttgactcaaggcacactttttgttagccgtggttttcctcgatctcttcaagggttccagattttctcctgacgaagcctctggtgttgtaatcctcttctttcccttttcgcctgagctggtaacaaggctctcaaaattcatatatgcgaggcaaaagacagttagcacttgcaacaaagtaaataagggaaagggggggagaggtaatctcccactcaagaaaattaccataatatcatctgatgacgaagaagaactatagtaattactaaactccctagaaccagtgatcatatatatgtcataaggatttattggagatatatctcaatatgagtctagatggcttgccctatccaagttagtatcatactgttcgaaaattctgaagtaggagctattacgacttaattggacatgacacatggggtaccagttgtcaaacctatgggctaggcaatctacacacaaacgatcctagatatagaagttatactggctatcattaaacttaactaacaaggtacgttcagccctatgcacaggaggagaccatccacaattattacctcggatgcttcttcttcagcttcccgaggggatactttcttcaagaagtgaatgcgagccacataatctttgtcttcctcatcagttggaactgggacttgctaccacttagaatattttgaattcttaaatacgcaggtagattgtttgctgcgaagaagactacagatcttcagattgatttcgttcaataaaaaactggctaatcgcaatccaaacgaaaaacctaggagaatatagtgtcatttctccatctcgagagttggagtaggccccttcgagactgttgtcaatacaataagaaaaataagtaaatgccttcaatttataaattaaaaactcaaaaccaagtttttaagaaaaggtaatacttacgtataaggaaaaatgcagttgtattgatgggggagagatcggatgtccagaagaaatcatccttgaaaacagttttagtgggcagcctcacaataatccttcgatcattcgtgtgggtcccaaggtaatggaaaccacctgatcctcgcttccttgcgggataggccttcacggagtaaaatataaattttcaagtggagttggacacacccactccataattttatataagacctttaaactggccaaaatcttatatgagctcggaattaattgaaaaggaacaattccgagataattgcaaaaatccttgtagtaa

SEQ ID NO: 10779 - DNA, 552 bp, Cannabis sativa
tgtatgattctttgcaggaaagagaaaggagggcaaagaagaaggaaagaaagaaggcaaatgaaacagatgttacgaacgaggaagaagtggactctgctccaacttcgagctcggaagttgctgctgctactcctattgagtctgaaactaaggagagatctacgacaacagctgtgaagaggcctcagaaggggtctcaattcgtaaagcaaagcagggccaagtctatgcctctgcctcttcgaaacagaggtaagagaaaaatgcagccatggatgtggggagctcttacactcgtcgttgttgttttggccctttttttggtgggcgttgggggcttctcctataaatcttgcctgcaatggttgggtttgtgaatgagtgaatgaatacgaggcttatttaataggcgagaataacacagtttcggcgggacattcccaaacatataaaatatatttttatactaatatttatctttaaatatataggttgattctttggtcatgtttagggggtttgtgttcctctagtttgcatttggtttac

SEQ ID NO: 10780 - DNA, 788 bp, Cannabis sativa
aagactagaagaataaattgatgtgctgactaagttggtcaaaaaataaagtagagcattgtcagactccgaggataaggatgtagaactttgtgtcagcaggatcacggaaaatccactcccaaaaaactataagatgccccacatcgaattgtatgaagagagaactgattcagaagcacatttggccaaatataataagatgatgcaagtcgcccgcgttagcaatgatgctaattgtttgtgtttctctctgacttagacaaagtctgtggtagactggtggaaacggttgggtccgggatcaatcgatagctagaagcatctacaatcagctttctgcaagtagtttatcatcgcacgtgaaaaagacattgaagtcggttccctaaccaatgtaaagcaagaatctaaccaaagtttgaaggccttcattcaaagaatgatggaagctgtcgccaaaaccaaggtctgctgcaatctgaagtttatggctcttgtaatatcccgataaacctaatggtaaataattagggtttaaatttattttatgggttaatcaagtaatgagtaggattatgatcctactaatttatttcagcataaaattttaattttgctataattgagtaaataagcgtaagttgttaattacagagatttatatagcatgtgtgaatgtaatatgagctatatatggaataaaaatatttttagatttggtgatcctgaagaattgataagtggatatataagcgtagtttgttagtgacagagatttatttgaa

SEQ ID NO: 10781 - DNA, 675 bp, Cannabis sativa
tgtattatctagagaacttacaacagataaggtccccatgacaaaacacaaaaatgaacccccaaacctataaaacccataattccatattgccccaaaaattttactcaaccccacgcacaatgtggatatgttcacttctaagttctaactaaacaccaaaatcaagtagtaagcagtgacaatattcttgattagctacaacgaagatatgaacacgtgtcaaaatcatgaggaatgtttcaagaaaatttgattttatgcacaactaacattatagataatatacaagggagtcaatgaaataaacctaaaagctaaaatcacaagaaaggcttaaaaaacaaatgcaattaattacataaaactactagatgaaatcactaatcagaatgtaatccaacactgccaggaaaagcttgcataatcactacaaagcactaataagtaataaagcttgcaaaagtggattttattcacaagcctagacaacactgtgtaaatgaactagaaatatatacagtaaaatcttcgcataagaataacattgggaccaaacaaatctaattctaaataaaaggttgaaggtattggtaccaaaaggaatcctaacacccaaatgtattaactttaacaacaataatagtaagaacttactaataactattattcaaa

SEQ ID NO: 10782 - DNA, 671 bp, Cannabis sativa
acacgattataatcagaatacactcatcttgttggctatgggtattgtagccccagtaaaagaaatattaaaaaattaaatatttttcttctaatttaataaatatattacaaaatgataaaaaaaaaaaaaaccctacaaaattaaataaattaatttaaaaaggtaagcataaatatttttcacaataatgaactccccacataataaatattcttggtctatcagaaaggagtgtaccgaaagactactacatagtacataccctaaacttctttcacttgttttcatatcacttctctttaacacttaacttcctaataatgagtactattaaacactaaatttgataatcttttatagttcctaacacaacaaagctttttattgagtttatgtttagctagttcattactttatctattggtattgtcatctcttaaatctgtaaaagtgagtaggttattgtgtatgttgctttcatgaaagcaatgacctaacaatttgtccacgttgaaatatatatttatatatgaaaatatatataatgaatattacatgaaagataattaaatgggtatcattaggaaaatttgagttgttatgtttaatttttttatttatttaaataaaattatttttacattatttggcctgaggttattccataa

SEQ ID NO: 10783 - DNA, 972 bp, Cannabis sativa
aaagagaatatggagtataattattgatcatgaaaactatagcaagagtactaattaattaaataaattgagaatacactagaattagaagactagattatatcatctataacatcaatatatagattggtgttataataaaacaaatacaaacagtttgtctttgtcaaataatttttttcttatatatactttgttttttgttcttttatgtattattttttggtaaataatttcgttgttgatatatttaatgtcatatcgatgtggtactaaaggattaattagtaatttttttttttatcttttgtgttttattattttttttttatgaatggtttgtactattattttttataaataattttttgtactattatttctatgtgataccttaaaatgttcaataccatatttattcaaatacacaataattgattagtatttttctaaataatattaaattaaaatttatgagaactgatattaaaatatatcaataacaatattaccttgtgttttgtactttagtatatccctaaatattttcattattaatatctacatatatttattaacttctattagaattttatttttttttattattattatatataagtttacaagagtatctttaataaaatatgtataaattgtaacatattttgctaaagaaataacttgtgatattttgcattaatttttagcattatacataattgcgaaaattgattaaaaatttatttttttactttttttttggttatgaataattttcaataagtaaagctacactatgtcttgtctaaatataatttctttatttaacaattatttaaatataatttataaaagtaaaatgtatgattataacacaactttttttatatagcaattagccgaggcatgtcctccacacgcctagtttttatatatatgtataatgatgtgaatatttaatagttgtgc

SEQ ID NO: 10784 - DNA, 680 bp, Cannabis sativa
cttgtaattgacagcatattgacaatatatgagggagtatttgacatttttgttggtgacagtaaattgataagaaacactggtaattttttattaacaatttgattcaaaataaacaagacttactttccacaaaaataaaatacaccattttcttctacaagagttataattctacatttagttcaatataatgatatatttaatgatccaagcattttttttttctttagagtcattgcttgacgtgaaaacaaaaggttttactgatagaaatcgtgctctgtatagactgtattcatatttaacttaatctgatgcttatgataaattgttattgttagttttagatttactgtatatatgcagaaaactaactagtaaatatgaagaaaatttatgaagtgagagcattaagaaattgacccaacattaaacctaactttgaaaaaccagagacaacttatatcagactatgagttagacatagaatgaaaatttgaacaaactcctaataatagtataaagaaaataagaaaaaaagaagaatcagaaagaacgtagcgattttgatcccatgaactactaacagtagccatcatccgcatattactctcatcatgttcttgtttacaattattgtcttccactcctatttatagcaggaggctaaccctaag

SEQ ID NO: 10785 - DNA, 847 bp, Cannabis sativa
  modified_base (250)..(266): a, c, t, g, unknown or other
tttaattaaaaagataataataaattaaaaagtttaactgacttctgttaatcaattattagatatttttttttttattttaataaagaattgaaataatttatttataatactatatatataatctatagcatcataaataaaaacaagaaataacacaacttaaatacggtaacaagagaaaaataagaattaatttttcactcttattttctctctcttgtgcgcctttctctctctctctctctcnnnnnnnnnnnnnnnnnctctctctctctctctcctcatctcacacgcatacaccattcaaggtggtatgagattgtgatcaagcctatctccattacagtgtctcatgaattgagaatactctgtaatacataatttttttcatcctataagatctaatagcccactctattcctgagtgttgaggctggcttggaagattacgatatgaattcctcaacgatagttcttgggttggatgatcatttacactagtactttcgcggtactgagtgcatatggtattatggctagctgtactcatgtccagaacattcgaaaatcatacgcatttgacacggtttaggcttgtgaataggtgtatgggcgcctatattacaattcaggttatatgtttatgttttatatttttcttactgtgtctatcgactcacaaatttatgtttcgtgtgtaggtaaaggctagggcagaacaacactgagtaatgaagcttagtgaagattgtatatatctagatcgttagacttggaatgttcgaatcttcgaaaaaaatatgagctcagatttgttagtcgctgcgacacttttattttgttc

SEQ ID NO: 10786 - DNA, 947 bp, Cannabis sativa
atattattattaattactttatatttattacatatatataaataccttttatgatttattatataaatatataatatgggtttttgtttgtctttaatatcagaaaacaagcaaactagaatgcctttttcatctttatgaatatcataatttgaaaatagagagttataattaattattataagctttttctatttattacgctttagttttttgttttcatgggtaccgaccatactggttttagtggctttttattttttgtttttaactttattttcatcgtatatgatataaatacataaaggccacatgtttttattgaatctgtgcctttctttagaccaagctatagctagcctcgatattaattaagattaattattgtaaaattattgcaatgatgagattatttcttattacaaaaattattattataatcatagctaggtgctaattaagtttcaatgatagacacgaaatttgtacacaaatagtgtaattgttctctaattaccattagcattaattatatatacctattttataatttgtacacaaatatcacttctctttatgtacatatattttatatataaaaggaaagaggaaaggcaatttaaacattcgtatggcaaattcaaggtcgtcttgactgttttattcaaacaaaaattttaaaaacatattgactgttgacccatttctagtcacggttctatatatatatatgtaaacacccacccatgtttcaccaaaaattatattatatatataatatgtgttgaaaataggttgaatttatcgaattaaaatttaggtagagttgcgaatttcgtcgctctttaagatttttgcggcactcttcagaattgggcaagtaggctatcaatcttatcgtccctcatgataaaacaacctaattatcgaaactctattgcacgata

SEQ ID NO: 10787 - DNA, 1166 bp, Cannabis sativa
aatacctatacatgttataatgaaccattcccaagtggtaaaatcaacaataacatgaaattacaaaaattaccatagttgagccaagtttgagttcttgagctcaaacttgctcaaagccaacctcaacccttaaatctaacccaaataatcttaaatcaacttaaattaaccttggaaactagcagcaaacaattcaaacctaaaaagcaactaaaactcaaagatgcatgcttaaactaaagaaaaattataaaaattataagagtatgttctagggttttacctttggatcttagctcccagaattctttgaatttcagctgaaagctactgaatttggagaagaaatgttctagtttcttggtgggccgaattagagaaagagagaaaagaggtggattatcctattttgtcattttctaactaaacaaataataaacttaattaaatactctaatattggccaactgccaacacaagaagaggccacctatcctcaagatccaaaaatgaccataatgccctcacacaccaaactaaagggtaaactaactttaggggcaaatggtcaaaactaaaatcccaaccaatcctgacgtttccaatgtctaactagatcgccccgttattctaaaaatactaaattacactaaagtgactttataggccatatgccgcattttactgttaccgaatataaaactatgaaaaagcataaaattcatatataatataaatagcacacctagaattcaaatattaaaagtaaaatcataaaaataataactaaaagtctactaatgaaattagaccttaattatctactaattctcatacaaaaagtaagctatctttacacctcatgactatcataggcatataaatagataaagtacgagttatgaacattggagaataaagttaggattaaatctaattaaattcataatgttttgaacattttatgttgaaaactcaatttagcacactcaaaattagagttttataactcctttccacccttcttcaattctcaacattatcaattcattttaatcacttgaataagtattgtaacatcttccaacagttatataatgatagcttttaatcacataataaaatttgtgtaataactattttattaaacttaatttgtgacc

SEQ ID NO: 10788 - DNA, 558 bp, Cannabis sativa
ttttttttttttttgaaatgaacaagattttcaaccaaagaaaggaactaaagaaatcaggttacaaagatctagaaagattagaattctaattgtttcaaacagactcttctccagtttttaaagttgtttgagccagattatgcgccatggtgtttttcgatctaggagcaaatttgactgaagcaccaggaaaataggacaaagatgagacaatatccatgatgaagctagaaagggctgagcagttggtaagcttcctttgaattcttgagaccaaattctggcaatctaaaatgacaagttgaatgggaaaacgaactgcttgacaccaacttaaagcacgacgaagggcctctgcttcagcaaaaatgggagggagaccttaaaaggatgaggaggagaaacatgcgataagtctgtcttgagagtcttaaattatagcaccatagacatgtttattggattggaaccgaagtgctacatcaacactaactttaaacattcctagagaaggcgacaagggtgactaatcatgctaagagctagtttggcaca

SEQ ID NO: 10789 - DNA, 771 bp, Cannabis sativa
ctttaattctaatttaaccaattttataagcacatttattatttatttattaatttaagtgaatattttccaacagattctccatggctttcgcttctccttccctcgatgtgggagctttctctcccactttcttcttatccaaacactcatattctcctcacaagcctcgtcaatggcgaatcatttcaaccccaacatcagttctccgagaatggaaagattacgaggacgcagtcaagcgcaaggaccttgccggtgctctcaagttcttgaaaaccagagaagaaaagtcacccaatttggtgattccccttcaacccttgaatgggtcttcttcaaagttggatctttttgtgtctgagagagattgggaggttttggacacttgtcttaatgctgatgatttgagacttgttgctaatgcttatgcatttctcaaggacagaggtttcttgcccaattttggaaaattcaggaatattggtaatcatttttggattttgattttcttcaaattctatatcatgtcatgtttagtttcaatttaggtaaagttactaactttttggaagggagttgattgagtttgaaaacccttaagaggttttcatttagagaacaaagttttattagcttttaagtttactgactttggttgaaaattcagtttctcttatgtacatattcatcatgaattgcctaactatgttgttatgtttactcttgaatgaatctaattttgttaaccctttaatgaattatttaaca

SEQ ID NO: 10790 - DNA, 741 bp, Cannabis sativa
catgagtatcaacagtaacttgtcatttttgttgctgaaaaacaaactagaattagccttgctgttatagaatccctaatccaataaagagtgtttaagtttatcaaaccatgctctaggagcttgctttagaccttatattgccttgtttaatttgcatacatgattgggaaattgaggatcaacaaagccttgtggttggtacatgtatactgccacttttaattctccatttaagaaaacattattgatgtcaagttgttgaattttccagccataagtgacagtcatagtaaatataagtctgatggtacaagacttggcaataggactatatgtttcaaagaaatccactccaggtacctgttgaaaacttttggcaaccaaacgagctttaaaactctccactgagccattagcatgtaattttattttgtaaacccacttgttgtggacaattgtcattttagaggaaggaggaacaagtgtccaagtcttatttttttaaggcatggatttcaatattcatggctttattccacttaggataagccaaggcttctttgagacatttaggttcagtatcttgaaaaatgatggccatgtacgactttgatttaaatatgccatgtttggatcgagtaagtatagggtgatggttatgagttgggggtagattctgaatattcgagttagattggacaaacacactattctaaggtgagttttcttgttgaatag

SEQ ID NO: 10791 - DNA, 521 bp, Cannabis sativa
gctttaattaattctaaattttaaaatagtatcagaattacttgtcatcagaaactttcgttgtttcttttttagtttctatttgtatgttttaattttgttgcaatcacgacaagtttaattaaattaatattgtcttcattatttttctcttagctttagaaacttaatatagaactagtgactgtcttggtcaaaatgtaaaagaatatatattacttataattttttgattgaaaggaaaaactctttcattattaaataagcatttctcattctaagtaaaaatcccaatattctaaaaatagagtaaaattaatagtcctaatggaaagaaaagcaaaaagcataataacattacaaaattgggattttgtcactcaaatacatcaaatttaatagaaaaaagaaacttctaagacccaagtatgggaagtggggttggaaataaaggatgcaaaagggtgtgcacttgaaatttcctagtgattaggttgcttaaaacccaatgtataaatgga

SEQ ID NO: 10792 - DNA, 869 bp, Cannabis sativa
  modified_base (569)..(582): a, c, t, g, unknown or other
cctgaacaactacaagaagagtcatacaatacaacatacatttagtattctcaacaataccatataggcaacctcaattcaaaacataaaacatcttaaaattaacttttttttttcacataaatggatcactaaatacattaactaaaacaaatattaaaaaactaaactaacaacatactatcaaataaaaatttttctattaactaaaatagacatcggaaatttgttctagaaaagaaaaggaaagaaaaagacctaggaaatgggaacttcgtacttctctatttggactaggcccatttaggaaatccactgcaatggcccgatcctaaattactgaagagttgggtttgatatttcagaatgtttttaagatatagatttccaaatatctactacacatcaaaacaagaacaaaacaaccaaaaatacagatgacaaaaacaaaaaataacatctaaatatcatcaaaacaataacaaaaaataaaatacaaataacaaaaaattaataacaaattaataagagtacatgataaaaggactgtattttctgtaaataaaatnnnnnnnnnnnnnnaaatatttaaaattccgtaaaaccgttatttttgtatatgtgaaataatcactatattaaaaaaaaattcaatataattttcaaaaataaaataaaaatgtttatatatatatttatataaaaaatattgaaaaatattataaattaaaaatattaagctatatataagaatataaattatttaatttcattcatcactaaataattttgagatggaattatcttattacaaaacaacctcatgtgatttaagaatttatacttttcgatttttttatgggccccgt

SEQ ID NO: 10793 - DNA, 599 bp, Cannabis sativa
ttcttttaaatgtgtatcttcaatatataatgtaaaatgacagcacataataagtacaatatgcaccacaaataaaaaataaagtttcttgattaaaaaaaaatcttatttatttattaatcaatatattatttctcacaataataaaattatttattatattaaaaagaaaaaataaatattccaaataacattttttttattaataacatgattattttcttttttattgaaccatgaatcgttgttttatccgaaactataacataatcactttcacgataaatatttcagcaagtagtttggatatgtagagtggataaggtaaaatatacgactcacacgtgtctccacgcatggaagccacgtgatcaccatattttaattcacatgtgttcagagtaaataattaaataattgtttttgtaaaataaataaatgtgtatatatacagtcacagccagcagggttcttccttccactgtttcacatttaactgtacatccatccattgttttggaccaaaacaaaaaccacctatatataaaaacaatagcaaaggtatttatgagaaatgtttagatatgagggactaaaca

SEQ ID NO: 10794 - DNA, 680 bp, Cannabis sativa
cacagccgagtgaatagcactggggtccttgcctaatctctattaatcagtaagaaagtcacgaccccaagaaacaacaacatttagagaaattaatttatcatcatgaacctttttattcctcctaagatagactcttcacataataatcaaaattaactcgaaagaggccacatgcaaaggattgagaaacttatggatgaaattataaaaatgatgacaaatagcaagaggattccccaaagttatatcacaaagttcgctacactcaatcaaagatgggcaccaccacaatgcatgatgggtagtttttacttgagtatcacaaataggacatacctcatttgccaataattcatgctttgtaagattgcatttaatttaggcatagtttgctatgtttctttaagttacttggtttttttgtcattctttttgtgttattattatttgaattattatgattaaaggttgtgaaagcagaatgcatgacaattatcgtggttttatattggatcatctcttcagaattgggagtacatgtggttgaatctaatttcttagtagttgtatcgtcgttcgataatagacgttcttatttcaatgaatctgattcattattagaagatgttgtaagtttgttgttcaaatttttagaagttttataatttatatatgtc

SEQ ID NO: 10795 - DNA, 555 bp, Cannabis sativa
actaaaacaatgtgtttgaagttaaaaaaaaaataggtgacagcttaaaaccaaaggctataccaatagcaatggtgcaaaaccatcgattattctatgagatttttaaatatcaccaaaactacccaaagtatagatcttgagtattgatctcatttttttttctaatcggtgtataatatttagtaatgataatgattttgtacgattttttttttttttttgagttgataatggttcaatatttttgctactgtttggatttgttctggttttaaatttgtgtttcaatattatataataataattctttgaactcttaattgttttagtgatttttttgtcggagctatactaagttagttttatattatatgtgtacaataactttgcgttcacattcaaattctttctcaacctcatactataaagatgaaattaaagctgcccttttctccaatattccagatagtaaagcatcggatggtttcaatagtggttctttaagaaaacttaagaggttgttgataatagattttatgaatgaagtgctct

SEQ ID NO: 10796 - DNA, 526 bp, Cannabis sativa
aacacacctctggtcgttcttccttatcaagatcagaagctttcgaatcaagcatcatagcttcaacagtcagatccgccgaatgctccatccaataattcttctgaatctcacgctcttgttccaacactttcgcttcaaaacaaaaacaaaaatcagaatcaaaaccattaaaaagcaaaaacaaaaagtaataaccgtaatcgaacgttaccattatcaacagcagccattatggtcgaatcggaattgaaaaagcaaagaataacaatcgaaaacaaaaacaaaaaagaaaaacaagtaatgataatgaaatcaagatccttcaatggcaattcgacttctggaaaagctacgagatcttcggttaaagagtcttcccttctgaaacataggcagctaagctaagctaagctaagagcgtaaccgattgagaagaaggctcttcttgcgtggattcacaagaatggcttattttccgtttgtattgggaaatggagtttctcagctccaactatttatagag

SEQ ID NO: 10797 - DNA, 784 bp, Cannabis sativa
aatttcgtcttttctcaattttgagttgtaaagctggttttttttttttataaaagggggtcacgaattttagaggacttacacaaaaaagaaccttataaacacaagaagaagactactggagtgagcatggcgatctgatcgagttccccacctaattttctctgctctttaatttctttatgtttttatctactaaaactgattttattccatgagttaattgtgatttgactatttcttatttattgttcttgtggtttatttatccttgtttattatatgtttaagcttgattactttatgcatgatttatgatcctaatgtgaaatatgaaaagtgaatattaagaatgctctaaattaataaacataggttttgatgtgaaacgaaattatttatataacttgtgtgacttttagattattgtttaatgcaaattgtatgttgttctatctcagagttgacatgcatttatgacatttatgatctaagaaaaataggttaatttataatttgtcatcacatgcatagaaagaagaagaatgattaattagtattaataattggctaatcaaagcaattaaaattatatccctaatttcatatctattatgaaacctctttttatttgtttgttttatttaatttttgtttagcttatttagttttaaattctatctatttcattgttaaatagaaacaagaatttaattaattggtacttagttaccgtcctcatgggaacgtctacttttattattattacttgtaaacgatatgt

SEQ ID NO: 10798 - DNA, 1095 bp, Cannabis sativa
taataatattttgagtactagtaacatttataatgtgtagaaacaaattcaatactatacataagatgtatacgtcttttattgtcaattgattttgagataaaacctcatacaccttatcatatactcaccgaaccgcttgtgatttgtgatttgggctaaaagcgccacttgtgaccgagccgtgtaagatttgtaagtaaaaatatagccaccatcttgagaggatgtgtggaaactaaatacaccttacacttaataatacactcacttaatcttactttctaaaccatagtttatatttttaagttatataagacgtgatatataattacaactataacaatatgacaccgaagataatactagacacgattaatatttttttagcaaaatacaaaaataaatggtggtgcaagtcacatgccgtttaagttgtgtaaaagatataaatttgatgtatatataagattctaaaagatatattagaatatacccagaatcaagtcaagctcatccctttaaccgcttaatatattatatatatatacacatatacataataccatttttacaaacacactcttcatttttgttcataaaaaaattaatcatggaaggagaaacctcaaccacagtgatgatggactcttcttctaagccttataataattcaaagttcgctctccctgtagactcagagaacaaagccaccgagttcagattattctcagcagccaaaccccatatgagagcttttcacctctcatggatttccttcttctcatgcttcgtctccactttcgcagccccacccttaatcccaatcatcagagacaaccttaacctcacagcctcagacataggcaatgccggaatcgcctctgtttcgggtgcagtcttcgcacgtgtggcaatgggaacagcctgcgatctcttcggaccccgtttagcctctgcttctctcatcctcttaactgctccggcggtatacttcaccgccatggccgattccgccacctccttcctcctagtcagattcttcacaggcttttctttatcaacttttgtgtccacccagttctggatgagctc

SEQ ID NO: 10799 - DNA, 786 bp, Cannabis sativa
tcaacctatgattttttaaattttgttaggatttttgtttgttctctttgttttataattcaaaaaacctctctcataacttatttttgtctctttaataagtaatgccatttttgtctcttatttttatttatttatttattctcgtacctactcgaattgggtttttttttttttaccataattaattcgaaaatcaaaagtgaacttagataacaaacaagagtgtgagtttactttaaataatcataggttgattacgattatgtgttttaacaaataatttgtttagtttctaatgaattattaaccatagatgagaatatattgcaaatgaattagtaggaaggaaaagaatgggaagaaaaaatttattctcattttttgtttgaattaaaagattttattttatatttaaaggcaattattttaaaatataatataattacataatttattaattacactgtaatttctaaacacagaaaataataaaatacttcatttcagagcagaaaattcattatggcgtttgatatgtttaatattttaatacatcacatattattactcataaatcataaatataagaaaatgctcaaaacattggttttcactaattcatatataacgaaaataaaaattacaaaatggcaaagcaaaaaaaattgtttcctttaggtgaagcacttttattcaacgctatcaattaccattttagataacccctgattctccattaatttatctatgattttctttaatgctggagcacccataccaagt

SEQ ID NO: 10800 - DNA, 703 bp, Cannabis sativa
gttggtactcaactcacttaaaacatgtaataggcctatgccaatgagaaaagagaagatgaaatttttgaaatccaatagtaaaaactattttcaaaaatttctaaaagaaagaaaggaggaagatgagacattagggtttctagtttcatctcttcctttttatagtacataatatgtttaagttgaatcatatacttaattaaaatattatgataaaatattttgagtaactgtgattgaatctcactcaaaactaaatctatcaaatatatatatatatattatcattttaattaaataaaaattattattattatacaattatatatattggcaaaagtataaattcaattttttttaatccaaaattaaattcaatttttttttaatctaaaatttatagatataattattataatcttaaataataaataataaaatcttttatatattatattaattcaattctcaataattagaaattaaaaatttaaatataacaatttattaatttgacacaatgtttgacatgtggcatgagagacgacgttaggtgcagaatcttccctgctcgctgactggcctagctcaatggttgtaccttacattttctcgtggatcaatcgactcatggaaagatttagtagatgcttttggcatccagtttgctccttcccaataatgtcaaatcgagcccaat

SEQ ID NO: 10801 - DNA, 605 bp, Cannabis sativa
ccatgagccgataatggaaggctgaaggaggtggattgttgttgttatgctgacaaggatcatttgaagcttgggacaaactggaagagtgcttgttgcatgttgtatactgctcgatatacgctaaaccatcacgaaggacctgatctggggagggggagagaccctcatgaatccaagtgttcctgcagttccaaagcttccacaacaggcaaacaaaaagagagtaatgtccagtactgaattcagtggcagcaaggtataataaatccatacaagtaaaagaacagtgtgcattgataaaattattaaaatcagttaatttccataccttctgggaagcagggcatctgaatagagcatgctctagggtctcatcgtggtagtgacatcggctgcagtgggatgagtgtagtatttgcctgttaactaggtttcgggttgtggggaggatatcatagcaaacccgccataggaagtgtttcagtttgggtggcacgggaagggcccaaagttttttccaccagtcattggagaatttactatcagatgaggaaggttcattttgatgaagtttggtgtgtgcaaggtggtagcccgagttg

SEQ ID NO: 10802 - DNA, 898 bp, Cannabis sativa
ttcatgatttttcattggaatgtcatactattttccaattttaatatttttctaattatatataatttacttgagcagcaacttgcaaaattatgagcactgtcacctgctcaattcctgagttcacttgtgtttcacctgcaaaggtaatcttttaaattagattccaagaaagtaaaaataacaacttacattacaacactctgtatttctatttttcggcatctaaatcttaagtttttgtttgttgagcagcttgtgaagctacttgaattaagggaggccaatcatatcgagttctgtaggattaaaaacgtagttgatgaagtattgcacatgcacaaaaattcagagctcaatgaaatcttaaagttgttgatggatcctacatgggtggccaccggattgaaaattgactttgaaacattagtgagtggtgtattaagttctgttcaatacttgttgacaaaggaagaaagcatgattgcatcacatcatagtaaatttatagattttgtaatttgtatcagccgcgtaacgtttcaacttagattaaatgtattagtacttgctgaaaaaaattttgctttgaatatatttatctctgtaactttagttccaggtttaattttcatgcacgccatgaaattgtaagattttttttttccaggttgataattgtaaatgggcttcggataagattggtgaaatgatcactttagatggcgaaatggatcacaatgaaggctactcttctgttgttcctaatgatttctttgaggacatggagtcctcatggaaatgtcgtgtcaagaggatccatatagaggaggaatttgcggaagtggaaagggctgctgaggctttaattctagctgtgagtctttagagtttaatt

SEQ ID NO: 10803 - DNA, 619 bp, Cannabis sativa
cttccattgatacttaattccaaccgttgtattcaaaccaaactcattctcaaactccaaaagttcgggcaacttttgatccatttgaacctctactaaaattctaggataattcagcctttccctttctttagttacattatccaccatgattggattccccacctgagcaacaattttaaagagcgatttttggccccaatacttcaattccaagtcctccaattacacccaaacaagtacatttgtaacatcttctttcttataattcgcatttggatcccagggttttataatcaccggtctcctattgaagaatatatagcctccattcaaaatctggtccctgtcctcaatagagtgaaaacgaatgataaaaatgccataagccagcattttcaccagatctaccttccccttctagatcctgtgtacaaatccatctaaaacatggagtggggggttcactcctagcacatagcaaaccatggatggcttccaaaaatgaatttcatcttcaatgtcatccattgtaatccttactttgttcacattttgattagcatgcttaaaagaattttcaagatttctaacaacagaattggacctcaaaataggt

SEQ ID NO: 10804 - DNA, 546 bp, Cannabis sativa
tataattcaaaaatccaatccaacttacataatgctattataatttatatacgccttagtatatgcacatatatataaatgaagatatcaatttatttataaacacatgtaaccttaagaataaaattaataaaaatattttaaaaatatatataattataattagaagacaacttgatgagaattggatcgatttggtcaattatttattggaccaaacgtctcattcaacaatcgatccgatttaattagattttaaaaatttacatgcaatgatccaattaaaattgaatatccgatagttggatcgaatgactttctgaacaaactcttcctagtttagtagcttaatacgtgaaattcgatttagattctagaaattattcatgccataaaatttgtgctcaaatgtaatattaaccataaaagttaacaaaaattttaaatttttaattaacataaataaaatacaaaaacaactaattgtattaataagtgctaaaagaataaataaaaatatgatatttattatggtgttcatattat

SEQ ID NO: 10805 - DNA, 809 bp, Cannabis sativa
tttttaaattacaggcagctatttttattcccgccaattggatatgtgtatgaaattgaagaatatgcacgttttataatgataatataagttagattgaattagtcgaatccgatccaatctaaatatctaatagaagaactgagcacaacaaatcattagatgaaactttcacgcgtactgacaaacatacattacataaattaaattaacttaaagatattagaaaaaaaaacaattaataggaaaataggcattgttgtcagtttgtcaccaaacaccgacaacaaatctacaatatcccttcaaccaaaatataatatattaagcaaaaaaaacaaaagaaaaaacacacacacacattcacacaaacaaacatataatattatgagtataacatcttcaatcaatcaatttgatgcaagcacaattgattaaccaaatcatccaactttgtagatgagctcccacttggagcagtggcctcacggatcaatttcttaaattccattgccttactcttcatttgcttacccttttctcctttgagtaactctttaaccagcttcgtcacttgatctctctttacatcactttcaatctccattgccactccccattcattgcaagcaaaccaacagttagtttgttggtcagcaaagtatgggtaacaaatcatagggaccccactagtcaagctctctattactgaattccaaccacaatgtgttaaaaatcctcctgtggaggggtggcttaacacatcctcctgtggagcccaactaatgatgaggcttctctctttggtt

SEQ ID NO: 10806 - DNA, 581 bp, Cannabis sativa
tttttttattttaaataaatcacatgatagaattatttagtttaggtggaaagaatcaattgtacattgcacctcattcatattgtgtcgttttccttgatatttttttctccttttgtcgttttctaattactaacgtcactctcactctcatcctcatatattctctctcttcctgtctttttcggtcttttccttataattattttttctgtcgtttttaatatctattatcgttttaagatgacgtcccccttttattttcgatttgtcgcaaaccgatatttttgtccttttctttttcttcagaacatgtcgttttcatttttttacagtaattctacgttagtttgtcgtttttcaaatatattgtcgtttatttacatttatgtcgttttgttagtttcccgtttcttcagaacatgtcgttttctttttccactaattccgcgttagtgtgtcgtttttaatatttattgttgtttctaaactatgtcgttttctttttcttcagtaattatgcgttagtgtgtcgttttcatatctaatgtcgtttctgtacatttacgtcgtttgttatt

SEQ ID NO: 10807 - DNA, 687 bp, Cannabis sativa
gacggtataaatttttagtgtcagtttttaaattgttggtttcaaaatgaaaataattgttatttacgtcatttaagaaacgacacaaataaaaaactatttatacgtcaattttatagaccgacaaaaaaactatatatgtcacttaaaaactaacgaaaatacatctttttgtagtagtgtaagataaatttctcagcccgcgagaaaagttttgttaaagaaagaccatgaatctgcaataacaaagaaggaacctcgtgatattaagaccaatgatgttaatgaaattgtgcatacaatcaatcaacgagaataacagacaagcattcaatgccatcaattcgataattttcataaccgttataatcgttctaatttttacaatcaatagctattattattgtaacactatcattatgactacatttgtaaccgtcacctactatctataattgtaagtacacctactcccattcaaagggggctgatctaaataataaaatataaagcaaatctcgaactcttgttgaacccctataatttatgtgtcttttctattatatttttacatactcgcatacattttacattagaatatttgaatactcgttattttaagtgagtattcacaatttttatattgtttaaatttttccaacaacaatatacatattgataaacttt

SEQ ID NO: 10808 - DNA, 922 bp, Cannabis sativa
tatgatcacaattattcaatctatatctatataaataacatttataatctaaatctgcaatttgtatctatataaataacaaatgtaactggctatttattcgagatgcttctttcgacaattttttcattctgttagcaagtcgggattacttgacattgcacaacaaatttatgtaggtgtgttgaggttgccaacttatcttattttcgttgaatcatgcatcctattatgtcttacaagattttatttacaggtgcatttggctcctggaagtaaattttactttcatcaaaagtatgttaagagagttccttgcataattgttggagtaaggtaatgttctatttatgggtgtggttagtgctttttgacatgacaccaaatcgacatgagtacgactcaaataatagtaatatttaaattattataattataattattttttatattattatgtgtaactattattaaaaaaaatataaaaataattaaattataaaatacacatatattttagtatttaatttatcgattgtaataaaaatacaaaatatggaacacagatttgatcacgtataaaagaaataagttggtcaaaaaacggtccgaaacaaataaagcaagatacaaattcaaacacgacacgaaattattgaatttgcaagttgtatcgtgtctaccttataaaattgttacatgacacaacacgacatgatcgataaacttttatggaccagcacgacatgactcgtattttaaaaaactcgaaaaataagagtcgaactagcacgatatgcacatatttagattgtggttgttaagttgtggcttcaaagttcgattgtgattattttcctcttcaatattattggcagtactaacttatgcccatcgtttgtgattttcttggtgctcacat

SEQ ID NO: 10809 - DNA, 561 bp, Cannabis sativa
atttttatatttcgatttatgttttgattgttctaggtgttttatatgtgtttatttattttttaattagctgtattaagtaattagtttttgtgtttaattattgtcttcttgttttacgtaactgatttctctgcatcacattttaactagtagataaacatagatggtttctttatatcaaattcctatgttcaaccctgaagtctaactccaatgataataataactgtgacaatttttttagtgaagataacagcttcgacgaatttcctatgaattttccagtgactatgacatattcgtcactttttctgatgatgataataactctctcaactttttccatgacattgcgatcatgatggttgctctgaaaaactttccagagaaaattttcattggaatcttgtttgttgtttggtttgtgaggagaaaaaacataagggaagaaaaatagtttaataattagctatgtttatttatggtatttttatgaagttgtcatttttttttttacttttttttttctctagatttgaagttgccataagttttagg

SEQ ID NO: 10810 - DNA, 570 bp, Cannabis sativa
taatttatacaaattgtattggtactataaaaatataatatttaaaataaaaactaagcatacctttattgcacataacaataacttagtaatttaagtgttatttgttagattattgggaaagaaaaaaaaaacctaaacattaggatacccttaccctgttcctgttaatttgtgacagaaaatgaaatagtaaaatataagctcactataaattgggtttcacccgtgacatttctcttgtgctcaataccacactaatgcgacattttaaataattaatagttttttagaatatttagtaaattaaaatttatgagaattgatttcaatttgtattaataacagcataccatcttgtctagcgatactccccaaaaattattatattaaattatatgcgacttaatacttagttggaccaatagcgatattgacacataagaaggtgctaggcaccactcgtgccatttagcatttctccatcttgtatggattcatcaattcatgatcagaataattaatgtaaagggcaaagtactcaacttggtccaagatatccaattatcc

SEQ ID NO: 10811 - DNA, 744 bp, Cannabis sativa
ttcttagtcgaaaataacattaattgcttaacacttttgctgttgtttccagccaagttctcctttaacatcaaggaagttatggcaatctgaaaacaggaagcatgctgatgaagaagacaattggtctgttgcttcctcgtatcctttgtttgctatacttttgagtataattttgtttttttagagataaataatgaaattattcggatttattacatggtgcttggcttccagcacttgaattctctcattttctgcttttaaaagtaaaatatatgatagagattttctccaacctttccccattctggaacatccttaactaaacatagtactgctgcatctgttcgaacactcaaatccagggttactgttggacaagctccaacttttcgatgctctcaacgtgcagagaagcgaaaggaggtaagaatttttacatataagaaaaaagaatattatgcattcttagtttgaagttgtttttgctgaactgttgtgtaattatatctgaacatagcttttgtctcaatgcaatggcctttatttagttttacacaaaattggaagaaaaacaccaagctatggaagcagagagaagccagtttgaagcaaggaccagggtacatccactggctcttattttttttcgtataaaagttgttttaaatttaacatttttgtatgcatataatgccctacttaggtccttttgttgcaattaaacattagcctgctttc

SEQ ID NO: 10812 - DNA, 612 bp, Cannabis sativa
tgtgccgttcattaacatgagatggtcaaagtcggtgggaatcttgatagccaaagcaccgtaggatcaaccctttccactcgtgctcctatctacaccgtgaaaatttagacggttaagatggtccacgtagcagccacgtggcactatatgaatagcagtgattaaaggtacaaatagacggccactgtcttcttcgttctactatcttcctcgattcatccatacaacggtagagatcatacccatcgagagagagggagaagaataccgagagctcgattagcgacagtgactatggcggagaatgatattttgtattttgagcttaacactggagctaaaataccctctgtaggcttggggacttggcagtctagtcctggtttggtagccgatgctgtcactgctgccattaaggtccttttaacttttcctactttatctaatttatattgattgtaaatgtaagaatgatattcgacaagctactgtgattctgagaaagtaattttgtatgtttccgttctgtatagtatatatatatatatatgtactcttgattttgatggtttagaaatgaaaaatggcgtggtgtgacgtaattgacag

SEQ ID NO: 10813 - DNA, 590 bp, Cannabis sativa
aattatatatcaagttattgtctacaacaatagttgcaacaagaaagatagtggttagattggctatacgagatcctgctcgaggtggccaagacaatgctgccattgccgacaaggacaaactcccccaagcaactactcaggtggatgtcacgggggacggggaaacagctgaagtgggcactcttcataatatagaaaaaaaaaagcatcgtggggatcaacccgtcgatgaggtagaattttacgaactagatcctgaagtagtaccccaacaaaaaatagaagacaactagaggagactagctaaaaaggaggaggtttcacgtcaaatgtaagaggttgtcgcgtgcttgcaagctcaagctaaccactctgatgagaatccccctgctaaaaagatcaacaacactgcgatattggactgtccattctagtaaacaataaaggaaaaagtgtcatgggtgagccctaaaaaaatctatgaacaatgttccacagaacaacagaaccacaaccaaccaacctagacaaaaagaaaggaacacttatgttgggttttctgtccaaataaaacttatttcaatata

SEQ ID NO: 10814 - DNA, 785 bp, Cannabis sativa
aaggcatgaggtgtaaaagtcccggacttgggagtaatccggacttgggagtaatccaatttttgttaaatctgtaatgacacatagtcataatgtgtcctgttttgagataaacctatcaaattaaacgagagttggaggagaaaccttttccagttccacgaccttgctttcgattatgaaaatcagcagttgtacatcgaccaagagcttgatatgacctgttagagccattaggagcgcttggacttctttaagactaagcagatcacttcttgaaataattatagacaccacagaatcataatcagagcctagaccattgagaagttggaggatgacatcttacgcgcgtatggcggatccaacaactccaataacatcggtgatgcttggtactttgtcaacatagtcagaaattgataaagaacctttctgaacatggaaacattgacctttgagctgaagtaattgagctcgagattgattggaaaaatgttactctaaagcttttcaaacagagtagaaattggtgaaatgagaaacatatccaagaacaccttctgacatggaggattgaagtcaagacagaagcaattggtcatgtcgtttccattgttgatattggggattaggctcaccgatgatgagagcttgtggtggagggacaccactaaacaagatctaatcaagatcatgaccaataatcgtgggaacaacttaggacttctaggaaaaaaaaattggtttgatcaagcttaattgtgagggaggcaatgagcaag

SEQ ID NO: 10815 - DNA, 1131 bp, Cannabis sativa
tgaaaagaaggcatgcattatagttacttgaattaacaatcacaatgacagaaggagatgaagacttaagtgttttctgacacctcgagaactcggtaaattcatcagcagaaataaatatcgatttttaaaatgcatcaatagtacttgcaatattagcagtgtttttgctaatttttgaactgtaatttcctacactcaaacttggtgtcgcctggttttttaaaatagttgcacataatgctcccggaatctgatgttcgattatcaggtccttgtgaattacctcctttgtattcacttagagtagcgatttgtcatggtgcagaattgtttcgactcaccaaggcactattaagaggagatgaagaggtagtttttgtgcgaagaacacgagtaaacacatcttgcaaagaggagacatcaaaaccagaaagaacctatgattttgcagagtcaaatttagatgagagtcctgcaagaaaactcataatagccatctgttctcgttggcgctgttgaaccttcacatcaagactaaatgcagtaacacgttaagctcttcatacgtttttttaaatgccataaaataattcataagggattgatattgtttctccgtacgataaaagactttgcaaacattatacatacgagataggttgtatttgccaaaatacaaaaactccaagtaattcattagttctttaactaattcacaatgattgatcaaactaattatgtcattatcgatagaattttgaatttgaagaaacaagtgagcacctcatgtagccacacttttcttgaatcgtctttatctttgagaggatcatcagtcaagtgatcatatttgttaatactccttagataaagtcgaattgttttactccaatccaaataatttgagttgttgaccccccaaaattgctaaatgtaatttttggagatctctagattaatgagagggaaaatcccaaaaatgcactttcagagtgtatgagcaagaaagtaagagcccaaccaccaaggtgagataccactcgagagggagaaccaacatgaggagaggcgctccccctctctccccgtcatgtctctctccccgctacctctctctctctctctctc

SEQ ID NO: 10816 - DNA, 2512 bp, Cannabis sativa
tttttttttttttgaaatgataatttcaatgtcaagtatcagatagttataattaaagagcattactattgggcaccagtagtgcccaacacaattgataagtggtacactatgattggtttagcgaataatttcctttattttttttaaaaaaatgataaatctggttatattttttgcatctgttcgtgttagaaattatcttaaagtttgttatatgaaaacataacattgttgaaaattaagctcatggtcatatttttactattttgaaaaatataaagttcattttgtcatttaacaaaatagaaggtcaaattagtaatttttgtaaaacacaaagtctaaaatagtatttaccctattatttattttacgactaaaatattttacttgctagaataattgagtgtcttatgataaaatatttttttatctaatttatgtaatttatgaatattaatagtagtactttagtaatattatcttctttcttaaatggtatataggaataccttaccacaaatttctcttaaactatttttattgcgtacttttatgtatgtggaaagagttaaagtagtgaaatttatgaattagaggcaactctttatttatttttttattctttattccatatcacatttttttcttcctttctttatttagtaattacaaatattttctcatgtttgttctttgcttttgtgtaattatttatatataataaaagagtaaatatgtacaaaaataatatattaattcgaaataaattaacaatttcataatataaacacttatttttattttaaaataattattgattttttaagatatttataattaatttttagtaattatatactgtgcatattaaaaaataatatatattctattttacaatttttttaataattatataaattagtataatcacaaatataaaaaatataatataactgaaaatatatatacaaataagaaagtaattattttttattattatttttgtagttaattatttaattactttaatttattaatttatattttgaatttttttttattagtatcatagtttctagcttgatgcttgaaactatcttatatagtttctcattctttttttttttctaatagtttaataaatttattattaataataataaaaatctcttaatctttaagtgctttctttataaatttctcaatttttaatcttttcttccctataaaattttaacactatctcttattaatcttatttctataaatttaacattgtagtgtttaacttttaatcttttcatctctattaacacttcattatattatttatttgtattattatgtattgagtaaacatattagggataacaatggcaacgactatatatagaatacaataatggcaacaggtaagatacaataattgacgactttaaataattgagatataaataatattgatagtaagggtggacatccgatccaatccaacctttttttcctcatccgatccaatccatttagtaattagatttggaaaatcatcatccgatccaatccaattagacctcaaaatctaatccaatccaagacaataacatttctaagtaataaaatagaacaaaatatcatgaaaataaatacacaaaacaatcaagtattacaaatttaacatacaaaaaaatctaataaatatatattatatttttcactattttttattatataaataattttttaatatatataaatgtaatttaattggatcggttttaaattggattttgagattgacatccaataaccgatccaatccaattggaatctaacttttagcatccaatccaatccaattgtaattggatatccaaatttttgtaattggattggattgaattggttcggttcaattcgattggatgatgcccacccctacgagaaagagtatttacttaaataatagtaataataataatctaatttttctttatactatcctatttattttattttatattaataattttttattaaaaaattttaaaattctatatatattattcatataaattttaaaattcttaataagtaaaataaaattttttaagttttatttttaataaataattcgatagtataattttaatattattatatagagcattgctataaggcaccagtggtgcctagcaccttctcgacatgtcgcgttgcgattggttagcgatactccctaagagatattttattaaattatatgggacccgatacttagttagactaatagcgatattaacacataggagggtggcgccctttagcatttctctattatatattagattaattttttaagttattatttattatttttataagtaatttttttaaaattattatactaaaataaaattaaaatagccgcgaagagccctagttccatactaatttagtgaaatggtacgccgtaagatgctcttcttggaaaaaaaaaaaaaaaaaa

SEQ ID NO: 10817 - DNA, 527 bp, Cannabis sativa
taaaaaaaaaataaaaaaaaacaactatatataagatttagtatcctcacaactatctattttgaattataaatagatataaacttctttcgacttctttacaaaaatattataaattgatataactaatgtcatttatcatatatcattatgtttgttacccttttagttattcattcaatgcgtgtatactctttgactctttgagtacgagttccaattttttaatgttactcttgaatgagttaagctaataaattaaatattagtttatttgtttattattaaataaatttttataatatgagtatttaggaaacagtgatttgtaaatttgtaaattatttgtagcacaattatatgtatgtattaaatattttttgaattagtttaacaaatattttttgaattagtttaataagtctcttatttgaggataagtattaaacacttaagtgataaatttgaatttttatttttgataatgtatgattattatagtcatttttagattttttttttttttt

SEQ ID NO: 10818 - DNA, 520 bp, Cannabis sativa
aaactaataatattaatagggaaaaataaataattatattggtggtaggacacccaaaccaaaattttgtgggcaaggtttcatcaaaattttgtctttattcgccatgttggccaatcatattatcttcaagaacttgacctaatacttcaaataactttgtctcatcaaaaaattggctaaaacattggtgcttttgtctctttaatggtccaaaaatctcttagcttttttagtattagagttaataatttaattaaaaaaaaaaagacatgacttttctttttcctctttattacactcacacccaatatcatacttagataataaaattaaagacaacctttctactttgatagtgaaagaattagttaaaggttcttatgtggcctcaattggtttagaggtcacataataaatatttttgtgttgccaaattggaatgatattgatcatttctaaagtgggcattgcttttttggtgctctttaatctctggtttcaaccctttgatcttttt

SEQ ID NO: 10819 - DNA, 610 bp, Cannabis sativa
agatcttaatgtttcatgttattaattattacatatgtatacatattaatgagttttatacataatgactatttgcaatataattaataaaataatacattcaaatttttagtatatgaaaaattatcactcaatttaattatagaattattgtctcctaattgtgatgtaagtattaaattgtatccttcaaactttctatgtggctgatttttttttaactattgagtaatttattaaatttaaagacttctatttactttttttaatataaacacttgacgtgaattaaaatttaggaagcatgattttgtatatgttaaaatttgagagatactgtttggtatatattaaaatttggagcacaatttggtacataaacattgttacattagtaaaattaaatagaattaggcagaagtccttgaattctaacaatctcaataattcagagaaaattttaatttaacgtctgtaaagtttaaagatataatttagtacatgttaaggggattaaaatcctaattagtataattttagcttttatattctctcaaagattaagaatatgaaaaaaattaaggtatctcatttttaaatctatagtaat

SEQ ID NO: 10820 - DNA, 503 bp, Cannabis sativa
ctttgagtgtgagtatagccaaagatgcttaaaggggataatttcctggctgcaatggagattgacagcaactaatatgcagcagatagcaaagtatatcagcaaaagcaaggcaataccgactgctaggaggaacattttgagaacaattatggctgtgctggtatatcacatctggaaagccagaaatgatgtgttttggcatcaaaaattatggcatacaaaggttattatacagagaatacaacaggtttgcacattgaggattctgggattgtcaaccaagatcaatgaagaggataaacaatggatattaggaaactaattgtaacagattgatgtaccgagtgtagcattgtaatactgagttgctgaattgaattgtaaatgtaattagttagtgtagaacactaagagacatgaggaaagtggattgaaaaaagaggatgtaaattgtaaaagttttggttgagcaatagaatgactcttattcatcaaaaaaa

SEQ ID NO: 10821 - DNA, 884 bp, Cannabis sativa
cggacaaatttcatccaaacatatgttgaatcgaaataggcgtgtcttaaattttaatctgtcaagaatcactaaccagaaaattattctatatatcttttggaatagatatatagcctgattccaaactctctcctaccaatgagtttttggataacgacataaaagtttgtaaccttctttaattgagttttaggtatatatatcacatatatatcatatatatatatatatatattgaattaactaatatgtgtttcacatgcatctgttatgattttttattgggatggaatgagtttcttaattagtcgtatttgtattctggtttgaaagttggtgtagattttttgagttgtatgcaagtacttttcttagtaagatatatatgcatcttttcagttttctgctaaaataggtaaattatttatatttaattaatataaaaataattacataaaaaactatattttttttttataaaatatttatatttttacgtttaaatatttttcttattatatttttacaatattttataaaaataatacgaaaaatatataaaagcaacaaaaccgtatttttgtaattttttttattgtatttttgcatattaagagattttacggttttctattataaaaataacataaaaacaataaaaaaaaattacatagaagtataacagaaaaatatataacatccaattaacataaaaataacaataaataaatacaaaaaaatcaataacaaattaacaattaatttgtaacataaaaatacataaaaagactatattttctgtaaataaaattaaaaaaaaaaacataaaaatgtttaaatattctatagaaatgtatttttataatgtttttattattttt

SEQ ID NO: 10822 - DNA, 588 bp, Cannabis sativa
actacactctcttaatcaacttataaacattcatttcatgaataaataggtattttgcgttcttgaactttgtcactaatatggtcatgcttctcgaattattagcaatattaaatattcttcctcaactttgaatgttagtattttatgagacttcttttaaataattagcaattttactttctgaagtatgatcactatcatattttgcccaacgaacttctaccattgccacaccatgcccttaaataaaaggggttcgatttagcagtggtaaaaattcgggagacaaattatgacaatggttataggtcagaaggtaaaattgctaattaattaacgaaagtcccatatttcattaacgctcaaagttgatgggaaatatttaacttcggtaataatttaaaggcatgattgcttttcacggccaaagtttaaggacaaagtacttatttattctttctaagaattaacatttctaattaggataaagttattaatacacaattaacattgtggcatacttaaatcattttgcgactaaggtatttagacatgaaaatagatcatgatgaaacatcaatattg

SEQ ID NO: 10823 - DNA, 662 bp, Cannabis sativa
taaataaaacagaactccttaaatcatcgcagctatatatcaccttcaagtacacatataaactgttgttaattatatcaaccctaaaataataataataactttaatgatgatgacatggtatgattcaaaaacagcttggattggacactcaagaaagttagttaattaaattcttttagtgtttcaagttgttatttctgttatgtgtaacaacttttgtatttggcttctcattttaaaacaaaacagaaaatagaatgttgagtagattgttgctgttttgtaaacttagagcaagaaggtttgaaacggggagaggtgaacagaaatgagaagccaaagggaagaagattttcaaggaatcgagtttcctaataagtgttcaaaggtctagttagatatattaattgctcaaagggagattatcaccattgtaacagttcaagctttcttgaaccaaactctttattctaccattgtcatatattggaaaaggattccttcaaagaagttcaaggggaataggctctctacacgttgtagatgaaattttgaacccatttaaaattgtttgtgttctttattgttttttgttttcaattttttttctctgctttttagttttctcatttttgtgaattatgaattgttttattttg

SEQ ID NO: 10824 - DNA, 604 bp, Cannabis sativa
attcaagtttcaagcaagaattttccttggaaaatgccatacttagcctgaaatcctagttctatcaataaatcctattgatctcatataattcctatccttagaaacctagaaggtcggcaaaaattcaaaaatgaaaaattacagaagggttgagaaggaaataccaacctttttgagtatgaattttgtctcttgagattcaaaaaatcactttgaaaagttcaacctttgtatgaatatctctaaagattgaagattcaaaactttaaagggtttttgaaatttaaaaatcttagaggagaaaaggatgagaaacgagagggaaatggagtaggattaatttgtatatgatggggttaaatacaaactttccctattcattaggatacagacacttggtaggggaatgcctaaggtcttccaatccaacgattcttaaagaccacgtctacacacacccggaagggtcctgatgacgtggcaacttggagaaataaaaataataattacagtagtctttttgaaactcttgacaagacaatcaaaggtcaccatctcgtaacaacaactcggctgactctctctaatagtttccctaatg

SEQ ID NO: 10825 - DNA, 956 bp, Cannabis sativa
aaagggaatccccgaactcaaaacagttatgccagtaaattttatttttcaaattaattagcaagattttaattaaatcacaaatttttttgttagtttagtattataaaataatttataaaagcacacatgtggcgattctaagagttagggcgttacatgtgctctaaaaactagtagcttttaccgacttcagattaagtactctaaatcattcaattgtaagcatctctgctattatcacttagactgagtgctcaaagtgttgaacaattaataagatctcaagtagatgtattaccaacaaaaaaggggtagactactataaaattttggtgttaataattatttacttttctctgttcaacaactatcgcttatcatacggcattgtcattgacgcttttcaggatcaacaaaatatttgtttaatattttaatgttgattacattaatattctcattttatgttttaacattagtttagactataatacttttaagtcatacttttgtaagtttcaattctatattaaatataactattttggatactaaaagttaataataataaaatataaattataattgattagaagagttaatttgaataaaccgtcaaagttatttggtgggttaaatattttttattttttttctttttaattaggtgagtttagattttttttaatatttgattaattgaaatatactataattcgatcaaatcaattaatataaaggtgtcaaattgtaagacatggactccgtacacaaatttgagtacacatcaaagttattttttttgctgaatagtacacatcaacattttgttaaaagaaacgcatcaacaatgaatttgtctttattattctgtaaaaaagaagagaaaaaaaaaagtaaaaaattatgaatttgtcttacattcaaaaaaaattaatatgccattttttttt

SEQ ID NO: 10826 - DNA, 621 bp, Cannabis sativa
actcgcctagtggcgaatgaatttaatcaaaggcgtggtgtggattttggtgaaacttatagccccgtaattaaggcatctacagtgcgcattgtgctaactttagctgtaataaagttatgggattttcaacaactagacatcaataacgctttgaggataagacatttataagacataatcattggactttgaggataaaacacaaccagttgttgtgtgcaaattatccaagtctttgtatggactaaggcagacaccaagagcatgcttcgatcaattgaaggccactctaatctgctaaaaatttaaaatctcaaaggtagtttcattgttctacttctatcaatcgccgtcacttgtgattcttgtattggtttacgtggataatataattgtgtcaagcaataacacagaaagattaaagcaattcagttcaaagctgaaccaaatttttactctaaaagatcttggacctctacactatttcttaagaatagaggttcaccgtgatgagaccagtatttatttgaatcaatccaagtatatagaaggactattgtagaagatcaaaatgctccattcaaaagtcaatccaattcctatgtcagttgggaaaat

SEQ ID NO: 10827 - DNA, 853 bp, Cannabis sativa
tcgtgaatctctaccaaaagtggtgggttttgctattcgtccgaaagtgcgtagccgagcgaaactagaaaaggttgacaaatctgggctattatgttctcagtgtcaccgatctggccatgatattgctacttgtttttagcttcttgggtatccagaatggtggggtgatagacctcgcgctcaaggaatccctcatgctcgtaacaaaggaggtggtggtcgtggtatagacacacatgcggctagtcggggacgaggagctactgtgcaggcagtggcaatagacagcaaccactctacggttggatcttcggtcaatgggcaaagaagctcctctactgatgcaactaccatgtcaaacactactacttctcttcctcatctaagtgcaacacaatagcaaactatcgctactatgtttggtaatactcattcatatacagatcgtttacatggtgagttttctaaacgatcttggattattgatactggtgcttctaatcatgtgacgggggatgagtcttgtttgtttaatgttcatgatattgtctcatgtaccgttggactccttgatggccaaaaaataattgctactaaagagggaagtgtgaaactctttgaaggattggttcttaaaaatgttctttatgtcccaaaattgttctgcaacttaatttcagttacacaactcattgatgacatgaactgttttgtacaatttgcttctaatatatgtgttatacaggaccgtccttcgaggaagctgactggcacgggtgaacggagagatggactttactacttcaagccaccatctacagtgcaagccatcttagtggatggttcttca

SEQ ID NO: 10828 - DNA, 525 bp, Cannabis sativa
aaatttacattcaaagagtacaaataggtccattatgacctatttaaaaaatatattcctccctgtgaaaaaaaaatttacattcaaagagtacaaaatatattttttttgtcataacactttttttttaaatatatttctcaatgtgaaattttatgatttttcgatatatgtagggtaaaattttaagaaaatactaacaagtgtaagaataagaaaaaaaaaacttgttaaaatttaccctaaaaatcatttttaatatttgatttggagagccatttaactaaatttaatgtaaaactaatcttcatatttatgttttatttatgttttagtagtatgaatttattttgattaatgttgtatctaattatttttagtttatatattttaatcaattaataagaaagtcttactctttattctttaagagtagttaaatttattaggaagataagatgctttatttaaaatttgaaatatgttgttatattttttctattctatttaataataagtaaatgt

SEQ ID NO: 10829 - DNA, 946 bp, Cannabis sativa
acctcctgcggagtggtcccgagtcgtgaccgtagtctcaaggccaataaccacgtcagcaccatatggaaattaatttataggcagttacaccattttctgacacaagatcagatcttgtccaccatgtcatatcattgtagtgtgcgtacgcaaaaaatgagaaacctttgtgcgacatgtgttctagtacgtaaaaaatccctcactacaaatgtacaccacacgataggggaagcttcttatcaaccaacggtcatgtcgtcctattgtagtaccaacccttccaatatgtagagtacaaaacattaggtttgtaaaaggtatgcccttacccacatatgtacctataaatacttttatttttttatgaataaggtgtgaagaattttacttacaaaaactctactgaaattcctatagagcttttttcttcaagagaaacgagaggaatgcagagttaccattgtaaatacttgtactacctaaacatttgcctacaaggctaatacaatagactcatagattagggataattaatgcctgaaccacataaaaatttatttgtctatcgtttattattttatatttttttaagctctagttaatcagtttctaaaaatctcggtaaacattttggtgatttcattgggagttgatgaaagattattagttgttgtctcactttgactatggtgaatacacgaaagaacaccagcaagaaaactccatttgacacagttatggaggaagccgactctcatgccttcggcttccaaatgggtggtgttagaaagcagggcatgacccacaccaaaaattttggggaggacatccagaacgtgctcgatgacctcgacaatggttagaaccctggaggcgggaatgaagaaggtgatgacgacgactacataagagacaagtattacaaggatggttattacta

SEQ ID NO: 10830 - DNA, 525 bp, Cannabis sativa
atatatataaatgtgtgtttgtattgtatatataaatatgtatatgtgatttttcattttttgttaatggggtttgtttggatcggattttatatattgcaggaatttgaatttggaatatccgtatatcttggccctgcaagagtttatataatatatttatatatataattgtttttggtgtgtaatcaatcctatggggatgtcatctgataacattcatggacttgttttggctgtttcatcaagcatttttatcgggtctagctttataatcaagaagaaaggtcttattaaagctgggaatactggagttagagcaggttatattgatttcctttttgtttttgttttaatttgattgattttaaattcatttgtcaactccaaattgagaattatcatcatcatcataataataatcataagaacattgctattaggtggctttttcagaattgtgaatgtttagcggttttctataagagcattgctaatcattattaaaataaaataggtaggacc

SEQ ID NO: 10831 - DNA, 720 bp, Cannabis sativa
attattacctgttggtgaagtttgttattctgatcttggagagaatcattatcagccttaagaagatcaaactgtttcttcaaaacatcataatctctctcaagttgttttgtcttccacctggctcttctgttctgaaaccaaatagcaacttgcctaggctgaagacccaaagccttagccagttgcatttttctctcaggctcaagcttattccccatctcaaaactcttctcaagtgtcttaacttgttcaagattcaacctttttttcttctctccaagttgggatccatcatcagacaactcatcctcaccaccaccaccacaacccccaccatgcaacattaacaaatcttcattattattacatttattactattattattagtattaatattttgatgatgatgatgatgatcatcaacacctgaaaaagaaagtgatctcttcatcatgaatgctgcctgttgctgctgctgctgctgctgttgctgattattattattattagtattaataccacctgtaatcaaatcacataattatgattattaacaaatataataatcaatagatgaagacaaggaatatatatagttaattaccatggaagtgggggtgatgatgatctacttcttggtgagattggaagatgaaactgtgaggtgggtaagccatatgtcaatggcacatatatactacaacagtagtagtagt

SEQ ID NO: 10832 - DNA, 542 bp, Cannabis sativa
gtaaaataatttccaacactcccttcaattctttctctctgggtcctaatctacccaaacgaaaacacgaatttctgagcaaatcttcagttgttagcaagaatttcagttagtaattcaagtggaattgaagccaattcaaggtaaaaccctaagctatcctctccccattaagtttgtaagaattatatatataaatacatgattttggtgaattcatttctatataggtttgtatgagtgagaacctatttctaagttgatactatgattgtttgaagtttattttaagccagtagcagctgtagcttggtttgagttttagaactcaaagcttgctcaaaaatagtgggttttgtttaggggtttattgatctctttaagggttaaattatgtttacaattcatatttgtgatgttctggaaagtttgagcaggtttagggtagaaatgagttagaaaagatcgagtttttgagctctgtagtgaaacattttaccgtttctgaagaaacaagtaaccgtttcatctggcaggcctgg

SEQ ID NO: 10833 - DNA, 572 bp, Cannabis sativa
taggaaaactagatcccatacatctccatccaagccaatttttaatcatttgttaaaaaaccttgccaaaataacagctagaaaatagatgcttaatagattcaacctgaaccccacacatcaagcagtattaacttggcaaatattaaatgtcattaatctatctcttgtctgcagcctctttaagacaactagcagaagaataatatgatgctttggaatggaaagtctctcccaaacttgtccaatccaatttaattaccttcttaagagtacgaagaagagtctcataacctcgactgatggtgtatcgaagaaataagaaatgttgctcacttgtaatttgtttaatcttgtctttaattaacatcaattatttgcctccaataccaactactctgcatgttaaaagtttagctccaccaattttgatctttcaaatacacactatgtacccatttcacctaaaggttatcttgctttgttcaaatagcccacacatactttgccaagagctgcttggttctaaagtaataacattcgaaaccccagcccaccttctttcagagact

SEQ ID NO: 10834 - DNA, 723 bp, Cannabis sativa
aaattgattggagataatgtcgcatcactaagaataaaattatagttttaacttttgagatacattactcatacaagaggatttttctttttgagagaatataagagcatcttaatctggcaaataatattaaaatgtttccaatcactgcaaaggtgaaagttgatactcatttttgtgcttttcatccaattaaataaatcaaaagtctggtacattatagataagcaacccaattttattatttaattttgctttaaaaagttgatggttatgttattttgtacttatgaattggaaaaagatgatgacataaatcacgtgatatcatttgtgttaaattttctaaaatgttctaatatacttttgtatgtctacgacatccaccacatatgcattattattcagaaaaaaaaaaagaaaaaaaaaagtctatccttatgtaataatgagcagattagttatgttgtccaaatcatcagttggaatataatgctatttcatttcaccttaaaaccgaaatggagtataacaaacaagtcatttagaggttaactacctttttcctttgttggtgaaagaatcaatcaaaacaaaacaaaacggtatttatttactatttagagattaattgtgattagtaagtttacactccaaatggaattttggtcaaagtttgatgaccccataatcatatgtataatacgtaccaaatggcatata

SEQ ID NO: 10835 - DNA, 599 bp, Cannabis sativa
gtcaaatgagaaaataaaagttatgccaactgatctcccatagatttcaaccctccaagtctagatgaccaaatatgtatactcttcaccgaagccctcaaaccactgttattcagtttcactttctcataacctacacatagtaaaacaactgtgagttgacttagcaagaaaagcatgcataatacacgataaatatctcacttgtaactgagcgcctatacactaagttaccataagtaaactaaccatctagcgcgtaaattgagatcctaatgttcatacctatagtataattaaccaaaataccaacctaattcccttactctagtcgtaccaatattagtagcattaatgcataacattcaatattgcctagtatgttagatatcagtatattggtgcaattctacgaacacacatactgttatctctaatatgctagctatatgataatataatacacgaatactaaatatgtgcatatgtgcatttgaacacttttttttacttggaatctaattcaagtgtgtcggtcagcctgagtagaatttcgttcagcgatcagtgaccccaaatcacattaacagtaaattgat

SEQ ID NO: 10836 - DNA, 838 bp, Cannabis sativa
atgtgtgtaaatcaatattctatttgtcaacataaaacttgttattgtcttggcacatacaattttgcagaaatttttgcacaaaaaatatatataccaatcaagttttattgtgttataataaaaatagaaattgaaataataaagaagatattaccttaataaaagcattttacatgtttgactaatatttttggaggatatcaaatataatacagttaactaagatgatgtagagatcaatatcataatcaaaataagagatttaaagttataataactaagcttaagagggatattagaaagaaaaagaggaaaaaaaatagtataaagagcaagagaaaaatatgataatcatgagaatgaagatggcatatactatatatatacatacatgggaaaaatgtaactgcaaaaaattaaagtaaaaacatttattgtaattaatattaatattcatatataagttttattattaatagctttggctttcaacttatatacattttcattataattatgagaaacagagaaaaacaggggaagaagcaagaagaagatgattcttgtattatgcttattctgtagaaaaatgtttacagtaccatgactttatacaatgtaaaagaggagaccatggttagttagaaaagctaactatggatctacaaacctaactaaacgagtcaaccaaacttatccaagtaaaccaacttaactaaggttaggtctaatagcccccctcaagatgtagtgtaaatattgatggcaccccttggatacaatggtagaaacttgagtgggaagtaaggccttagtaaatatgtcggctaagttg

SEQ ID NO: 10837 - DNA, 706 bp, Cannabis sativa
tgtaattaaatattaaattagaattaaattttagacctaaaacgaaattaaatttcaaaatccctttataaatagtataataatttttagaataatagttatagtaattaggtatatagtggtaaaaaaatttaaaaactcctattataaaataaaatttaagaattgatcacatattctcctattataaaatgacactctcaattattatgctaaatatttttttttttgcaattttaattcttaaagcccaaaaagtatatatatttgtctcacaagccttatatcaaatctcatataatttaaaataatattttttattaaaatatcattaactatttataaaataccacctttaaattgttctaaagttagataaaatcccctatatattaatatgctaattattaaacggttgtttttggaattgagaatatgtttgagctgttcaattccaatatgagtctcaaaatttgacatcattttgaggacctaccttttattggttgacttgaattgaagaaaagtaattagtagcctaagcaaataaaatgattgaatatcacaacttaaactgctttaagatttaatatctttattactatcacattcattgaatatttgttgaaaaccggcctttatttttttactttttttagaacatattttcacattttcctacctccttagcatatatggaaaaaaa

SEQ ID NO: 10838 - DNA, 612 bp, Cannabis sativa
agcatatccattcaagaacattctcttgtcctgactccatttgaactcctcaacttctccggccatctctcctagtttctgcacattccgttgcgtaaacattttcaatggaatacccttgatcttaacccagcaagacaccttatccaaccgaaaatccgcccattgtcccgagctcggccattcctctaacagcaacagacctccattaaaaatccatggctgcctagccaaaatagtttttgtgtcacccatattcttaaaggaaaaacccacaatagagtgttcctcctttttctcatacactttcacctcccagtctttaatccccttccacattctgctaaaaatattcagcagcaagcgttcactgatatcccttgtagagataactttcccgatcaacgagcatccgccaaacgagttaaccgcttctgaattctcctcccattcctctgcttgttcgactccaagttgactagtcattgtcacaatatcctcaacagcgtccgacggtgcccccatcaccatcataatcaagaaaaaccacaactccctcatcataaacaggtctaaaaccagttgctcacagcatagtcctactgaccattt

SEQ ID NO: 10839 - DNA, 559 bp, Cannabis sativa
tttatttattttttctttttgaaaggccatcacttatctttgggtgcttctacctttggacgtctgcacaaaatttttagttcaattgggatttttacttcaaaattttaacatgtatcaaattatgctatccaaattattgagattgttaaatttattaaggattttggtttaattcattcaaatttactatttcaatgatggtttatgtattaaactatgctccttagactttgatatctaccgaatcatgcccctcaaactttgacatatattagatgatgcctctgaactttcatacatgttacacttttttttactaaaattagacaaaagtccttccttaaatacaacaatctcaatagttcagagacatttttaacgaccttaaaagttcaagtgcataatttagtacatgtcaaagttcggaagtaaaaatcctaattattctatatcttataattatttaagataccttgaaaaaattttaaaaaattttagttcaaatagtttgttgcacttgagactattttattttatatgtctataaaataaattt

SEQ ID NO: 10840 - DNA, 1088 bp, Cannabis sativa
tgcttctgagtgtgatgcaaagaagttcattgagtttgaataagcatacagtgctccaaacatgaacaatcacaggaatcataattaaaatactaatagaataagaacaaaagaattttatttgctaatctaattttaatttaccttaacaattgggtcatctttgatgctcggatgattgttcaccaacttgtgtagaggaagaagtgttgacattctttcgcaaacgagttaatattaaggattctggtataactcgaatgtcaacactttttattacacaccatatatgcttgcatggaataccatcggactcaaacaacaaacatgaacaatttcactcattcttctctatgttatataagactcggtgccttatcttaccggattggaatcttactaaagagaagaggtatgaatgcctttgatcttcctgatgagaaattgaatatggttgctctaccttaatctgttcttttaatttataatatatgtttatggtgaaaattacagcggcctgtttgtaatatggttgctagaaatctgtcttaccagcgggaatataaagtttgcatgcttttaaaatctttagtggctttattatagcgcattgtgccgatagcatgggtaattcgtgaaacaaactctcgtaaactgtaattagcaagtaagaatattttgagtacattgttcatagactcacatctttgggttgttcgcatgcctccatagaaaacccctcttaagaacgtctcttcccattgcccacgtgtgttgtatttagtacgacaccaagaattttcttcaaggccgaaatgtgccaactaagtagcccatttttcttcaaactatttcactgtgcagtagctgtatattaagtcaaagaagcctttcctgaaatttggaatcttaatattctttgtggcattgttccccagatgccatgcacaaagtcaatgggtagagtctcgtaacaaatgtctgattgcgaatcccatcctttcatcattatcagtgaggactacttttggttgtttgttgctcatgcaatcacggaacacccacaagaaccaaatataagcgtcttc

SEQ ID NO: 10841 - DNA, 630 bp, Cannabis sativa
tacggtctaattctaaggccacttcaactaacaaatacgaatctagctctaaaactcctaaatcgtagttgatgagaaatgttttgcttgattttgagagtatcttttagttgattcattttgctaaagttcaacctacgtatgcagggcatcgatgcttgtgtgtttttggttatttagactggcaagcccaagatttaatttgatagggtgtattttttcaaaaatataccatgttaaaaaaaattgttaaaattgatacaaacttgtgtttttgcaatgttaaatataatttaaaactaatacataacaataaagagtttttcttggatgggttagttattcttatcggtaaggattcagatcctataatgtgcatttttttggtaaaaaataaatggtatatatatatatattgttaaccccaaaaattggcatctttaatttttgagattattcgtcgaagggaagaaagacccgcggtggtgcgccgaatcggcatgcccgcccgaggtccacccctcgaaaatagtactccgaatgttgctggattctgtttcagagtaatacagacttgggtttatttgagtgtctatcattgatcttaaatgataagattctatgttgtat

SEQ ID NO: 10842 - DNA, 650 bp, Cannabis sativa
gtaaaataatttccaacatggctttggcttccatttcatgtgaggaaaaattaccaacaagaggcatagaaaaaactgcaacgacatatcccaaagaatctcgtatgacagcacctaccccaattttgaagctactcttattaagagcagcatcaatatttagcttaaaggaacttgtaggaggcggctgccaagaagtgtggttaggagctgatgaaggaggttgctatgaaattatagcagtaggctggtatttaacttgagcagctcgataatggtccagatattgtagagagaaagcagcaagggatgttgcagattttgccttttcgccgtgaagtacctggtttcgctcagtccatatgcaccacagattgcatataatttgcttcatctcatgtttagagtgtatgaaggatagatgctttaaataatcacctttatgcattgaaattgctttatgccagtcaaaagtgtgttgtgaagaacgccatacagctttagcatagggacagccgaaaaaaatatgtccaataaattcccacgcctatctacaaactgagcaagtagcatcagtgatgattttttgtttgacaagggaagttgccacggggagggcattatggatgactcgccaagcaaaaatcttg

SEQ ID NO: 10843 - DNA, 566 bp, Cannabis sativa
aacagtagaacagaaacccaatatgaagatatgactaaaaaatttggttgttattttacgatcacattatactccatagcggacgtgattattagatcacaaaaacaggtgaaaagccttacctaaatgaatcgcattaatcaaacacggttgatatcgttacttttcaataccatttgtttaatataaccacccatgtttttacttttatagggttttaccagcataaagagattgttttaaacgatatagcatgtagtgcagcagaggtgaaaaacagatgaaattcactaaatatgtaactgtggagttacgagtacttatatataaaaaactcaggacagtagactataacaatcaataaaaaataaaacttctacttctacttcccatcgttttgctgtgtttgtatacctctggaaaagtaggtttatacttctaagtgatagtcaattttgtcagccaattgtagttgcataaaacataagcaatgaacggttttgagttgccaaatattaaaaagaattatctcaaattcttatacatttttcttataatcctactcc

SEQ ID NO: 10844 - DNA, 509 bp, Cannabis sativa
atagtttaattatatatggtacacgtaaaattaaagtactatttcaagatatttatccttatttatgtatccaaagtggagttaaattcccatgaattaagtctatgcctggctccgtataaaccagtagcagcactaaatcccatggtgacccactgaggaagaaccttactcaaatcaattttgtaagaaaggctcgtcacactctccttataagcagagcttttctcataactccaatccactttcaaattcttggccttggagtcataagaaatcgaaaccaaaacgttgtccgtactatgcatgctagcgttccaaggagtgtaaacagaggaagctatggagttgacattgattccaacatgttccgttggaggatcccattcagggttcgaaaagctgtcgaactctacgtgcacaagttggttggaacccgaagtagaatattgatgatgatgatgatcaccaccaataccatcggctgttgttgtgttgaaaaggcccaa

SEQ ID NO: 10845 - DNA, 552 bp, Cannabis sativa
cagactcacatgcattatgggattattttgactaacaatatgcaaattaaatttttttattcagcttctaccgatgtatgtttgacccagataagggaggagagatgactcagctggaatatcacaactttctatacccagaagataacctttcgtagtagtattgactaacattatttccctattagttatacatatatatatacagggtttctatgattttttattcttatttttttttaagaaatttttttggagccattacatttgtggcagttttgtgtatttgttttacagaacatagataataaatttggtacatagtagaaaaaatttctggaaccatattattcccaagtttttatttacttgtatacaaatagaatatagtaatttgttatcgatttcactctgtaataacactacgaaagcaataatcatactatttttcttctccatttatttttatacttgttaagtgtgaatactgaaatatctacattttgtgctcatactcatatttacatattcttcatatctaaataagtgatt

SEQ ID NO: 10846 - DNA, 733 bp, Cannabis sativa
caaaatctctcagttcattaacttatctttgaggtttgttattagagagatgttgttgtcgaagtccctctagtattttcattatattatagtttttttttttttttaggaaacatcactattattataaattaacattcatttacaacagtagtgaaaataggatagggtatttcccctagccaacaaacgtcttgatccaactctaaagcatgttttgccaaaccatgtgcggcatggttagcatttctcttgacatgagaaatacgtgcttcagggaaaaaggataaaagacaacgaacatccacaattaaatcagagaaaatcgaaagatcggtggatgtggtagttagagcatgataaactctaagcgcatcagtctctatgttggtgataggaagttgttgctgtagcgcccaattgagactatgaaatagcgcttttgcctccatttcatcagaacggaaacaaccttgcgcaggttttgaaagtgcagcaatgacattgccatcatggtcacgaacaatagctccaacacccagcatttttactgctgaatttactacagcatcgatggtgagtttaaaaccagcagggtgtggtggctgccaacgtatctctgcaatgttattggtggtatttgacgaagaggcagtgttctcagcatttgatggagcatggactgattgtttcggagtggacgatagcctgaacttctcaacatagtctttaa

SEQ ID NO: 10847 - DNA, 692 bp, Cannabis sativa
atatatatatatatatatagaaggggggtgaggggtggggggcaccataacatgggttgatattattttatatgggttgatattacaaatgtactccattttatttttgaaagggataatgtattccatttgtgttagtctttcaattgacttatactaattaataaactatgtggtgttaattttattggaccacatatatttattgttgatttcaatgtaaagatggagacaaataatttctagatccgttgtttaaattctagccatatttcctaattttgcttttgtttatgacatgaaacaaccaaattctatctacttatcttcctactagctagctacttgatatatatatcaaacataaaattaattaggagtaatatggtttgtaaattctcattcacttatttttaatcatcaatcaattaattcattacattatttaatattgttattattattagtttgaaaaactgacctcattaaaatttgatgagtgaattcccatcttagaattatatttgaccattaataatggttagtttgcgcttattaatttattatttttaaattaataccatacatataattataatttcaaaaattgttttatgataattaattgtacattctaaattatttgcttacgatttatctattaaaataattttattttcaagaaattaatt

SEQ ID NO: 10848 - DNA, 892 bp, Cannabis sativa
cctgccgaagtggcaggattggccatatatgttcggtttgtggggattccatttgtgataggatcatgaacattaggatcagcggccataggatcttgaggaagactcgaggaggcagatgttgtagctggagttgttctccttatgttaaccatgatgtttgatcagataaattaacaactcgctctcaatggaagcaccaaatggttgacctcagacttagccaaccaacagcggagtcatatttattattgattcttgccacgtgttacataacaagaataaaaaagttaataagacacgagattttgtagaggtttagcctccttagttagcgggtaatgacctaatctccttttagttgtattgataccagagataatactactttgagaacaagtgttattgaatctacagtagctctcttaagattacaatataggaatcaagtaagcaaatctcaagtaagagagagagagagccctagggcatgtagaagagagggagagagagagttagggttccagacattaagttgagagctttagtgaggcttggagacttaagacttagagagttagggtttgactaatgctctttatatagtagagcttacatccctattattcgttacaaataggaaagaaagctatatttacataattaattgataaagtttaaatgacttaattatcccttgaaaatagggatgttgctgatattttcgtgggctatcaaggcacagtttgtagtttagcttgttgtccacagatgaaggttgcgcaccaaaggcttgccaagtaaaggctggctgaccatgcacctaccaagtgtaggctggctggccacacaatgtctacagactaggctttggctggccatgctcctgcta

SEQ ID NO: 10849 - DNA, 500 bp, Cannabis sativa
aattaaaatatatattttttttctgttataaattaatatttatagtggagcttgttatagttataatattatttttcgtagaattttgaaaatttttaaataatttattgtgtcgaaaataaattttaagtttttcaaacacaaacggtaaattagaactagaaatgctttttactcttcttaataacaaccagagtttaatatctactcttagtgcatacgcaactaatttatgagtacctaccaacatgaactagggaaataaccggtcctgaattaatttggacccaaaaatgaatatttttttcataacaataaatgatattttttaaaaattatttaaaatatatctgttattttttttttttatttgagcttttaataggagtagccctaggcgcgggccttagtttagggccggggcagactaaggacaccttaggaaaatgagaaagcaaaataacattatcttttaataatgatcctaattcactagaaga

SEQ ID NO: 10850 - DNA, 511 bp, Cannabis sativa
ctcaaaagcgagatatgcaagcatagatatatgaatgtatacttaggattaatttcatttgagtgacaactataaataatatacgccaatgatacgaatactctaatgtttggtcctaagattcatttcatttgactgaaaattataaatgagatacggtaataacaatagatattctaatttttttcgacaccaccttatatcctaagaataaaaataataaataaaaaagaataattatcattaaaattaatcctataatgaatagaatttaaaaatctttttttttttattttattttagggagttttattttttaataaataaaattaataataataataatattgtacttatataacataacttcaacattaaaatattttctatattatattaatatatttttaattttctatttcatatagaattaagattttcgcagtatattggctaatttatataaatatatgttggtaactatttaatagttatattaaaaatataacta

SEQ ID NO: 10851 - DNA, 708 bp, Cannabis sativa
tatatattatatataatatattctaactatttaaaagactacacttttacacattggatgaactcaatgccctcgtaccaaaaatatatgaatattgaatcctattcaaaacttctatgtttatatttaaattgatcatgtcactcttttagaaatgggtacataatttaacttccaaagtttttttttttttgggtaaggaaatttaacttcctaagttggaaaagaatgggttctcttatattctttgcttcttttattaatatgtcttgtaatacattattttgcttattgttattattatattttaataaaaaggcattacatagtccaatgaatctgtttccttttatttttaggttcttactgaacctgatagatactattttggttcattttcacatgaagacttttttcttttacatgtaaaattagttgaattatttggggactgcaatgtaatttaataataaatacgaggggtatttctgtaatttaacttggccaaatggatccaaatttatttcaacggccgagatgggttgggcccacttgttatactttgattggtctactcaagggaatgatccaactcttaattgggtccctccactgtcaaaataacaaaattctctttttaaagttccgaaagcaccactaacggagggaacagacgccgtttaaaaatttcaattatttgtttggttt

SEQ ID NO: 10852 - DNA, 527 bp, Cannabis sativa
aataatatgaatgcatttatagggcgttgatgggacccgaatgcccttcttttgtaatacaagaaagaaccaagaggccgatggatccttggagttggagtagcatggacgcgtgagcttgctgtcagtgtaatcaatcaaaggcccttcatcacattgccatgataagcagctagggacaccccaccctaatgggagtacaacactgtttttttttttggtattattattattactacaagcacgtagtatattttccaaacaataatttatctaattttgtatttaattatttatatttaaaaaatatattagagcaatttttttctctctcatttataaaaacttcatatgacaattttacaatatctgaaattaaaatgggacaaaattttattacttaatcaaatatataaaaatgacatcaaaataaataataaatatttagtttggaattattagtaatattttctccttttaaatgtagctgagtactttttcgggggaaattttacaaacataagaaa

SEQ ID NO: 10853 - DNA, 601 bp, Cannabis sativa
ccccaagtatttaggacacgcttcacggaattcatgtcatcaaaaccttacatgagtttatacatgtgaaaacgagaaagaaggtagacaaacaatggtatttcaggaaaaccagccaccaaacaagtgacgattataaaggaaaacaagtaaacaaatgcgcaaaagtcagacgagaaagagtggcactagggttccttcagaaaagcccaaaacaaggtccacagaaagcggaaaaaagaacaaacaaagggaaagaaaacctaggcctccaactctggtgtggctgaaaagactcaaatacagagacaggaggaatcaaacgaatgacattaactttcaaagcaattgcggagaatggaatgagaggtttctgggtctgcaaaagaatcttcaagtgaagaaaacaagaaactacgcaaaggtttttgactgtgtgaaatacgtagaaaaatttgaaagagtttaaaaactttttctggttaaaaggtttgcttgtggagaatacaaaacgtttcttctggttagagatttggctgtaaaaatttgcagaagaatttgagaattacagagaaaatgccagtgttgcagagcttggggt

SEQ ID NO: 10854 - DNA, 803 bp, Cannabis sativa
tgagtcatggaggatataattaattaaacctaaatacaaaaatcatttttacatcagtactacaaatacaattcaacattaaggtgttaaatatcctgaataacaatttggagtctaattgaatttacctagttaaaaataatactacacagtgtacaggtgaaaaagtaaaataatagataaaacttatcaacatcaattccattacgactgttagcaacaatatcatacaaaaagttcttttctcttgtcccctacaagtcacatgacataattggaagaagaaaaaaacagaccagcaaatacattgtgtgtgttaacattgtatttaacagaaaatattgttttgtttacatgtctacaaaacgaaatttacttgaggaagtttaattcagagctagttaatatcatctctttctgtaaaaataagtataaaatatcatagattaaaactaagagatcatctaatatactcctcaatttattttgacagcttgtctttggttgaagagagaaagaaccttatgtcacagtcataccaatccttcttggcgaacggattggctctgcattatattattgatatgaaaacttgttaacataataatttcttctgacacttttattctcaaaaatttaagtaacagttacaatttcgttgctgaaacattacgtatttgatattgattttttttttaatttagaattagaaaagaaatagattaccatcaaacaaaaaattgtgaattctacttgcaccttcttcttctctcacttcttaccttcttcctaaaaaatcaaat

SEQ ID NO: 10855 - DNA, 614 bp, Cannabis sativa
agtattgttagtagaaactaatgactgtaccactttaatgtgtacaatatatagagctttaaatacgagctgagccttttaatacggtacgaaactcgcatgatgagctcaggaaaaacgagtactatccgacacgaaaaatatgaatttaagcacaacacaatatgacaacccgaaacacataagcataaatatagcaactcgaaagcacaacattataatttaataataataataataatatatgtatttattaataaatatttaaattttaatcattttaattaattttttatataattatttgtaaataattattaaaaaatgatataattaaaaccaattaaaattattaaaaaatacatataatttagtgattaactcattacttgtaaaataaaaaatagtaaaaaagtaaagtccgactgtgacctatataagattacatgcagactcatttatgaaaaatgggccaatttgagtaaagcacgacacgagtccgattaagacccgaaaatatttacgggtcgtgccaaacttactctttaaaactttcatacagcacaacataatctatatctttttatgagccggcacaacatgacacggctcat

SEQ ID NO: 10856 - DNA, 695 bp, Cannabis sativa
catgcgaagggggcattaggattgacatagctaaaactctgacaatattactgtaggtcttcttcttccccaagaaaagcttagagtaaagagttagggtttcatgcaaaaatattataaacacatcagtattgcccttagaaactaatagactgactcgtagactaagattttttaatacctgaaccacgtaaaaaatcttcctctttacttttgcaagttattatttttttagctcttaaatatttaattatcgaaaatctcgataaacatacaattttacttatatacatacttatacacgttattaaagttaatatctatctacatattatcttgatattttagtgtttgatagtacaggatgacaattcatgtaactatatgtaagttcgacacgaatatgattcgaaagtttagaagttcaacacgatacgaaaattatgtaagttgtgttcgtatttatcaatttttcgtatcacgactcatgttcgtgtcatccgatttcgtaagtttgacaagatataaaatttattcgagttgtgttcatattcgagttttataattttttatatcataagtgagtttattgttgacaaattttgagtaaattttaaacaacacgatatgaatactaacacaaattgtcatctagaatattatacaaattctcttatatgtaccacatttcgaac

SEQ ID NO: 10857 - DNA, 524 bp, Cannabis sativa
gagcatctaaaatccaaaataatgaaatccaggcaaatggtttctcaaaaagtttgaaattgattatgacacctctaataggcatcatgtcaagcaaatgtgatgcatctgtttacacatcctgtttcaacacatggtgttatcttttacataagcttggttctgctgttaattgttcctcggtgaagaagcttgtgttgcaacctgtatgtgaagcagtttttcagaatggccctgatcataagagcatttcggtatggaatctgtgcataaatttaattgatgatttaattttagcaaagtgtagagatgcaaacattgagccagctgacccggaatgcaatcatttatcagctacaacctccattaatggacctttgacttctggaaagtgcccatggaaacagtatcctattaaatggttgccgtgggagctgagtcaattggaatttcatttaaagattataaacagtctcatcaatcaagcatcgaagataactgtttcccatgagaacagaactttg

SEQ ID NO: 10858 - DNA, 1850 bp, Cannabis sativa
agagaagactctctcaaagtagaacaacgttagtcagccaaaactcatgtaaaaagactgttaacgcttagttttgtgaaactttgtcatggtctcattcatagtcatgagaagaaagagacctggtgatctgtatccatctaataaccagttgactagcacaatacaaatagattatagttaaacatggttaccttaatataacaaaagttgcacaccggaagcagaaaaaaatataataagatgatgaaagaatgtttgcactactactttgaagagtgatctagctagaggatctcaaaaattcaaatggactccatacatatcaaagaatgcaaaggcatggatgtaagcaaagcaaactcaatgcaccttagatgtgtgatttcacaatcttataactcagtcttttgattattaactatacttggcttattgcttacaagacaggattctttattgtctagattttgtttaaccaaatttgttcagacaagttacttagcagtacctttcactttagtgtaatgctcaatgcaatcatctactagctggtcaaagcttggaatgtaacaatgaagaccttccgaaaggccaaatcctggataatccattgcaaaaaccccatatccctttaatgccaacttccttgcaagtcctgaaagtattatgaaatagttaaattccataatccattaacaatatcaaggcataccgaaaaccaaaattttattaatctccgttgaaaatcaacatgccttcaaagaaaaatgtgcaagtgtcaccataaccgtgacaataacacactattgcttttggggaagatgtctctggaagccaactcttggagaaaatttccactcccctagagttcctctcataagactgcaccacagtaaacatgactatgaattaactacttaataaacaatactaactgtgttaaacatttgctcttaactaaacaaacttgaaggttttacaagcaaaacaattgacgaaaatcacattaaacaatgaaaatgaaaagactgaaacatcctcaaattacggatagagatagcagcaattatagaaatagatgttcgtcactgaattaaataagtccccacctccttcattttcaatccatcagtaggtgtctgcaagagtaaaaagtgtgtacacaatattagttttaaatattataacaattcgaggaccataagctaccccttaattttaatgaattaaatatttaaaagatttacagtgattaaagataaataatcaacaaagaccagttaccatttcccaattcccatgtaaccaatttcgactcactccgacaaacaaagggaattaataacagttaaaacatcatgttgtgtattcaaactaaaattaaaaacgcgttatgaaaatgaataccttaaacaaaatatgatcaattccaagctgaatatccttaaaagcctccctcgcacgtcttctagcaggagcttcgtccatgtttgaatccaaaagcttctgcatttcatcatcaacgccttgcagccttacagagacagaaggtgccattgattcacgagtggtcttattcttattcttcttcttctggaaattaaatctgaccctgaattctgtaatactagaagaaattcattcttgggtctaaagccatcaaaactgaaaatggtaagatgggttttaataattaaaaataaaaataataaaagcttatacagttataccatccaaaaggtggcaccttgagaactttgcggacttcaacgccatttgactcttcttttttctttttctttttaattattattatataataattattttgaaaattattatctttt

SEQ ID NO: 10859 - DNA, 500 bp, Cannabis sativa
acctttggatgattcaaatgctaatgaatcaagtatgtggcaaatgtggaacactctccctctcggtcaggatggtctaggtttagtaggcggtcctgctagctggcttctatcccccgaactgaacagacctggcaaggatgagtttgtgcatccttctgctcaaaaaacaatggcctcgttgtttacaaaagaggaacaggtccattcaggcagtcgctcaccacaaaatatttttcatggcaatggccaaaatggcgggacatttagccccgttactggttcaagagactctgatccatggtcacagaaacctttctttccacctatgtcatcgggagaaaacctttctgttttcaaaccccaggaggaagctactcagaatgaaatgatttatgggagtcccaggcccagcagatcaaccaatcatccatttgagcagtctccagccaatggttggtccaagtaagtttgtgcatcttgaatcctctcctcgtata

SEQ ID NO: 10860 - DNA, 537 bp, Cannabis sativa
gcagatgcgcgacttgacaatccctaatgtgtctcgaaataccatgccaagaccgctgcaaatgctcaccgaatcaatatattaactttgaggcagccctctaagggaggaatccaactacttataaatagtcaactctccatggagttgactcaacgaaggatttgaagaagaaagaaatgtcgacgaccttttctttctttgaaagttgccaaggtagtctcgggcccaattcacaaccaactcaagcaaccatctccattttattatgaaactttttgttgcacttacatattcatcatacatgatcacgtactatacatcattaactcaattttttcttttggtaaaaggtcaacacatctatgaatatgtaaattcaagaaaatatcttcacaatagactgaaggatcaccacataaatcacctctgtgatttatgttattggaggtaattaaaatgttccaattatacttaacgtaaaaaaaacgtttaatatagcctcaaatgagaatggggtatcttaattagtgtacg

SEQ ID NO: 10861 - DNA, 515 bp, Cannabis sativa
tcactgaaacccaacttctgcgttagaagtgatgtcccagcaactgtcaataaacagagagcaacaaaagcctcagtgctccttgcttcagcaacaacctgaccttaaaacaataatttagattttgactagaaaagaaaagtaaaaagagagacttttgtcggttgaaaaataggcacacctcaaaaactcgcctaagaatgaattttcctccaaaagaaatcagacccaatccacctaaagcctttaaactttctttaacaagcattggcaaaacactttcccctacaaggttctgcagaaaagataaacaaaggattttactaaaggaactaaatgtataagagaaaaggcaaagacaaagtacaaatgtaacaaaaacaatcaaaaacattaaaacaataatgaaaagcatcggaattacatatttgtagatatgctgacaaaacttatgcaatgactagttgcacgtgtgatcgaattcaaaattgaaaagaccataagaagaaactttt

SEQ ID NO: 10862 - DNA, 906 bp, Cannabis sativa
ggatggataaatcttaaaaaaggcttaaaggctaacaccactttaagctatgtttggtgggagggagggagagtaggatggatggagaggttagagaggatggggagtaagagggatggagaggattgttaatttgtttggtattaggtgtgagggagaaaaaattaattagtaaaattataaaattatccttttaaaaataaaattttattattttttaagggtagttattgtattttgtaaaatgtattttgtctttttttacaatccttccaaatttggagggatttaattttgagggtttggagtgagaatgtctccctctatctctcttctcccttttgccaaacaagtgatttagtctccccttccatcactctccctccatccctctccatccacccatctccccctcttaccaaacatagtgtaagaatataaggtgcacagcacaacaccaaaaaaagtaaacaaactaaacaaagaaagaaaatgataaaacaacttcaaatgccttcccctaacacacaagaggaaccacgaaagcctgaaacaagcagaccaaaggcgaaggagcactaatgtcttccaacaagaaaaacccacactcgtcctctattgtaattctgaacggtgaaagtgataaggcacatcctctttccctttacatctacaaaattatgaaagcttactcctagccattgtgcactggagtcaggatgcttgaatagtaacctaaaggcacacagtgtgatcttaaaaaaaaaaaaggaataatgacaccattccacaaccccaggccggttcacatttgaaaagagcctttgaaaattctatcccctaaaacaagagaatgagagccacaagaagcctcatcactatctcgcgatccaagaggacgactct

SEQ ID NO: 10863 - DNA, 612 bp, Cannabis sativa
gttgcttggtcattcatactataacaaggccttgattataaaaactaagctcatactttgttgttctgtgatatttttacaaaacccaagtaacaaaactctatttttaaccatcagaattcagaatgccatatcatcaaagaggcaaaaaggagtgagcatatcttagtggcttgtatattaaggtactactactagttactagtactagttactatctctttatcaatacatgttccatataaatatagaataaaatctagtgttttcgaaaactgacttagtagtgtgttttggttatttctctgtttaatttccatgcatgtgaagctattaaagacatctggaaagttgtccatatagttttcatcatcacgggtccatagtccatagtccactccataccatatgatatagctttttaatgatctccttctcttctcctcatgacatgagtccattgttttttgtcttatcttccactcacttatgccataaatgttattcttgttaaatatacaatatggaatttaatggagagagagccacatggagtcatgccacaactaggtgttaagtactacttttcattctttgcaggctcaatgacac

SEQ ID NO: 10864 - DNA, 623 bp, Cannabis sativa
  modified_base (265)..(265): a, c, t, g, unknown or other
ttctcctccttgttgtgcctggaaattagtaataaatatctttacaaataggcataagaaaattggagattttttttagcattaattattactaggcacttgtaatgccaaacactactaatagccaacattttttataattattatttaattagatggtgttttataatatttttgtttttaaatattttaatcaaaaaataaaaataaaacttttgttttgaaaaataaaaatgcgtcttataaccacttttgtttttcaatnttaaaaacagaaaacaaaagtgtcttctgtaaattttattttcattttcatttgttgattttatttaagttgagttcgaattcgaagtcgggatcgggagccgggtcttgatccgggtccaaggttggggccaggatctatctgggttccaagttctaggttagagttagagtccaaaatattgatcaataaaaaaatttgcctaaaaaaatttagaaagtgatttttttttttttcaacattttgattctcaattaaaaaattaaaaagtaaaaacagtttcatagtacatgattttagaaaatattttcactttttactgatcttttaacattttatttttttaatttattagaaa

SEQ ID NO: 10865 - DNA, 640 bp, Cannabis sativa
ttgtggttgtggttgtgtgataagttaaattgattgtaactgtaaaataatatagaataatttgtgctaaacttttttatattttttattttaatactgttaatctttaggagttttatttgcatttcttaaatttgaattaattttaaaaaagttacttctaatatatcttttacattgtttttctttagtgagaaatggttgtaattttaataagttagatactcgttgcaagtagagtctagtcattcaatccactatatatcaaaaatattgtaccttcaatatttgttttccctaaatatatagtaaatatacataattaccaatattgtaggaggggaaaggaataataccacttggtttaaaagcataatcaaaaatcaaccatttagtttgtggaaatttgatatttgaaaatcccaaaaaatgaaaatatttctatgattgggtgtttttctaatgaaaatttcattgtaaaactgaaaaagtttgtgttactgactcttgctgaaaaatgccagaaaaaaatgaagatatgttaatttcactgttgaatctcgctacttcattagcatgaaagtttatgcttattgaggtttcattattatttcaggttcatatcaatagtagaattagt

SEQ ID NO: 10866 - DNA, 952 bp, Cannabis sativa
gatttgagcttgaatagagttttttgtggtttttctatagataaacagtccatcattttttcaaaaatggtgaaccgttccccagacaaaaaccccaaaaaatagtccatcatttggggaatctggttcatcagttgaggtggttttgggagccttgattttgcattttattgatattttagggtatttccactctatttcttgataaggaaatttctagttttgaatttaagtccctgaaagtgagattgtgagtcacttactagttttacgtaaattgtgacttaaggcctttaatcgtcaagcagtagtttccactcaggttgatcggcacaccaaaattcaggattgaggtaagattattataatagatatacatgcatacatgtgtttatgattttctattagataacatatcagtaagagtggtattagtgtatatagagttacactgaatatcgacaaatatatatttggcaatatagttaagtatggattgatgctatcacattggtacgactaaagtacatagtataagttgatattttggtcgatcatactgtcatgaagaatattcaaagcttatgctcatcggacgcaggatataggatcatgattaggtgtatgggtgcctggttacactccagttatatgtttataaattatatttttcttactaagtctgtcgactcacatatatgtttacatgtgtaagtaagggtaaggcaaagactgagcaacaatgagtctagagtcagatgatgattgtacatattgggatggttaggcatggagtgttcaggtctttaggatagtaggctcaaatgttgttagttgtcgggagacacttttatataagaaatattttagttttgtttgtaaaacaaaatcgggatctcaggataatgtaactttaagtatttagtaattttttatttaaagttcattattt

SEQ ID NO: 10867 - DNA, 532 bp, Cannabis sativa
atgttaatttttatattaggtgatttattattagttttaaaagtaataataaattaaagataaatgatgttttttttttttttttgtaaattgttatgatcaataaataattaaattgttgtgttaagtatcttgaactattagttaaatgactaatgttagtaaaacatattgcaagcaataataatgaagtggtgatattgaaagcaaaataacgtattcaatttgaaaactttttatatttttttaatcaaaatataggaacattaaaaatattatagtaacataaatctaacaatctgcttaaaaaacgaacaatctaaactaaaactaaatatcaaactgaaacagaatactatacagtgttctaaaaaattaataaatattaaaaaaaaaaaaaggaaatagatataatttacaaatcaggttaataaacaaaataaatagggtcatcaatatttaaaagtactacttttagtgttaattaataattacatatgagccatacctttcaagtggttattgaataacc

SEQ ID NO: 10868 - DNA, 1369 bp, Cannabis sativa
ttctgtaatttattgtaataacggccctgctagacaaattatgtaatcctaaagggaacttattttctatataaatgaatgatccaaatcaaataaattaggctgaaattattaccataagtgaactaagtaaaccaaactctaaccactataattctcttattttctctttatttttgctttcatttttgtctattttagtagcttatattatgagtacttactattttattaagtcagtactcgcataactgctagtgaatattttaactttgtttgagtaatcgcaatatttagtgttgtctaaattctgccgacaacttgatgtgtttgtatcaattataattatcattatgctccaataaaaacatgcaaaatttgatgaaaattttaatatttcattaatatttttattgaacatataaaagctaataactttattattgtctttattgtgtaattaataaaaaaaatgaatatacatagtttatagtcaatctatatggctaactatactaataaaatagtataaatgacataaaaataaataagaaagtagtacttgtgctaaattttacacaatatttttatatgcaaatttacattacattttagcacattattagaacacataatttactaaatatattttaattttgcatcacttaattaaatttttgagacataattttggacattgacccaactctattacttgacacatgtaagtagtaattaactagcttaggcttattttattttaatttaaccgttatataatcaaagaaattaagggtgcatttggcaacacttttttttgtaataccctaagattacaaaaaattagattagcaaatcctaactaattaattgtgcactaataagaaattatattactatataatttaatatatgaattatactaataaataatattttaagatcccgttggtaagccaagagcatttttgtaattttgacccgagaaggggtaaaaccataattgtaatgatatatcatgcttatagaatatattattatatagtatatttattctgtctatctgcatgtatttttgacaagtcggcacgatatagtcacaaccgagtattttaggccgaactgggtttggggcccaaaatacatttatggaatttattttggcattctttggataaatgggaaatctaaaatttatatattatttttgtgtgtggtgaaatcacaagtttgcctttgatgagtgtgtatgtttattttggccttggagggcattttggtcatttgaccatatttgatattattaacaaaatagaatttttcgcaaggaattaatccaattttctagttttgttttcctaaaccgacc

SEQ ID NO: 10869 - DNA, 1257 bp, Cannabis sativa
gtgtgggataataggcactgactataatacacgtacttgccaaaatcgtactaacatggatgcatctcgagctaattcaacaatgtgccacataccacacaagatgatgagacattccacttctaccttactgaccatcataacgattttaattttgaatatgtttaattataagactatatactttaactgaataggtacaagattaaaagtaattttttgtattggtttggataagagtcattgcattgcttttttaaggatttattcttgctcaaacatgcttcatgtgcaacctattaatttatgtatcatatttttaataatctttcgcaaccataatttctaaattgtttgtttcctttattacttttttttttatgaaaatcgatccacccttgatattttttcattgagtattgtgtaggtcttcaatattatttatgtgagattaattattggattaaacggcggttattttatttttagtggcatttattgattaggcattattttggtggtattggtgattaggtattatctaaagcctatatattttatatataaagaatttgaaactgaagtcttctattttcttcggtaaaaatactccagagaatttgaaacaaaagattagagaagctttggaaattagaggatcggaagggaacgtaaaatatctagagctgcccttattatgttaagacagaaggatgctaatttttttttttttttgggataacctcgccttgaaattgcaagggtgaaagtgaaattgcttttgaaagctgggcgtgctactctgatcaaattcatgggtctttccatgcctatgtatgccatgcaaccaagctctataatagacttgtctcaaggattgatggcatggtttgtgaaatctgatgggactttgagaaagggaaccatgggatccatttgacagcttgggataagatttgccttcccaaatctcggggtggtcttggctttcgtaaaactaaggagatgaatcaggtcttccaagcaacgtgggggtagaacttattatgtggaagtcagtctctttgctgcatgattatgaaagccaagtatctcaaaaagaaggagcttcttaaatgtatgtacaaggactcagatttttggttttggaaaaatgtggtgaaagcgagtgacctcttgagagaaggggcttgcaaaatggtgactgacggtagggatctactccaatattggtggaggattggtgccctcctcttc

SEQ ID NO: 10870 - DNA, 671 bp, Cannabis sativa
acttactaataacttaaaaataaataaatgaaagtaagaggaacctgtatcatttgaatcaacttggccaagaacagctagtgctttagtaatcgaagcttgtttcaccggaacagatctccccgatccagttttgaacatcgaacctccgtcaaattcttcgacattatcctccagaagctttgaacattctgaatcaagtaaattagaatcgccaacctaaattgagaaagacgcacacaacaactctgaaccagagaaggaaaaagaattaccttgaaacaaaatgtctgtcatggaagggagacgcgagcttgggttgtgtcctctttccacagaaggtggggcatcagtatccctggctccgccaacaggtcgtggttcgaggtatcggccggtgatttcccaccggaaagtgtttccggcgccggagaatatcttccacgtcgacatttcccgatgcaattagggtttattgcaagaaaatcggtgaaagagtactacgaaagtggatgaaacctctctctcatcagctctgaaattctttttttttttttttcattttcaaatttggcgggaaattgaaaacgagtttctttcttcccattatatttcttgatacgtgtctttgtgtgattggttccttgaaccataataatgaatagattaat

SEQ ID NO: 10871 - DNA, 807 bp, Cannabis sativa
tcatccatttctctagctaaattactccttaggacaccatagaagctttgaggtaagttcttgttgtatttttcccttgatttcctaatagttttgagttagtattggttagcgttctaaatatttcaggggctgtgaaatctattgatattagagtatgattttaggtcagtttatgaggttgtttaagcttgtaatagttagatgtaggggctggttggattgaatgagttaaatgtggtgaagtgagttcaattttcattttagaatgtaattttgagcatattgatgacttttggtgaattagtgatttggatatattatatttgttatattatgatgttttgggaagtttgattaggtttggaggaggtttgggtcaaaattgaagaagagaacccttgaattcttggtctgccaaaactgattgtccggttggttttggtgcaccagaaccggtcaaccggtttccctacaaggggaattctcgggttttcttttgattctgttttggcttggggtgttgcgtagtatctattttaggttggttatgagttgtttgacctattttggagttgttggaagctaggttatgtttcgttttggattagggttttatttcagaattttagtttaaggtatttattgagttttggttgtcgtgacataggactgggattgcctagcttgttttccactcaggtcagcccgcacacttgagttatgaattgaggtaagaaaattgttatgcatcacttagggttaagtgattagtaatggtaatgtatagtctcgattatgatcgag

SEQ ID NO: 10872 - DNA, 583 bp, Cannabis sativa
ataattaattcctttaattaaatatctaacaaaatgacataatatcccacttttttaataaacatgatcaaagccattaactttactgttatttttacttttatcatataatacttaaataattactttaattttttagttccacaattgttttttaaggcataataaaataagattaagaaatgtgttagaaatgtgttttatataagggtttgtttggaaagtaattgaattttaagtgtaatttgagataattacttaatttaggtgttgttggaggaatttcaacaacactaaatatatacaagtactaatttagaatagtaagtactcaaaaaaatatattaaaattatatgcaagtatataaataatatataaaaaatacaaaaaaaaaaaaaattatagtggtccagctttgaggcttgaactttctctacttttgaatagtactcttgatttgtattattattcagttcattttaaatggaggtagatgcaattatttacatggtagtaggtaatcgttacaaaatgtaaatgtagttataataagatctaaggatgtgcagaaagttattcaat

SEQ ID NO: 10873 - DNA, 522 bp, Cannabis sativa
cacataaaaataggggttgaaatgatgaatattccgtccaaaaattgaaaattgtgaaaatagtacgaagacatttttgcaggatcgggaatggcttacgtcataaatttatgggaaaagaaaactggacgcaaccatttctatctatttatatattatatattcttatttctttctgaaaatgatttatatttatttttagaagaaaaagaaaaagaaaaacttgttgttaatttattactgacatttgaatacatagcatagtgcccaacataaaattctatacaatattaattatcgttttcttttttttttttttgatgtgaaacaatatttattatagttggttatcaattcaacatttaaaaataagaataaaaaaaatctaccacatggattggttttgaatgtatttttttcttcctttaaattatgagctggttatacatgtttaaattgatttcactaccacccataaaatatagctctagctaataataggctattagataatatgatcat

SEQ ID NO: 10874 - DNA, 558 bp, Cannabis sativa
ctttgctaataggattagattcctcaaaacaaaacaaaacaataatatgaactttctctgttatttgctctttttaagttattttaatcctgaaatacagaaaaagctttccggataatattgtttattcagtaagtagtacatgtcaattttgtacctagtttaaaaaatgaagtttacagcaacataatccagtgaaacagggattattgttcccacctttgttatgttatctacatgtctttgatttggtaaggctgtaaaaattctatatttgctttcatgtgtaccttgacttgaggcctgttgtgtataaaactacttctaaacaaacttatgtacagtcctcaacttctttctagtatctgactcctaaggaatagaaaaacaaaagcttctttatgtgcatagtgtttcaattagttatccaggaagctcttaccatcctgcagatttcatgagctgtcagaatttgatgaaacgagacgaagttgtcgcaggcgcttggctggacacaacgagcggcgaagaaagagctcaggtgagtctcatcaagaa

SEQ ID NO: 10875 - DNA, 607 bp, Cannabis sativa
tttcctaatttaaaagcctacaataaagttattgaaaattattgatgtactttaaataattctattgggtatacatttgaatctgtataatgttttcatccactttataacttggttcagacttaatattaaacacaaactttttaacactcatcagtgatgtggcttatttttaagccccataaaaataagtgaggttaataaaaaatgatgcatcggtctcaagagtataaatcttatgtatgaaatgtgtctaacatctctctttgaattaacaatccaaaaagaaaaaacttcaaatacttagcatgaaattgaaacgaaaggacaagaaacatcgagtaattgctataaaaactaaagaggcaaagaaggggttcaattgggaacaagcttaacatctcataacctataatgaatatcaataacagcataaaatcctacaaaatataaaattccatgtccaacccaaaaaccaaaatcacccaatagacagaattcaaacgcaaagtttttctaatgttccatctcattttcatattacaacaaagtacaaagaatggttctgttaaaaaacaaaaaactgtaactgtactagcctctacaa

SEQ ID NO: 10876 - DNA, 688 bp, Cannabis sativa
aagaggtatatcataaatatatattaggtaagaaagtaattttattattttcaagaaattgctacattttaattacatttgatattaaaatagtttttttctctttttttgtattcttacgtaaaagttactttagcaactaatggaatttaaattgtagtcaaaatttatataacaacgcacataaaaactatcaacacatctacaaaattaacaactttgagcatattatagactctataaaaaaaaaaccaaaagctcagccttagccaccttaggcgcaaaacaacaatctaaacgccaattttttaatatttgaaaatgatggattgtttagagattgtaaaaaatgaaaaatacattcaatttactaaacaacttctacagacacatcaaatccatccatacattccatttccacacttatatataagaagggtgttaattacaatcttctattataactcttaatttacagtactgaaaatagaatttttgatattaaatctagtttactacgtgtgtttaaaaaactttaaacctattttcggcactataaattattcaaaaaatttcaaacgtttacttggatgttgtaagtactataattttgtgttattaaatatattctcttaacatatacaagaggtacaattgaacaagccaaaagaattttcgagggagaatt

SEQ ID NO: 10877 - DNA, 596 bp, Cannabis sativa
  modified_base (431)..(437): a, c, t, g, unknown or other
taaagaaatttttacatgaccaaaaatttaaaaaaaaaaaaatcacaaaaatatgttaacacaaataaattttatttttatgctttaattatttttatttatgaaaatatatacttcaagaaaaacaataatttttttaattgtattatagttgtgatcgttagtgaggttgttttatagttaattttataactatcataagattaattttttattgttttttaaatcataaaattataaataatacattaaaaaaatagtatatttagaaattttcatattatttttgtttatatattttttttatcagaatttttgttttatatttaagatagagcattgctttcggacactagtggtacctaacaaacacttataaatatgtcaccttgtgattggctagtgatactctctaaaagttattatattannnnnnntgagactcgatacttaattagaccaatagcgataataacacataagaatgtgttaggcaccactagtactttttaacatttaagaattagattgagaatcttgatttatttaccacctactccatttaaaatgacattttgttttgtttacttagttta

SEQ ID NO: 10878 - DNA, 1157 bp, Cannabis sativa
ttgatgaacaagaacaatgaacacttgggggataatgtcgtgtcgaccataagtgaatactacaagtaaattataacactactactgattaacacataacagagatgtaccaagtgtgcatataattccttacaagtcataaattataacccttttttctttcccctttctaaaaattctatgtggcatttcttcaaacacttgttgtgcataatttagaaaaaaaaaaaatgatggttattacagactaagttcactttatcaaatcagattatctacacacaaattatcaagatttggctcactaaaaatcagtttccaaaattctattctcatcacaaatcaaaccaacaagaatcaatcaatcagtaaagtttaaaccatggcaacttatgggttatcaactcacattactaatagcgttctgctccaaattataatctaaattaccattctcactagtaattaagctttacattaaaaaatttcataagccatttttgggtgaaatagaaacattgaaacatttatggagttggcaatggcaactacaaaaagaagaagaagaagagaaatataaaaagggtaccttgtaagtgatgggaaggagcagaatagggcggcgagtggactgagtccggcgagtcagagaaggagagagattgtcgagaaggaagtgtgggttctttcaccgcggaggaagaagaagaagaagttttcacgaatattggtttttagggattttccaattaaaaaaaaaaaatattaattatttttcaaacataaatacttaagtttaactcgatggttttggctagggatcactttggaatggttttcgagaagctgcggcttgtttgttagctataaatacagttatttcattaaagcatccttttgtgttaatagagagtgactcggagacagttatcaaaatgctatatggaacctctttctttcagagaattgataactgtgtgtatcaatgtagattactctctaatcttttgattagttgtaatttttttttttatttcgagaactcataactttgtagttcataatatggctaagtgggcttttgtcaaaaatgttactgacatgattatctgtcttctataccaggcaacattttatgtaattaccataaggtctaa

SEQ ID NO: 10879 - DNA, 630 bp, Cannabis sativa
caactccaataacaactctcattataaatactctaagatccttttaacatttttcgatttaatacatatcaaagtttcgggatataaaatcccaattatttaatttttaaaacatattaattaaaaatagttttagagaggaggaaggggggtaggtgtgagattgaccgaaccacctacgcacacgtaccatctctattccacaagacttgtctaactcactcactatataaacccatctcaactctctctcctttctcagcttgactctcttttctccaaaagagaacccccaagctgtaactaactaatccaaaaacacaaaaaccctttttttttttccattttcaaaaaatgaaggccttaacaacaacgcctccctcaactaacaatctcaagcccctaatccgctcccctgcggtaccaacccgacccaattttattcgggtttacccgacccgagtttcgattcaatgcgcttaccgttctgaatccatgaatttcccaaacggcgtcggatccagtcgaagcgattggcagagctcttgtgctattttagctagtaaggttgtgagccaagagcagccgactgataaagccggcggcgcagatcacgtagccgccgtttac

SEQ ID NO: 10880 - DNA, 1512 bp, Cannabis sativa
acaatgttgttagagatcagaacctgattgctagcctaactgctgtgtagtgtcaaagacttatggcattgctatctcagagaacttcagaagcaacaagcagtgcacctgttgagtctcctatggtgtcacatttttcaggtaaaaaatctttgatccctaactctaaatggattattgacacaggtgctactcaccatgtgtgcaatgacatttctttgttcaaagatatacaatttgatcagtctataccttctatcaaattgcctaatggaaattttgctaaagttgcaaacattggtacagtttacatttcacaagatctttctttgtttaatgttcttcatgtaccaaagtttcattgcaatctcctgtttgtttctgcactaactaactgtggcaattattcctttcatttttatcctaatcattgtgaaatacaggacaatttgaagaagcaaatgattggaatgggtgagagaataggcagattgtcttatctcatttcaggtgtaaaaaatgtcattccttatgctctttctgttattttagattctaaaataagagatgacacagtctggcattatagacttggacactcttcttgtatcaaagatcactcattgaataaagctttacattttcactcaaattcttccaatgattttcactgttctgtgtgtcatcatgccaaacggaaaaagctgccttttgtttcaaatcataacatgtctactgcaccatttgatttaattcatgttgatatatggggaccttttaataccctaactatagatggctgcaagtatttcatcaccattgttgatgattatagtaggtacacttggacacatttaattaaagccaaatctgaagctcaaactgtcctacccaatttttttaagcttgttagcactcaatttggtactaaaatcaaaggggttaggtcagataatgctaaagaattggactttaaagatttttttgcctctttaggtgtcattcattaccattcatgtgtccaaagacctcaacaaaattccgttgttgaaagaaaacatcaacatctcttaaatgttgctagagctttattatttcaatcttacatacctttggtctattgggatagttgtattgccacagctacatacctcatcaatagaacaccaacccccaacttaaagttcaaaacccattttgagaagattcattccaaaccaccagcttatgagcatcttagagcttttggttgccttgcttatgcttgcactttatctcaaggaaggtccaaattttcacctagggcagttccttgcatctttataggctatcccataggcatgaaagcttataagttgttagatttaaacacaaatagagtcttttgttcaagagatgttgtttttcatgaaaagatatttccttttgtgcacactactaatattccacctgatttgcagaatttttttcctgcttctactcctactattacagcagccacatctcctcatt

SEQ ID NO: 10881 - DNA, 794 bp, Cannabis sativa
gaagatacatgtgtactcgggaagcaaacgaaagcatttggggaccaaaacagggacccatcccccaagttaacactggtgttggtccctgcgcccaagttgacgttcagcctggttcgcatggtttactactcaaacacaaattctgctctgggcatttttcttatcttggtccaaaatggagtaggagacatcgttcacaattttgaatgccatagaagtaccaaaacgactgtaaaaggggagctccataagctcatttttcacattttggtaagtctccataaggttagagcatctctttataatttctctctttaaaaatttgagctctttcttaagtcaattttattgtaattctcatgagcaataaaaacttgaagtagacatacatctactaatattgcgacatcagaagtgaactattataaatttttgtatcttatttaatttcttttatctattacttttctcaccaatctagcaagacggtgttagtcaattttcagatgtcattctatttaaaagtattttttaattaattatttattttctaataattaattcaaattaattattgtagtttttttaattaattaattaataaaagattaaatattagtaataaatgttcatttttaaatttatgtttagttagatgatttttaagggattattagtcatttttaaatttattaaaaattatgtaaaaaaatattcaaaaaatatgaggagcaaattattatttgccaaatcattttatctatttgaacagtttttatctttagataata

SEQ ID NO: 10882 - DNA, 500 bp, Cannabis sativa
tttgatttttttatttctctaaaatttaggataagattccctatattgtcgtaaattgctcaacaacaaacatatttattaggttataattatttggtatatagttactgtatagaaaacataaaattatgatgcatataaatatattaaatataattaaacatatttattgtgtattgattatactatatattgttaaatctatacaacatctctacatataaataataataatatataatatgatggaatgaatacgtatataattattaaaattgagcatggtagctgactaagatatcttcagttgattaaataattttagaatcaaaaatatatatatagtcatgtcgataatcgacatatatatatctttacattaattaatttgaattaaaatattaaataaataatgtgtttgaaactataaatatatataggtgtagattattaatttttaaaagtgggttaattattagggttatatatatatatatata

SEQ ID NO: 10883 - DNA, 1245 bp, Cannabis sativa
  modified_base (937)..(939): a, c, t, g, unknown or other
aaataatgaaaaacataattcataatgcatgtctctactatgtttttcaaactgtagaaacttttaatttatatgtatgtatttttgtggagttgaacatttgataaatttaggtcaaactctttgtagtagaaatcagcaatccatatttttactgataatatattttgtattcttaaaaattgtaataatttatttactttctgttaattttgatatgcctactaatattttccccagctctcggacaccaactgtcataactgtttttgacagttatgttagttagagtctttcttttcactagtgtgtataaatagccttttggctatatttttttaagtgaccaattgtaataaagctaagtatcaataaagctttaattctctctcaattctgtctaagagtttttcgagttcctttgaataggttcagttgttgaacccgagtctgttctggtgtatgaaagtgtgattgaattggtgtttgctcaatactttccataataaacaattcttagacatgattcatcaaccattatgactgagaattatagcatctcatcaagatcacatcacatcggttcatacagttttgtattatataattctatttattttagatagggttatttgcggcaaaaccctctgaagtaggcaggtttttgcaactaacccctaatctaaaattttcgtggtaaaacctcctaaacttcgcttctgttagtagttagccctttccgtccatttttaggtgttaagtgacaggttgaaatgtctacgtgtacacaatgtacacgtggcacaatttaattagtctacgtaataaatatttaaaattaaaatataaaaattaattattttaaaaataaataataaaaaaatatttttatttaaaaatcaaaaaattaaaattaaaaaatttatttttatttttnnntttttttttctttttctttttcatttatttctcttttctttcttcacgcctccttcttcttctctctctaaacccttgcccccaaaatcagcctcatcaaccccaaccgactccccattccatctccacgcacagccaaccaatctcatccccagctccctaaaaaaatctcactcaggtctctcctctctccttctatcgcgcctccctcttctcaaatcgcagccttccttctccgtcagtccactcaaggcttccctctctggtgcggctctctttcctgtcgatcctctggtgcggcgctgc

SEQ ID NO: 10884 - DNA, 529 bp, Cannabis sativa
cgactttaaatggtatagtctaatgatctatacatgtaatttctataaaaaaatagcttctacaggtcaatcttcaataagtggacacttttacactctttaacttcctttattatgaaaattgtggaaaaaaaatctctaaaatgttgttttgtagtagtgattttaacacaatatatgatactaatttttaacaaagatgttcatttaaatatttttgccgcaaattattctttaaaaaataaacaacgtacattagatatgtggcaacagtgagtcctcaccaaccaactaccatcggagatgttgttagtttgtggtaattatgaattggaaaaaaaaaaaaaattagattagcgtacatgactgtgacacgctccatatacaccactaataaatattatttggatggatttctgaatagtctctcaaaatctagtgatcctgttccctcctctagtcactgtctcgctgccaccttttttgatcaaatgtagaaaatccaatacaagtcctagccagatcgaag

SEQ ID NO: 10885 - DNA, 777 bp, Cannabis sativa
aagttgtattacactttttggcttctgatgatgagtagtctctctctcatctcaatctcaatcttatgatcatatgttgtacctatgttttatttattttgaagttgggagaatttagtgtttttgcatgtgtttgtaaaagtagatatataaatatttatggattcgatagtaactcttgaaactgttgtgtggattttgtacaaagcttatatttcaacttatatgtacatagtagtgcagttattatgtgtaactataacccaacaaattataatctggtttgtttggagataataatttggtatgacagaaataattattgagtccaaactccaaaaatggcagagagaattactctcatcttagtaacccagttactcttctagtagattcttcatgaaaaaaaaaaatcagctcaaagtgggtatctgtttttagcatatcatttataataataacacatgtgatttttagtaactattagttacattaaatatttatgatatgtgtatatacatagagtttaaaagttattgaatcttgtccaaattaatcagaaaaaagattagttttgatagaatgattgagttgtaaggttgcatatattgaaggggagggatgttccttttggttgtaattattggtttagtttttaccaattttattttgtctttttttaatttatatgttgttttttgaaaaagaaaaaggcaattccataagtaataatgtggaagaatcgagagtagtaatatatgtatgtatatttatata

SEQ ID NO: 10886 - DNA, 789 bp, Cannabis sativa
agaaactactatggcacaagaaatgaaatgaatttctctctcgcatatggagtatacacacactttcattaaatgctaaattttatttcattgtatagttaaattctactaaggagggattaacccaaagaattttttttgtagatttttttttttgtttttcgttgaaggggattaaaataaagaagttgatttatgtatacatgttatctcaaataataaataactaataagtatcttttccaaaaaaaaaaaagacaaatgaatcaagaggtatgaactaatccaattcatgatttaggcacaatttaaattgctcttcaattcaattcttccattacaagaaataagaacaagcaataacttaataaaatactttttgaaggatatataataatcttacttttgtattagatgattgctccattgataaaatttctaaactctctctttcattgatgaatgattttagggttaaaacctttctaatttgaatagtttttttcttttttttttttgaagattttaacattcagttattgttttagtggtggggtgcacttattaaaaataaaaacaatttttattataaatatcatttggtaattttagacaaagttaaatatgtaattatatttttggggtgtaattataattttatggggtgtaaatataacatcccttcacttaattctactgatttctggattgtcattgtgttttaggcagtatctctttctttctttttatgggacccgatcgacaatttttaaaatgcagtatgattta

SEQ ID NO: 10887 - DNA, 560 bp, Cannabis sativa
gtctaacattgttcaagatgggacactaatgcatgtgaaagctataataaacattaataatgatcatgttttatggagttgatgggtgaaaaatatggtttgtcccctcttaactacacaaaatgaaaatatcatatttgttggcaacatgaaaaaaattggcttgtctcctcctaacaactcaaaaactaatgatatagaaaaatattgaagaatttgatttgaaatgagaacatgtaaaatttttgtgtcccaattgaggtctaaccctcaaccaccaaaacattcaatgatcataattaatagtccttttgatatactattcacacttctaagatttatataggcaatttcaacattaagattagacacttatgagagtaacacttgaaaagaaggataaaagaaagaaagaaaaatctcacctttaggcaaaatcctcattattgaatgacacaaacacaagagttccttactccttcaagttcaccatcttctgatacactatcaattcacaaattgtcataagaagttgtgttaagacatggttagaagtagaa

SEQ ID NO: 10888 - DNA, 556 bp, Cannabis sativa
tatctattttagtaaacaaaataatttttagctaattattcattatcgtgttataattatatagaatcacttaatatttttaaaaaatttcgagtagtttacgatgtcaaaaataaaatttatatattttgttgcacgcacaccaattttttcttatacacgtaagtaattatttaaatttaaaatattgcactataagctactcaatttttttaaaaaaatttataagtagtcataaatagctacaataaattaaaaaaaatatgaatgtcgaaacagttaaggaccaccagaagaaccctttaagaggtttaagtgcacaaaatatgggccaaaccaatcaacccgaccaacccaacccattttttgtagtaaagatttatgttaagactacccatgactcattaggctgaaaagcaatagatcataattatggattgggcgcattctaactcaatatgacctaacacaacctatttattgagatgtttcaaatttaagataactttcgtacataagatatatgttacattcataaaatatataaaaatgtaaa

SEQ ID NO: 10889 - DNA, 1460 bp, Cannabis sativa
caaataatttcatggaagacatttttggtgatgatcatatactctatattaattaatttgtgcatatgcatataaatgaatattaaatgaatattataataaaaggatatttcatagatatttcataaaaatttcataaaaattacataaaaattattaaattaaattaaattaaattaaatgagattctatatttaattatatcaatataaagacattatatgttagaagatgttaggcactaattattatttttttaatctaatttccatccctaatctaggcagtaagagtaacatacttactaataaaggacactctatgaattaggtctttgcacatgtaattttaggaagagagagaggaatgaaggaatttaataataaatgtacgtgtgatatattaagtaatagtagtgagagaataaaaatttgaaagagaaaagagaaaattaagaaaggcttttataatttaatgattattatttgtttttggtaaagtattaaagtaaatatattctcatcgaattgcatgatccacgacaatataactccaagtttgataccacaccacgtgatcaaaccaccaatattaaacttattattaattttttttaaaataaaatatcaactttattgaattaaaagcattctgaatacaagagggcctttaaattagcacaaacattatgttcgaaaatgctacaactagagaaaaatcgagcatgtctagcaacaacatgagcaactcgattagctgatcattaatttaatacaacgtattttgatatcaagtagagaggacaataaatgacaacaatcctgaataattaagccgaaaatagattacattctctgcctacttcggattgcttggacagtgagaaggctatcaatctcaagctctacattatgccagttggtacccttaatccaactaagaacttccttgattcccagaacttctacgacttcaactgagtagtgagtaggaacttaattgctttgtagcatgtcttagcttcaataagtttgctcatattatctcttgcaataatttcgaaaccataggaattctcatgatgaaaaaatgcagtgtccacattaatcttgatgtgatttataattggtttagtccaaatctcggccctatcatcactattataaagagataatgataaagcaagagtattgtgaacttttcgccaataatcaagagtagtagaagctcaaactaaaacatcataaacttactattaattaattaactctattagtattactttcttccctttacatttttcctcttaattttgagatattaatttcttattacatatttgtgatcaaaatattaaaattatttcactctatcaaaaaaaatatatattaaaattattaatgtagcaattattaagtattcaagctatatacaacttctttaagttttttttttttttt

SEQ ID NO: 10890 - DNA, 622 bp, Cannabis sativa
tatttataattaattattataaaacattattaaccatttgtaaaatgtgatgtgatggtgatattaggagctactagttcttgtgcctaataataaatatgttaaaaaagatttacaaaagataaaaataagaaattataaactgagaatagaagtgttaaaagacactaatattttaaagtgtaatattactattagtacatttaagtattggctcagacattattaaatttaataattattataaaatatcagtattaacaatttgaaaaatgtcaccaatagatagcattaggtaatactggtgtcctgtagcaattttttactaaaaattagcaacttatggcccttagcatattgtatttataataaaataagaattttttatttttatattttaaaatatttttttttttggtatttttttgaaaatctatataacaacacacttaaaaactaaagagcaacttaaatggcaactcaaatctacataatagcttatataaaaattaccgaaataacttaataaaccgtacaaataaaaaaaaatatatggaatgatttcatttctaataagaaagagatggcacacaatccgaatcacatccacatgtaattaaga

SEQ ID NO: 10891 - DNA, 825 bp, Cannabis sativa
ctttccatattgtaactttatttcagtacaattttaacaccatcgtattattaacaaaaaataaataaaaaagtcataatttagaaatttatagtgcgtttggaagagttatccatatttctggatgaacgacatgtggcgtattaagattcgcgtgttcagtggcccaagccttccaacatgcgaatgccagtccaaactaaaggcgggccccaacccttcacatttccatgagcctagcccctagtggtaagatcccccatctcttggaaggctgaaaaggcttccgagagatggagtgaagaatgccttctggagaattaaggagccgcatccagacgggaaagtccaagggatgcatctagaagccttcatacggtgacgtggctactctctaatgtctgggcccaccctgtcagatgttgtcccctctaccagagcatggtagtgcacgtaccgcaaggagatatgccctcttttttgtcaaacgacgatccactgacattctggtatactatagcaacgcccatgcatgacacttgtccagatcaaatgggtcccctattgtacggatgcctctgcctaaaaggtagtgcattatcgtgggccttaatgtcatttatttaatgtatttaccccaatagtaggtccatttttgcacaaaaaccctagcgagtcacgggtatgctcgtacctaagtctaagcgtacataaacccatttaacccttcgtaaaaagggggcagtaacagaacacttcggtaaaatcctctctaagcttccttcttcactaagaaaaacccagaggagaaaatactatagcaag

SEQ ID NO: 10892 - DNA, 560 bp, Cannabis sativa
cctaatgcaaatttagcgagtccatgagccgcgtcatttgcagaacgtttaacatgtgtaacatttacattagggaaaaaggataatagactaacaacatcaagaattaaatctttaaattcagaatttgaattgaagggagctttcaaagcattggccaccataagagcatcggtctcaatatgcatgatcggcaggtggttttggatagcccaattgagactgtgaaaaagagtctttgcttccatctcatgagatttaaagtttcctgtgattggcattgaaagagcagctttgacatgaccatttgaatccctaagaacagcccctacaccagttgtgtaagtggaaacattaactgctgcatcaatattaagcttaaaagcaccagtaggtggtttcgaccaaggaatagtagctggtgtcatttggagagtcgtaactgggtgcacgattgcagaagtagcagcagtaggtgaagttcgatgttgagctgcactaaaattctgcatgaaaacagtagaaaaaacagcaagatccttggctggccgagcactttt

SEQ ID NO: 10893 - DNA, 661 bp, Cannabis sativa
tatttttttaaaaaaacaaaatttgttcttataaaaagtgttctttcacattattttgtattgattttgttaatttattttcatatttttcaaataattatttttgtattctaataagatttcatgtatgtttttttttttttttaatttaatatttaaaatacattttattttaaatatgtgtgttttttaatactagaaaggagatcaagtggtgcacattctattcctaacttctttggcttaatttataggaattttagagaccatagagagtaagttaaggcttatacatagttcctaagatggatgccaactaagaccctcctacccaaggaaaccatggcctacccaaaggacacctagacactcgtttactcccaaggagtgccacatatttaaatattaaagagtgttaattataactttctattataattttttagtcaacttctatgttcgaaatcacatgttggaatattttttaaaatttttttatagcggtatctgttacagttataatactattcatgtaaattttttaaaaattctaaatagtttacagcatcgaaaatagggtttttaatattctagtttaattaccacacatgttaataaaacttcaaacatatgtttgacactataaattattcgaattttt

SEQ ID NO: 10894 - DNA, 575 bp, Cannabis sativa
ttctattgcagacataaaacttgttgatgtcccagaaatgaattgcacaattgcgaatgagccttatccttgaggtgaaatatgtgtcaagggtccaattatttgttgtggctatgacaaagatgaagtgcaaaggaaatgatgttgcttgttttttcattctttgcagtttattacctgttcaatatgactcacatgattattcctctgaataggagagaagttattgatgaagatggatagcttcatattggagacattggattgtggttttcaggaagtcgtttaaaagttgttagtaggtgagatcttataatctcaagtgatttgtgcttcgatgaattggttgttttgatcaaattcaaaatagtaaatgtgttgtacttagggaaattagcggagagtgttcctccgtccttattccccttaaaaattttaattctcatccctacttatttcttatgggtgatgaggcagggattctcctaataagaacgagaaatcccttaataaaaaaaataaatttgtaataaacattcaatatataaaattggtaaactatataaaaaataaaa

SEQ ID NO: 10895 - DNA, 512 bp, Cannabis sativa
tattcttatatttttattcctccacatcttagtaaatttatgtgagtttatataattactctttagtagtattgtatgaatgtactttataattagattcttttttatttcttcttttgatcatttgttttttaatgggagaactaaattaaattataatatctttaatctagatgctaagaggcttttaataaatgctctaaatttagtctacccttttttcaaataaataagagaagacataaattgatcaaaaatatgacatacaacatacaacgttctattttacataaattgatcttacaacaacgaatattgttgctcatcataggggctctaaatttattttataatttttttatgtgtgggtttgtatataaatagtaatcttatatatatatatacattttaaatgaaaaaattatattaaaatataaagtacagagaaagaaatataaaagttgatttgaaaatatcaatacaaaaaattgttatatttagcaaaaaaaaaa

SEQ ID NO: 10896 - DNA, 1437 bp, Cannabis sativa
cctgctgaaccgctcttccgatcatatttgttttactatccattcttccaacgttactttttatatcaaacaacacgaacgagagtaattatcttcactgtcctttcaaaactctctatctatcctagtctccttcattcttaccaaacataatcttaaataaagaaaaaaaaaaccctttacatttctatatatttgttttttctttttttgaaagactatatatttgttttttttctttgaataaaagaaaataatcattaagccaacgctaaaataaatctaaaaacttacataaagtcaaataaatccgaccaccaaactcttgcatcatcaagagaaagagcaagtttgcaaaggttatgagctatagagttcgcataacaattacaaaacaaaaactttgaaatattaagcttatcacagactaaataaatatcttgtaaaaccaaaccataatccgccagacaagcctctattttatttacgagttttgtaacaatttgacaatccgtctccacctcaatattatgatatctaagacgagagtacaattgcaatccaaccagcatagtcatagcttcagcgacatatatagctaaaagacccaccactagggtcgttgcagacaccatacaacgtcttatgaagtcccgaataattgctccaaaacctatacgacagtcagaaggtcactacccaacatcaatattaagtttgaaccacccttcagttggaggagatcacggtgcctccgggggccgaccagtcgaactaacaaccgaaacatgacgagaagtcacacatccaattctcacttaagcttcttgataggttcaagcaaacaaaaaggcccagcccaatacgccttcgatatgaaaaagcttttggtcacgaacccagacgataccaaatgtaccaaagaagaactaagagccgctctatctcatctatacgaagaataaattcatgttctcagaagaaagagagaaggtcaacctgaggcaactctttagatgtaagagcaaaatccattaattagcttaactatggaaacaaaacttgtacaacatgaaatgaagcttcgttttctatcccgcaaactgaaaaactaaactatatatttatttttcataagcattgctattaaatatatatataaaaatacaacatgaatatgaaaaattataaaaattatcgcataattttacaatatcatattattttaataaagaataaaacaaagatagtatacagttcgaagtgcttgtaagcatttgcagctggtcaaaggaacttggtccttagataactctactgatttttggagagatctttggaaccttaaaataccacataaggttcgaaacttcctatggaaagttgcatcaggttcttttccaacatgcgttcaattaaaaaaacgacatgttccca

SEQ ID NO: 10897 - DNA, 607 bp, Cannabis sativa
ataacatacgacatgtcgtttaatcatagccgtccacaaagctctcgtgtgaagcatagccgttggagcttggaatattaacaaacgacaagtcgttttatatcttcgtgtgtaatgctctatttatgagtggtatttccacgtactaacaagacacgaattttacggattaagataagaaaaatcagacacagatctaaacaaaataacacggatttgacatggattttttaaataaaataaaataaaaaattattaataatataactgtataatatatatatttagtaatttaatgttgaattaaaaaaaataatttaattttctttaaaaagaaattaaaaatattttaacttttattatatatagatagatgtaagttttctaatagaacctaatagcaaacatcaaagtcaaatataaatactacatgattttatagacacgagtcaaaaacgaatggacacgtctaacacaaaatattgaagcgagtcaaataaaatatgtacaaacacgacatgataatacgttttgtcactcagctattttatcctaatactacttccaaaacaacacaactttcccatgaccttcaatttaagttttt

SEQ ID NO: 10898 - DNA, 631 bp, Cannabis sativa
aaaaaagaaaaaaaaaaaaatcccggtttgtcacaccttcaaagccctcactgtgttttccatgtctgagatatattgaatcttcttccatcttgatctttgtgcagaagctcgattggaaattatcctaaatatgtataaatgaattagaatacaaactataaggtaataaaacatatatatgtcaagttattttcttcaaacgaaatcagatctaggaaaaatgaaataaagaaaattgacaaaaaacatatagaataatgaaataatataacttggtgtgtttaattaccgtttgattttccttgggtccatgttagggtctatgttatgaccatatctgaactggatatcattagccctattgtccaaactttccttagtattacaaaagcttggaaactcatcagctcttggcccttgattttcattaattagggctgagaaaagggtattagtactactattattaatagtggtagtagtattaagagccttggtgggggctccaatattgctactactaccaccaccaaagtagtccatcaagtgtgcttttttccacaatggtaatgaactaataataccctcattcattatcaaagtgttgcttagctcatcatcatcattt

SEQ ID NO: 10899 - DNA, 1108 bp, Cannabis sativa
ttttctgatttcttagttctctaaactcttaaaatgtgtatagatttgacatttctctttgggattcctatgttcttgcagataccatgttgcctagaagacatatgcgctgctaattgcttccatggactctgctgtaagtttattcatggccatcaattggtcttactgttttgcaatgtgctgtattcattcgaagtgtttttagattttctattgattgaagacagagagaatgttatcaaaatgtatgtcaatataaatgagtggtgtttgagaggtactagatcctcaatgataatttttgtttgtaagtttattttactcatgacatgagttgatgattagaatggagattggagatcttctcatttattttgtttctatactttcttttctttcagggttctgaaacaacggcttcttgcaggtttggtgatcgatcaacaagtgatgttgttgtgaggcttagaacgaaggatgggcgagatgaatggatatattgtcactcccacattctcactgataagtgcaagtattttgctgaccgcctttctgagaattggccaacatgtcagattattgattcccggaactgtgtggaggtctactgcgaggaatcagaattcgattaccatgtcattgttcttcgccttttctatgttatcgttgatggctcaattgatgacccgtggcaaggagttaaaaatgctctaggcattcttcgagtggcttttgaacttgggtgcccaaaaattgtttccgcttgtgtgaactacttggaagcagttccgtgggaagagtctgaggaggaggaaattctaaaaaccataccacagatgggttctgaagtggaagctattcttgatcgtcttcaaccagtcaatccagctgccatcagaagaatttttctctcatcaattcaattcgccacatcatcccctccaccatccatgaatgatatcaagtcttctgcccaagaacaactcgagtatatgataactgaagatgatgattcccctttgctcatagctgatagtgagataaaagctgaggttaaagaatgtgtgaatagactgtttgctaggtttaataatgcattagaagc

SEQ ID NO: 10900 - DNA, 618 bp, Cannabis sativa
actcttggtattgggccttccacattacgctcgatccccttacaaacatacacatgtaataactccgtaagtgggaaaaatgtataactttcttcctttggctcgggtcatcttgaccaatgaggtatgtcaatctataaataaaaacattcctaacatcttctttgtttgttctgtcttttaaacttggacctcgaaatccagacttggaccctgacccagacccccacccggactcctgacccaagacccgaacccctgccttggactctagacccagacctcagacttgaccccgagtctgggttcgggttgggtttcaattttgagttgtggtctggggtaaggggtcaaggtctgggtctagatttgggtccggggtctaggatctgagtctgagtccgaattgagattcagtgtcgtagtatgatatagattattaattttttttaataaaaaatatctaaaaatagtttttaaaagcctgagctaaataccaataactttttaaaatgaaaaaaaaaaaaaaatttctattcttacttttgaaaacacaattgtaaaaagtaaaaatgtagcgaaacaacctcttagacttataaataaacaagaaaaaaa

SEQ ID NO: 10901 - DNA, 628 bp, Cannabis sativa
aattcataaccggatttaaaggtgcgacaggttctatgagatacattttaataatgagcattgctattaggtaccaatggtgactagcacctttaaaatgtgttgtcttgcgattagctaacgatactccttaaaagctactatattaaactatataggacccgatactaaattagaccaatagcgatattaacatgtaggagggtgcttagtactactggtgtctttatctttatacaaaaattatgtaccaaaacattgaagaaaaacattaattttttaaccaattaaagatgacgaatgatttatgtacaatggtttagtgaatggttgtgtcattgttgtgtgcacagaccacatatcatcggtcataattaaatataaaagacctgttaatagttttttaagaaattgctattatacgtaattaaatataaaagacttattattaagttttttacttaaaaaaaattgtttattagatagtgttaaacttttattaagaatagttaataatttttattttattaaatcatgtcaaacattatatttaattgtacacattttttagcatttctcattagtgaaagtatatagtttatttaggacaggctgtgactatacgttt

SEQ ID NO: 10902 - DNA, 790 bp, Cannabis sativa
gtgtaaaaatgaaaaagccccttacgtttataaatatcttttattacaaatatatattgtaactaactaaaatgcatatatatttttttcaatttttttaccttgcctcgcttctatgtaggttcgccctagtgagattattttgcaaattttaatatttcatattgttattttgaaaaattttgcaggttcgtatgaccaacaataatgatcaacataataatcttcttcacttatctgccttttgtctcacatgttcatatacattagtttgtctggttaaggcaaaagaattccacaaagacaaccaaaaaatagaatttgtctttggagtggatgttaggtctcgcttagagccttctttacccgaaacctacttcggaaattgtgttataggaaagtttgtagttgcctatgcaaaagatttggctggggatgatggtattgttgaggctgcaaaagccattagtgatgccataagaagtttggagatggccaaagagagtattttccatggagtagaaaatttggttcctggttttttaaagtcacgtagtgaagaaggtgaaggtggtcatgatggattatacacaataggttcacctaagtttgagccttacaatactgattttggatggggaagacccaaaaagtcagatgtggttacagttgataaaataggagcaataagtctttctgatactagaaatggagatggaattgaagttgggttggttttgaagaaacgtgatatggaaacttttggttttctatttcatcaaggtcttga

SEQ ID NO: 10903 - DNA, 733 bp, Cannabis sativa
catttttgtacgacaacacaaagtgtgcgactcactcttttatgactaaaaaaagcttcggataaggcaaaattttatcatccctgtacttgaatttgatgtaaaacgacatcgcttaggctatgtttattagcaaggatggaaaataagatggacggagagtttcgaaagagttttttttttttttttttttgaaaggttttcgaaagagtttttagtgtttaaatcttattaattattattttacttgcatgattttttaacttgctaaattcttccaaattagtaaatttaaggtctctaaatgccaacatgaatgatctatatgtaaacgtttgtacagtgttacgtttatattgatagaattttatcacttttcaacttcaatttgatgtaaaatgacatccattaaactaggttttgtagttggagagaaagtagaatgaatggagaatttaaaaatgatagtgaataaaataattattaaaattattattttattatttttaataatttatatatatgtatatatattttaagaagacaaaagccatctcatatggtttttttttatctttttcttggattcttctaattttagaagaatagaatgaaaagagtattactattaagcactaatggtgtctaactagtattattttaaagtgctaacttgtaatttgctagtgatactttataatgttacttaactacactaataatgatattacat

SEQ ID NO: 10904 - DNA, 1174 bp, Cannabis sativa
  modified_base (546)..(554): a, c, t, g, unknown or other
tcaatgttgaaatgatcatcaaaaatactctctttccctttctttaagtactattgcaggataaaaagataagattctaataaaagtgatttaaaaataagaatgtacttattttatattaaaacttgcataatcaaaaatttgagaaaaaattacaaaaatatgttaacacgaaaaaatatttacttttacattttgtattataatttatttatatttgtattatagttattaatctatttatttttggttattttttaattttcgtgatgttgatttttcattgtttttctttctttttgctgagtagtcttttatatcaaatctacaatatttaaattttataaaagaaaataatataagatgatgaatatagggattatttcacaaatacacaaaaataacaaaaaagttacaaaaatatagttttatggaattttaaatatttttacgatttttttgattatatttacagaaaatacagtctttttatgttgtactcttgttcatttgttgataagtttttgttatctgtatgttattttnnnnnnnnnttttgatgttatttagatgttattatcatgttacttttatgaaattttcttattgttttcgtattgtttttatggaaaccgtaaaaatgtaaaaaaaaaaaaagtctttaaacgtaaaaatgtaattttttttaaaaaaaaaaatagtgtcatatataattattccataaatataaagacattatataaatgatataattaattaattattaatttacaaatattaatagtagaaaaaaatgtactgtctttatgtatctcaatctaatttcaaattgaataattttattactattattattatcaatatatataaaagggaggtcttagacattaacatgacactttatcatttctctaaatagtattgtatgccctctccttattaattcttttatttttttttattaaatttataaatattattaattatttaattaagaaaatatttacatatattttttaaaaaaatcatacatattcttttaatatatatatttatatataattacatatttgctaaccagaaaaataaaggtgattgacgatttttatttattattagtgtagtattgatgattactactcgtataatattactagtgtagggcacgtgcgtt

SEQ ID NO: 10905 - DNA, 860 bp, Cannabis sativa
atattagtgaaagtaatatcaaaaaatgtattattgaaatgaatggaacagtatttatacaaggaaaataacaaacattgacttaaaacaaacataacagaaatctgttatataaatcagtccaactaacttaacagtctaaacaaccaagtaaccaactatatttaagaacttaagcttcttgaattttattatgtttttcttaatcttgaaagaatatcggtttgccaaatagaatcataaatttagtctagtggtattgaatttaatttcctgtggttcgacctcacctgtgtgagtttactacttgattatgtgcacttgcgtactgttcacaattttcataacaggatgatagccacagttagtttagacaagttagttagagttagtttgcactgtgttagttatattcttttctaactaattctgttattcttactgctactgtaattgaactgtatttttctataaatgcaatagaagagcctccaatggaggtaatgtttttcccatagttttgagtcttcgtgttcccctgttctcccatgttctctggtttatttaagaatcaagatgaattgataacctcaattaaattttacttttatgtcccatcgttattaatatatagaagtttaccatagtagtacaagagattgccaaaatgatcttattttaatgaaagaaataggagaagtaataaaactttgtatttgagaggcgatgactatgatcataagtatgataatgatttaagacattgtatttgagagtgtaagatgaacagaggtatcagttttggatcaaagaaaactccatttaagtatgagactatgtttgttgccgtacaaagtctt

SEQ ID NO: 10906 - DNA, 713 bp, Cannabis sativa
  modified_base (164)..(169): a, c, t, g, unknown or other
tttttataattatacatgaatattataattattcaacacagtaaaattttaaaaaatttaacatatcgaaagagaattctaacagtgttacatgtgtaatttttgtattttatacgtatatgaaatatactatttgaatactactttttatattgtaaattatnnnnnnttttttaaaattttgtaggatgttcttaaataactataatgtacacgaatatgaaaaaaaaattattagtctaaatttttttttctgaatgccgaaacagattgagagtgcatctgtgcatttctttatagggagtgcattgtagaagtatccaataatttatggtttttgtacaaaatatgtattaaaataattttacaatacaatctctaaaagaggtgtaccgatacaccttagttacaacatttgggataatttttcagtctaatttttcttttatagtcatctatattgtagttatttaaaaaaatttgtaaaattttgaaaaatttaaaaaaaatttacacgccaaaactaagattcaaaaaatttatttctcatgcgaatagcagattgtttgaaccatattttcagcatattatgtattttttcgaatttgtcaaaattcaaaagatattttaaataattataatatagacaagtatgaaaaaattagattaaaaagatctcctaaatgcaaatagtgcatggtgcacccttaaaa

SEQ ID NO: 10907 - DNA, 697 bp, Cannabis sativa
caaatgtgttggatttggagtttagaaactttctggagttttttttttaatcttaaatgatccagttaattttataagttttaaattatgattgaaaaattgaaaagcatgttaaagttacctgaaaataattttaaaaaatggcatttctaaaaaaataagcccatcaagctcaaaaataagaattataaatacacaaaaataataaaaaagtttataaaaatacagttgtacggagttttaaatattttaagatttttatgattttatttatagaacatatgttagtatatttttgttaaattattgttaattttttattatttgtatgttattttatatagtttacatgttattttttaaatacctttatgtaattttcttgttattttcgtactgtttttatagaatattgtaaaaatgtaaaaaaaaaaatatttaaacttaaaaatataaaaaatttattaaaaatagtagtttatgtaagtatttccaaaattatcacaatccaattcggcccatctaaacctactcacctgatccaaaacccgtcttaataagaaatctgaaagttaggttttttttttgttgagtgtagcataatgatattttacaatcaattaatagcttaaaggttttgggtttgaactataactttctttttatccatccctcttagtggcttatttgaaagcta

SEQ ID NO: 10908 - DNA, 1117 bp, Cannabis sativa
agagagagagagagagtattaatattgaaaggaagaagaagacagcaatgggtggtctgttgtggtctggcttttggtctaagtctaaggtttttggttggaatatattaatcttaattaattgtcttaatcttaataatattattattattaaggttgtatttttttaatacaaatcaatgtcgtttatttcaataccaaatatatttatttatttataaaaatataatgataatatataataataatttaggaattttaagcattgatgcctcttgaattttaacttattttgcaattcagtccctgttttttcttattatagcaatttaggtagcatttggttaagagaaatggaaacataagaataagaatgagaatagtaatagaatagaatgaaataaaataaaatttaaaatacataaagaaaattaataaaaaaaacattaaattttttctcatgttatgttggtctttaaaatataaccaaataaatgaatgtaataaaaattattttattttcattctattttataatctccaaccaaacgccaccttagttttaggaagacactataaagagtagcaattaatggtgtttggtttagtgtaatgcaatagtaagtaatctaattgaattataatgaaaatatgaattgattataatgtttagtttggtataataatataatgaaataaattttgtattgactaaaataattttattgtttttattttataattataaaatattcaaaaaaaagtaatagacctttcatttttttactatatttttattaaatactatttttcctttacaaaaaataaaaggaaaaaataaacaacataatggacatattcattaatattataattactagtagaatatttcacatatttttttttttagtttttttttattatttaatataagatgcataaaaacatttggatttgaaagtatataaaattatttataaaataaatagaatttttattgaaccttaacctaaaaaaataattgatgtaaaaacaataaaaaatcaccacgtaagctaaaagacactattaatctctaatattacctattataggagtcttgtcttctgacatggtg

SEQ ID NO: 10909 - DNA, 518 bp, Cannabis sativa
cttttgtgcagccaaagagtgaacaacgttgctgacatcagtgatcttgagttttgtaataagcatgacatcgataatactggccttgtatgtaagtcccccatatagtacactttgaaactatacaaacttggtttgaacccaactgaacttaaattttacaataacactcatgtttattatgtttacaagttaagaaacaattgaaacctcgatccttaagttctattgttaaatttcatgaatgttgtgtttccttgtcaagctcagtgaagtgtatattgtgatgttcaggcattgtatgttaatagtttatgatcaaatgtagttggaacatgcattagagataattgtcttccttaattatgtaattacatgaatttagacttttagtgctttacttaactactgttgttgttacgaaattacttgtgctgagttagttttaactgatcgtaatcttaataaggtcctctgtttgtatgaacctataacttgaaatgttctacaggtcagtg

SEQ ID NO: 10910 - DNA, 512 bp, Cannabis sativa
cccgtcaaactcatttgaaaaagaaagacatgtgagattagatatatttcaaacaataaaaaaatacatataattcaatcagaagtaaatgaacttatagcaacaacttggctcttaatactatctgccacaaagactggatccccactcaccattgtggcaaacttatcagattatagtctactacatgtaacagcatttaagtccaataagtatgatgtaaacaaagttaggtctgagcctactctaggccgaagcctcttagaaacctattggcaattaaagatagcaagaagtggttcacttaacttttcagcgtcaacaaattcactgcctcacctagtcgagatcaaggtctcctttttcctcatctcttcatattcggagttaattcttttatggaaaagtttgtcgacaatatccaatttagcatgaacctcctctggtagtgaagtaggatggattggaaaggaaatattacaaggaagaaggagaggtaaacttgtcttatc

SEQ ID NO: 10911 - DNA, 2097 bp, Cannabis sativa
agaacaaaaaactggagtaaaccagcccagaacaaagcaaagtcccagtggaacaaacagaacaaagcaaaaacaaaggtttaaactaaacaagctaggaacgaagactaagctaagaaactaaaataaactaaaataaacaaacagccatctgctcaaggaggaagcagggaactgtcaaaattggacagatcaatactcccaaactggtttgtatcgagtgcccacttggctaccgagtgcgccacaccattgttcgtccgagggatccaagaggcctcccagagtcccaggaggtttgctgaatccaggaacaagtagactaggtcctgaatattatgatgtaacatggttgaacgatctcgaagtttagtgcaacaaactgctttgacagcttcggccgaatcactgaggaagattatattgttgatggccatagctttggccgattccgcaccccaggataacgcagcaacttcccctgccaatgcatcagagtaggagaatcgtttagtgcaggcatggaatactctaccttggtcatttctgaaaatagcagccccaacagagaagttgtctccaattgcaatatctgtgttgcagaaggtccacccaggagggggctgcagcaagtattgattctgagaactctcttggttgcagagattgagcatttccaaaagccttctattagtgtggaagaggacaacattcaacggagtatctttcgcattgtgaattctgttgttacgttcagtccatattttctcaaaaatgattgctgcaccttcgagaaaggcattgaagttgagacctcttggccggttggcatccagcttgaaccatgtcaaccaagcatcccaatgtaagatgcctggccgatcagttctcaaattccatatacaactaaaccacaaggcccttgcatagtggcatttccagaagaggtgaaatgaatcttctacgtccgaagagcacagaggacattcggtgtccctaatggagaacattgagttgagtttactccgagtgaggagattgttagagagaatcctccaccataacatcttaagtctactatggatgttggccccccaaataattctccacttagcatcattggtaacgttggcattcacgtttttaactactctataagcagatttgatagagaatttaccattatgctctgggagccaaatccacgagtcaggggacgggatgttaggaagggtaatgtttaggattcttttggcgtcatcatgattaaaccaccttcggaccaaatcttcgttccactggttgtgtcctatgaagttttccactaagctgataccaaacgtggcatccaaacggggttggggctgtagaatgccatttggaacccacggatggaaccaaattgaagtggtcttaccatcaccgattttacgacacatccccttagataagaggtttctcgtattcaagattgctttccatagagtagaatccgtagagctagcttgaatgtccatgaaatcacggttatgaatgtatttgtcattgaccaccttactccacagactggtattgtcagtaagagctttccaagcccatttcataaggaaggcagtgttaatggattccgttgagcgaaagcctaatccaccacagaccttagggcggcatagtacatcccaagcaatcgtatgcatcgatctctttcctggcatatctccccaccagaaatcacggagcgatttatcaattttcctggcattgtgtaaaggaaggacatccgaagcaacaacatagttggaaattgatgaaccaaccgatttaacgagacaggtcttcccagcagaagataatagtcttgttttccaaccttggaccctcttcagcactttgtcgataatgaactctgtgtctttggttcgtttggttgacttgaaaagtgggatccccaagtacgaagcatcaggcgccatttttttcatcgaaaggaattgggagatagcatgcgtcctaggccgtggaactcccctagtgaatgtaacggttgatttcatgaggtttattgattggcccgaccagttgcaatactcgttgaga

SEQ ID NO: 10912 - DNA, 809 bp, Cannabis sativa
tccttaatttatgtttataatcataaattagtagtgcacacacttagggtagatagtgaactagtttgatgatttctctattattttttcattatgtattaatctcatattatttttcaatgagagttttgttcattgctaaaaaaattacaataatataaaaaaaaaaaaatgcattaaaagcaaatgaaaaaaacaatctaaagtaaaatgaaataaaaagttattaaccaagggtttattcaaaataacaaaatgtatattaattttgaggatttttattttattttatattacataattaaaatttgaaaaaccataattttttttttatggattttcattaaattattaatttttgaggcccactttctcttaaatattcaattaattaacacaaccgatctcaacaacacagaaatatcattaatgttatatttatttatttatttaagaaaacgtcatattgtgatgtattacacctaacgtcatattttattttattttacttatctcgacctataacattaattgaataataaagtggcttctccggcttatgcctgatgtgttgagagactgcggatgaaacacttgttcctctattgtaattttggttactatttttggaggtcctccccttgagggtattcccgatccctgattctagtggtcgaatttgagattgggttaaatttctttggaacttgaagtcaaattgggtgaactttgacaagctattcctttatgcttcaatcgtcgttgacacaatatggaaaactcgtaatgacaaagtacataacttttac

SEQ ID NO: 10913 - DNA, 750 bp, Cannabis sativa
caattcaaaacataattatcaatggtccagacgaaaactttcatttgcaaagccttaataattatcttggagtcgctttcaataattacaaaattgtgtttcctcttcactgttgtctcatcagatggcaagctacaacttcaccactaagaacattagagaaaacgagcctgtcggaaacaacccacaaaacagttcttaagttatcctcagccagagccacaacactctacgtatttttataattattttccaaattttgtatttttagtatattttccaaaatcttaaagcatttttttttttaaaaaaaaatctaaaattaaaatatcaagtattatattagaaatgatcaaaatagagtttaaattgtgaatttggttgtagattagaagttgtgttggcctaattaatcattgtggagacaaagggagttgttgtaaatatgggtgttgcatattgttgccatttgaattggttgtgattttgtagtatgcattttcctaagtgccatacatgaaatatagaggaagttgcattgtatatccactttactttatttgttttaatttttaccttcatttccatattctttgagatatacccacttttatagatgatgtccctattataccccttacataaatgtaaatcatgtgctacacttaagtggagagtaaagattttaatgaaataaaacatgagggtatttttgattaaaggatttaaaaaagaggtattcctcaactt

SEQ ID NO: 10914 - DNA, 1003 bp, Cannabis sativa
  modified_base (175)..(176): a, c, t, g, unknown or other
tttttctttgtttggattggaattgaaagtatcatatttgttgttccttttatattatattgcctttttttaggtttgcggtggtaggggtggtcgtggtggtgtcgtggtagtggtgtcgtggattgtggtggtgtactttttgatctctgaaaaaatttgagattgttgtaannttgagatgttggatttatttatgcaaaaatgaaaaatctgtgtgaaactaaaaaaattcgtgtggcatcgatctagttataattaccagatttttttttttatttttttcaaaaaaaatttttgcttcagtttatgaccaaagcaaaaaaacaattagtttcggtgcactaattttttgcttcagctatgaaccgaagcaaaacttttttttttttgcttcgtttcataaccgaagtaaataattaattagcgttggttcataactgaagcaaaaaagatcactatttgcgtctacggttataacgtggggtacaccaactgagcaaattctttatatgtcacttaaaaactgaagcaaaaagtcttttttgtagtagtgggaacatcaccaattatgttctgtgaaggttgtttcgtgttggtagggccttctgtttatggcactgttggtggatcggtcctgggcagcaagggctgatcattaagattcatcgagttagaagattcaacatgattattggtattggttgaatttgttgggtttgtaaggtttgcaagagtgacggtgttagtcggattagtgagaccttccgtggtgggagaaacttgaacatcgggatcatctgtcatatgatcttaaggaagacccaaggaagtggaggtttttagttctcctatttacaactatagttattaatcagaatgacgaataatgctctcaatgaaagaaccaaaatgttgaccttgagtttggaccaactaacaatgaagccttatttactattgataatcaccacgtgtaaactgtaataacaaacaataaagt

SEQ ID NO: 10915 - DNA, 572 bp, Cannabis sativa
ataaaattaaatcaactttcaacaattccttttctgacaaagttcattttttttttttttttgggtaaagcatctagaagaacatattacaaaagtaggcttaatttgttttgaaaaaaaataataatatatatagaaacatcttataaaaaggtttataaaaccattgattatacgtggcatgtgggggcaaatgacataaataagaatatgactaatcatctttttatataaattgaagtgagttaattgggttttaaaagcactttattatttatactttcttcttttcttaattattttcctttttcatactacttttattttttatttgttacaacaacatttgatatacatagcttcaattaatcttgtcgaaactacttttgaaaagctcatgattttcatccatgtacaattgctaaagctcaataatacattctatatataattaatataagcttgttatatattatggggacaaatatccaataaatccaggataaaagatcacttttcccaaacgcctatatcttgttcaattttagatggagtctcttttcaaaacttta

SEQ ID NO: 10916 - DNA, 668 bp, Cannabis sativa
ttactattggcttaaaattataagaagctaggaattgtatcacgatcaaaagcagaatatcataaccttaccaatccaaaagctgaattggtcatagagatagagcttctttctaagattggaatccaacaactacatcctccaactatctagtgtgataaccacagtacaatctcctcatgtctcccaatctagaacttcatttaagggccaagcatatgaattgaatttatattaattttatttcagagagattgttgaacaagcagctattagtcaaacacagtccaccacatgaccaaaaactacaaatatactaactaaagcttttttatacttgtgaagcaacttagtttagcttccttaattagtcacactcggagtgtcggtattttgttagttgattaagtatctgtttatttgttgttcatttgtacacatgtagctattagattcagtgacatgatcctgttgaattggttctgtataaagagcaattgttatgattattcaatacacgatctcttattcaaaatactagttacaaattctccttacatatatatatggttcagtttgtacatttgagttatcgtttaacaaggtcaataaaatggcaaaatggactttcattatgtacaatactatatttaagagcattatatatg

SEQ ID NO: 10917 - DNA, 788 bp, Cannabis sativa
cctctaaatatatataatgtatagagtacgtagatacatgatatatactgagaatgaataggtctattatccagtgtatataaaagtgttatgactcattggtataagtgattgaaatttaaaggcttgcaatgaaatatacattattattattattgttattactattaatttgatatatcataaaaagtacatatcgagaaagatatgggttgggcaactccaaatcttaagatatgggtctaccctccactcgatcagactatgttataatgtgataagaataagaaaaataaaaaatagtaatgtataaaacaattaatataatataatatatacaaaaatacaatttgtcacgtcaaataattgaacgaccttagcttatggagctccaatattaatattacttataacttcattattggccgacgtaccaatcgaatatatacagacacaaaattaattgaatgtacgtacctatgttttttcttttctcttttcataattttgatacaccatttatctattttagcatttaatagaattagtctaatatgtttttttaattgtgtacgttttaattagggttacatgaaaattttataaaaaatttcaaataattttatcttatttatttatttttgtggctaaatttgtcaaactatatttttgtttacaaattttattttctattcaacaacctcaattatgtgctatatactaaattgctcacatctatactcatatacgcatgacacatttatattagtcaatgtaatttttttttt

SEQ ID NO: 10918 - DNA, 1029 bp, Cannabis sativa
tccataggggtttttggtttacctagttgaaataagatgtatgagggtggttgaattaccttttttgatcattgtgggtttgaagggttcaacaagctgcatttggaagaaatggctatgggattgggataccagttcccatttggatttcttttaagtctaaagggaaacacctgaatatgggctttaaggtggttgaacaaaaggaaactgatatgatcttggatgatttgaggcctaaaagctattgggaggccaatatatatttgatactgtcaaattcgacatttgtagtggattggtatttggctgaggatgttgtaaggcataatctagaaccaccatcatcaaatttggagaagtgcactttggaggagctgccataagattgtggatttgttgtagatgtagttgtcaatccacatggtcatcatgacctcaatgacatgttctacaacaaatttcgcaagtggggagatttagtagcacaatgggtggatgaagaggttgattctcgtgagtgcatcccctaaccgagaaatactattcttgagacaataacaatattatcatcatcatctgagtctgagtctgagtctgaggaagatgatggagatggagatgatgatgaagatgatggagatgatggtggagatgatgatggagttgatggagatgagggacatgatttagatgagggtcccgatgaagactttgaggatatgatggcctttgctgaggagcatttagctcatttggatgatgatggaggcatgccaagattcccatacaacccacccctcatgcactacaaagtcctcctctaccagatgttgcaccgactgccaggttataattatattttttttatgcatgacatagattttaatgcattaaataagttgatattattgataaaaaatgaataagttgatactacattttacaggaattaagtggattaactggtgattcagaggttgtgattattggtgtaaaagaaggtttagaggagaccccaagaagtaa

SEQ ID NO: 10919 - DNA, 530 bp, Cannabis sativa
aaatctcataattagacgaccaaacaacgataacaataaagggaaacctaacaaaaaaggcatataaagccaacattacaaaatataaggtgttatatatataatcaaaatataaggtattattacaactaaaaaggagaactccaaaaaaaaatatatacccaacttttaattgagaaaacctcaaacaaactagagaaaatgatcatttagcaaaaaacaaaaatattattaatcaaaataaatgatctagacataaacacatcactaaataagaaccccttagtacatgagactaaacaaacaacagagggtgcactgtccttttgatcaaactcgcatgcatccaagtccagtcttgggcataagcgtggtttgggttgggtagaatttgataaaccgatcttattaggttggtccattaaaatagtctcaacccggctaacccaacccatgctcagtccagacttaaagggataaaaaagctattcaagacttattttcgcaagtcatcaacaactttctaaaaa

SEQ ID NO: 10920 - DNA, 616 bp, Cannabis sativa
ggtgttacagagtaaaaatatgcaaggtacttttgtcatttttgcaatgaggtgtactcccaggttgttggaacttttccaatccagaagcaatcattacagttgtcctttattttcgttagaatagaatctttcgatttattctctatgtaatgattgtaacaatttactccacgtgtaaggttgagattgtatcatcctcatctttgtaatctctctaatttctataaatggaattgccctgcatcagtctcattcgagctgatcattttactgctgcattctctttgaaatttaacttttctcttatcccacatgagaaggtggcttttcattaagctgtttgacatacactcacgctcccaaaacatagattcattgtttgccaatcgttgaacggtaatttacttactcgtgatttacttggctgcatgttggcttgcaatcggattctcttaattgtccagtttgtacatgagtctcatgctgatttattatttgaattaatgcaccttctccaaaatgatcattcaggaggttcttggttggcttggtcatttcgattggcctatggtgttttcgatttggaaggattggtgtaccgaaggactcatgg

SEQ ID NO: 10921 - DNA, 725 bp, Cannabis sativa
tctatcggacctacaagcattctatcaattgtaatcacaatcacacacacaatcggtccaccatcgtcctgtatcggacctacaaacaatctatcaaatttcaaaaagtacgaggaagtatcgagcctacatcggccctttatcttcaatctccattccatgcttgggctttgggtctacatcggacccgatctaaaaaaaattaaatttcttatttttttatgaagtccatacatgggcaatttggaataagttagggagaatttaaatttggaggtctttcctccctatttaggagagaggatcatcttatttggtgcatcgaaaatagaggtatgtttacaatgagaagtgtggctattcgccataaagacttgagacaatctatctcctcttcaagtctatcaaaatggtggcaagctttatggtccttaaaacatgcctcccgaggttcaaattttcttatggaaagcttcttcgaataagatcccgccgtgccggtggtcaatcttgcaagccacggaattcacaatggcaagacttgtccaatttgtgaaattaagaatgaaacaattttttgttaaatagttatttagagttattttagtatgttaattgtttatataagactttcttattagttgtattctttcacattttaactttgtaattgaataaaactctaatttctctcatatcttttctttatttattattcttctctt

SEQ ID NO: 10922 - DNA, 1214 bp, Cannabis sativa
acttatagtacacactaataatataattaattgtattaggttgttctttcggactgaacttcatgtgctaatatccaaaggtaaacatccaactaccatatcatttgcaaacaaaaataaactaagagaaaaaaaatgtaagaaagaaatgattctcagacacagtatgtatggtatatatataataataataataattcgatacattagttgttatatataattaatgtaattaatgaaacgtttaatattttagtggtgggtaaaggttatgaaagttatgatcatgaaagcgacggctgctgatgaaatgtaccctgtgtgtttaattttgtccattgatttgccccattaccaaccaataatgcttaataaaacaatgcagatctattaaaatggcaaaatgatacttctttaagttggttgttgacatttatataacacgttattgaatcatttaattttatacaaagtcctaacttttttcagctagttaccaattcaaaatattcaatattataataaatcatataaaaattacttaattaacaaaaaaaaattctcaaagattagcaaatatactaataggtaccgccataattctaccaatagtaataaaacattttagaagatatttagatattactggtcccttttagtatttttcaaagaaaaaactctccttttggattatttaccttttactaaatcaggtacaagcacacgaactatcattttcccaagtatagtttttcctacaaatatacatgacatgacaatccaaattcatttaaaaaaaccaaaatatttatatattttttgggcaataaaaaaaatacttatatttaccatcgggaacactgtgtgaataagaaattgcacaaaaaaaaaaaatacataataaaacacagaggattgaagcgaagcgtgcaactgacaaattaggggaaaaatatatagaatccatccatagaaaaaaaatgactgcatagatttcaactaagtaataaattacctgtatatataattccaacattcaagaatagtagaactttcatatctttatataatataattcttctgtaactatttcctcactattcccatgctcatatatataaatatatatatatatatataaatataaaacagaacgaaaatgcataaatacttataattaataagatacaaattataaaagaaaagaaaaaaaa

SEQ ID NO: 10923 - DNA, 536 bp, Cannabis sativa
acacacatatagtataataatatatatcatttcagtatagtagtatagtgtttgggtgttgggaaaatagaaaagaaaatatacatataatagctaggttaatctagggctatagatcagagagaggagttgccatgggaaggcctccttgttgtgataaggttggcattaagaaaggtccatggacccctgaagaagacatcattcttgtctcttacatccaagaacatggtcctggaaattggagatcagttcccaccaacacaggttaattaattataattaatattaatattaattatttatgtgtttgtttgtattatatatgaatatgatcataattttattacttaattatttagggtttttgtttttatggttaaataggtttgatgagatgtagtaagagttgtagacttagatggacaaattatctgagaccaggaatcaagagagggaatttcactcctcatgaagaaggaatgattattcatttgcaagctttattgggtaacaagtaataaattcttcgaact

SEQ ID NO: 10924 - DNA, 804 bp, Cannabis sativa
tttgacacaccatgggccattatccaatacacagtttctatcttcttcactctcgaaactaaattaaaaatactgtgagcttgaggtatcataatagatctcagatattgctacagtgcgcttccaatctttagtaacaagttctcatagcacttgcactttcctccacaactctcgaggccaccacataaccaaaagtgcaacatctagttaatgcttgaacagtagacacacaaggggataaagagaatgttgcctcattaaaagatagacatctccctttaataacaacattaactacctccataactaactcacaactccacacgaggaacaagccaaacacgagcttcacaagcaccacaataagaaaagacaaaggaaaggaaaaggagaaatcaaccacaaaggtgagaggaagttgaacacaaaggaagatgggcagggcaacaaaaaggggtaaagaacgtaaccgagaacagaatcacacagacagctaaagaaacaaagacaaaggacgaaaccaaggcaaaaaaaacaaactaataagtcaaacaaggagaacaccagtaaaaggaggatggctaaaaaaactaacaaggaaaaagaggagaagaagctagactagaaggtaaaaggaaggcacgcagataagaaagtggtagatgaccatctctctcctcaaacttctttgagccaataaatcacttccctaataataagaattatgatattgttgataccaacccggtctaaaataacaaaaatatcacttcggatattaaagcccaaaaaaatacaatt

SEQ ID NO: 10925 - DNA, 518 bp, Cannabis sativa
tcggctcactaaagatcaggtgattctttattaattactctaatatcacccccaaacccataatgaggttgaaagaagaatagagagttgccaactagaaagtgaaaagttttaaataggatgtgacttggtaaagaaggcaatgaaaaaggaacgattggtagagtaatagtgtcatgtttgaacaggtgaagagtaaaatgacaacctagtttcaatgtctgaggttcgagtccctcctggatgcgtacatagcaattgttatagtttcttagtcctcaaatattgtagggttaggcggggatcttagtttcaatgaaaaaaaacagacaacctatctccttagaccataataattctccaaaaccaacatcaaatgttcaaagtaaaagacaatagataatgaaaagggaggctaggattttattgcaaaattaggggatagataccgagagatgcaagatacaagtgaaaccttaagggcaggatagagcaaaagactgaagtatattacaata

SEQ ID NO: 10926 - DNA, 729 bp, Cannabis sativa
gatgttgaaaatgtgaaacacatattttttaattgccaacattgacagattattgagatggatctctagatctcgtctatcctcttttcataagcaagtcttttttatggctcttgcagcaagtgtctaccatgtttggaaaagcaagaacttaggtttttggatatgcaacaggtttcttcaatttcatcttctattagttggatgaaagaaattaaagagagagtgttgtttttgattttgccaaagaaactaatttggctgtgttttcagtatttaatttttagaattgtagtttcaaaagtgagaacaaaaaatagtttttttatcatattaaaaatttaatggtgcttggctcagattttttaaaattatttttagattttttttactaaaaaaaaaatcaatattcttataacataccatgacatgaactgagccaacacccaaacctagactcgaactcggaccccggcctgaacccagatctaggcccgaacttgaacctgatctggatcacgctggggttcggggtcgaggtccagtgttcagggttcgggtccgggtccggggttcggttcaagtctgaatataggtttagggtcaggattagggatgcacatttccccatggggatggggccccgcgagcatccgcccctaatggggcggggatttcccgtctaaatggggaaggagacggggacagggattacttttgttcctgcat

SEQ ID NO: 10927 - DNA, 679 bp, Cannabis sativa
ttatgccaagtcatataaatatgtgattaggtatcttaagttgtgcaactactaaaaaaaataagttatctttagtgacaatttctagtcactatattttctgtgactaaatttgacttttagtcacaataaaaagttacttgtaactaaaacataaaatttagatacaagttgtcactaatttggttttagtcacaacaagtattgtgtccaaaaatatatttaattataacaaattatgatttttgtaactaatatttttagtcacatactttttaatcacaacataagaattattatttataattagccgcaattttttcattattaatcaaaagttttgttacgactaaaagtaaattttttttgtagtcaacatactgatgtggcgtatttcacagtttccaatattattttatttaatcaaaatgtgtgtaactcgatagtgaatgacaacaataatagtatgtcatctcttatggtacttgacactctaaggttaggtatcccttccatataattttttaattaaaaaatttgagattcgagtttctttcaaatacctatacaacaattaatataattttttagtcttcgaatattgtaaaaggacggaacccaaattaattttacatttcgatcggtgacaaaattgattagattgttcgaacaattgttg

SEQ ID NO: 10928 - DNA, 745 bp, Cannabis sativa
actaaacatgatgaatttttttctcatataagggagaattgtaaaaaactttccttatgacattctcatacacgtactccattattatacacatgatcaactctcatgcacttactctactagtacttgttccacaataagcctcaaaatactacaaatgaatacttcacattttccaagataattaatatcttgcatattaaattagtttgtgatatatgttagactttgggattatattggactatttggtgtgtgatactaatgtggtagtttcttagttattttaatatctctaacactcatgtatttagatgctaatgtggtataattttttattgttttgtaatttagtttttgaattaatgtattgtagaattgatgttatgttatttttttgttgttacgtaatttatcttaggttggtgtaaaatgagatttatgtcttgtcatttttgagttgtttgttggttgtttcacattagaatgatataatgtgaggttgatgttgtgttatttttgcgttgttattatggtatatattttaaattttgattttgaaattgttaaaagaaaaatgaatatatatttaagttttatagtatatagataatatatagttatattcttatggtactccttttccttatttgttttaaaaaatattaatgtttagtgactttttagcttatttacatgtaaaaatataaatatatttgtattgttgtatgtgttaatagtaata

SEQ ID NO: 10929 - DNA, 536 bp, Cannabis sativa
ttttatcaattgtataggatttctagttttaatgagtttattagtagttgaaacatttcaaattttgttgctgggatgaagtcctaaaaatttcaaatggtttcaaggtgaaggttaaaaaatagtaaaattaatataactagcaacggaattcaaaacaccaacaaacaagaacaacaaactccaaattaacttgatatgatttaaataaaaatggaatgacaaatagaaacagggtttcaatcaaggaaacattgagattcaagaaaatctctccatgaaatatcattttgccaacaaaacccttatttaattatcaaattaaattatttctacaaattactgaacacacgacatgttccaattaaaacattaattaaaggacacacgggtgtaccctttctcacagatggagtaatcacatgtatatgtatccacattaaacggccccacaaacttcacttgcaaccaataatataacaacaaaatagacctattactgtatccgttattagggtgtttatgctagaattttc

SEQ ID NO: 10930 - DNA, 679 bp, Cannabis sativa
tgtgtcaaaataagaaagaaggacaatggcttgaacataatattttgttgataagattatattgtaatactctgttaaattttttttttttttgaataaaagtaaacttttatatatatttcatctattacaatagcacgcaattcaggaggtaattcatgctcttgaacaacatgactagaggaaaaataagagccacgcgctaaacagtgggtagccttatttgtagatcgttcaacaaaatgaataacgacattactcaaagataataaaataacagtgcaatcatcaaccaagagtccaaactcagaaaacatatgtaaattactttggatagcctgaacataaaccaaactatcaatctctaaaatcacattagaccataaatgtcgctgaatctaactcagagcctccttaatccctattatttttgtaatttctagagagacgatacccatcctacttgttgaaaaggcctccaaaatctgttcatcatgagttcttgccaaacattcgaacccaaaactaccatcatcattaaataaactctgtcaacatttactttgatctgattaaaagtcggtgtagtcaaatgcataatatgtttcgaaccagcaaaaataaatgacaaagaggatttcgtctgtgactgtgtaaaaagaaactaatcaagaacgtg

SEQ ID NO: 10931 - DNA, 1033 bp, Cannabis sativa
tacattgtatattatttccaaccttcttaacaagagccgcgagcaactggtttgataaatttctcacttattccataacatccttggaacagttgtcgagggacttcaaaaaacagtttcaggttgcaagagaccatcgactagaggcgtcatctttgaccaacataaaacaacaaccagggaaatctcttaaagcgtacttggatttgattgcttcatgtcttcatggtacaaaatactgaaagataatgagttggattcaagttattaaagtttgaacttccatcttggagctctcgtagtcaacctgggcgcaggactagtgtcccctcccaggtcgactactatgactcgggtctactcaacttcgtgatgtcatcctttttgctacatgtgaaacattaatgtccacaccaccaatgattttttttggcttaataaagttatttagatccactcggtcctaccaaggtttttaaaataggtaagggattgagaaaataaatcaaatagcaattaatttacttcttgaagtcaaaccatgatcaattttttttggagccatttaaacatatagttgggattgacccaaaatatcatccatctccacttgaatatagatccatcttatccactgaggcaacaaaaaaggcaccttacttaaaaacacaaacctatcgttcaaatttaatttaaattttacattatcattctcatcaatctaaacctcataccaagtggtgcataacacttttttatgtgttaatatctattggtccaactaagtgtcagttcatatataatttaacataataacttttaaaaaatattaccggtcaatcgcaagataaaatatataaaggtgttaggcatgcctagtaacaatactcaaaaaaaaaaaagaattgaggggacaaaacagtaaatacgtgtgaagcgtttcgtacacgcgtcactagaaaagcgtgagtagagaaaattgccctataaatggcgggaggcctcccttcactcgagatttctctttctctct

SEQ ID NO: 10932 - DNA, 641 bp, Cannabis sativa
tatatatatatttttgtaaggataaaatatttacattcgtgactaaaaaactatctaaattactttctgtagtgttaatgagaccactcaaaagatcaaaaccctaagcatggttttctttgcaagtaatagacttaattagtagtttttttaaacaaaaattggcttgctttaattaccgtataataatttacagtattaattatatatatatgaaaaaatgctaaataaacagattctatattgcactctattaattaataaggtaatttgattatgtgtgaggctttttgacatagcacgaataaagaacgatacaaattcgagtacggtacgaaattattggacttgtagaccgtgtcgagtgtaacgccctgactttcagagacgccacgtgtgtacttttacaaatttaatactaactaatctattagtttagaaaaaaatatattgtagtttaaataaattttttttgattaaattagaataaaaccttcatacaagttctccctttcgatctaacttcttctcttcttcttcttcttcgtcaggtatgctcgcagaccaccatggcagtggttgagatattgagtgtcaacaacgacggctagccaactatagaactcacttttttttttttt

SEQ ID NO: 10933 - DNA, 651 bp, Cannabis sativa
cgagcctagagcccgataaaaacccataataattgggccaaagttgtcccgttgagtcgtgggcccaaccaggcccgcaaaaaggccaaaattaccattcctaactcttatatattctttgtagtggaaaaattgaataagaaccaaataataattaatatcaccaattattttaatttataatcgtagattaaaatttttggcaactaaataaatgaaaataaattatgaaacaaatcttaattttctttgaaggcttttgacacatttatttcctctaatactttactcctatataatatttgtagaggcaagattgaataggaatcaaatattaatatgaccaatatttttaatctataattagaaattaaatttttttgaaattaaatatataggaaaaaaattaatattagagagcatagaaaatatgagacaggaattctaatgtggcccaagtgttaaagaattttagtttactaatcaatattattgggggtgttgtatgagtacaaccatgatatttctctctctattgtagcggtgtttttgcttaagaactaaaaaagagggacccttttacaatggagagttgccctatttataagcaaaggtcacctatcgtaaaagaatcctttttttttttttttt

SEQ ID NO: 10934 - DNA, 827 bp, Cannabis sativa
aaaaataaactaaaataagaagaagaagtttgggtaaggtcttaaactcataattctcagttttttatttttggtttaaaaaaaggggaagaacatcaaaactgtcacaaacgtgactaccgaaatcaaatcaatttttattatttttttaaaacaaaaaaaaaagtaaaaaaaataccgaagcgtgacaaatggcaatttacacactttttataatgtacacagtatacaatatataaatgactatttaatggttacattacaaatataagtatgatgattacatttttttatgacctgctataataggttactaataggtaaaacttatatttttaaattcaaaataattataattaattatattcttaaaaaattaattttttaattaaactatttaataagatatttttaacaactaatgtttataaacatttaatcttttttatttataaaaaaattaataaaattaaattatagataatttattgattatttttatttaatttttaaagtaatcactatcgtttaataatgatcaacatttaaaataaatgtaacaatgtaaccataagaacctatataccttcaacattattatggtaaataatacctaaaagaaataaattaaacaaaaaacgtgtaaatttcccttttatttagggaaatttttattactatacgtaatatacataccaataacaaaaataacattgattactgtaataatcttttagtaacgtgacacgtcatcaattttaccgtaataccaaaaaaatcacatactagaatccaaaaaaaaaacttgccatcttgctccataaaag

SEQ ID NO: 10935 - DNA, 750 bp, Cannabis sativa
ctatcgattacatgtaacttggaatctgattttgtaattgctgatctttgaagatatgatagtgtaatcgagccaagaattctgaggcgagctcgaaagaggtagtacctaacaacacttttggggaacctctataaattcaatgttttgtcttcttttttactctgcttatacttactgtttgtttggtgtggttacaaatcaattttgatctgaaggttttggcttgatctcagggttgaagcagacttcgagtttcttgagaagaaactcaaagctctgctagggtttcctctctttgttttgtgttgtgtggttggggttctcgagtgttcttgggaggattttgagtgtgatcaatacaacgatgtattgataagagtcaaagagtgttttgactcgaaataaaaatgtcaaaattaccttgatacctgattgtgttgtctgttgggtgtagggataggcttgaaatttcctacagaagttaatatatggtgtaatgaaaaagtttgaggtaaaataaataaagtaaaattttggtaatgtattttaaaaaatagagtagaaaaattattgagagttcaaagaagattcttatttcaaacaatagaatatttaataagtaaatatgtgtatttggcttatttcaacaagatcaaatgtatggctatggaattgcagcacgaaatgcctcgggcaaactcatggaagcaaaatcagtctacaggggcagtatttatgttgtgagat

SEQ ID NO: 10936 - DNA, 548 bp, Cannabis sativa
tgagagcactacttttactctcataagtgagggcattttcacaacctttgatttttaatctcacggtaataacatttttccttacgatagagtatcacatatacgattaaattatttaaaaaaaattattacatttaatttttaaatccacgtatctacccattaattaatcatttgagaatatagttattttctttttcaatttcaccctctcacctctcatgataatagaaaagaatcttcttcatcaattccataagtattttatttttcatcttcctcctgtttctattagccacaagcattattcatcatgtcttttaattttaaattgttatgtacaatgctgttgtagaaaacttcctcaccatatgcatattatgttttgattctgatagtgaaattttttaattatatgaatacttaaatgttttatgggagaaaaaaaatgaaataatttcaaaggctagaaaatttagactgaaatacaagaatataccagagagaaaatgcaagggatatttcaatgttaattttttttttttttt

SEQ ID NO: 10937 - DNA, 986 bp, Cannabis sativa
aaaattttagggatatatattatttatttttaggttttaaatttatatataatgtgtatttatatatagatctgtttatataattaagtttgggtatatatataaatgtgtgtatatagattattttaggtgtacatatttatttattatacatatctacaatatatgatttttaatttgtgtatatatgtatttttgatttatgtatatatattctatctatatatttttttttatatgtgtaatatattttctgtgaataacaacaaaattagttctccgactcttggcgtgcgtggttcccatctctctcccatggcgaagaagaaacgagcaacccgaaagccagtggttacggtggaacgtgctgaaacggaggaggatctcccttcaatccaagaggccaaagattgcacaccgactgaagagttccatgatacctgctctgatctggaggtgaacgaggcagcagttgataatgagctgaaggagaactggtcctctccgaaatcggtaagctgggcggaagaagtggagaagactaattttcagtctaatgctaaggaaatctggagtaatttcaaattgaaccaggtatccccttctactcgattgtcatatactgaacccaagaaattgggagatagagttattgctgaactagatttagaggaagtagaaattgaagcttctttttggaaaaatgctattgtgtgtttagttttgggtgctaatccaccattcaaagtgtttaaagggtttgtcaagagagtgtgggggaatttgggagttgagaaggtaatgaggatgcattcaggttgtacccttgtcacttttagagatgaagcaacccatgatcttgtgctagaatcaggggtaattcattttgataaaaaaaacctgtgatattaaggccgtggtcctctgacttggatacaacaagattggtgaagtctgtcccggtttgaattcttctaaatggtctt

SEQ ID NO: 10938 - DNA, 674 bp, Cannabis sativa
gtatttgaagataatgtaaatcatcccctacatgtacgtataggatttgaagaatataacatgttctaaatagaaaatgaattaacactattttttattaaagagatattttactatagagtctgaattagcactatattttcaattagaaaagatatttactatagagtttgaattagcagtattttctattaaaagatatttactttgaattaacactattgctattaattagaagagataattactctttgttttttcaactttttggaaaatatgctctgtgatacaatatatagccatcacacaagtgttgaatttgaacaaaaattaactagtaatttgagttgtgaaggggaaagtgttattacaacaaaaaaaattatttgtattggttttgatctgacatattagtgcgtcaattagctattgacgcttcattttttcatggataatcgcgtcgtgtggaattaaaaaaaaaatgtaaatgactctttatgagtagcattgttattaggtattataacgtacgtctaacaccgtcgtcaagtagtcatttcttagttctcttggacccacagagagattcatagattactattattattattaatttggagctcatcaaataattaaattagattcatataatatagtgtatataattattttaa

SEQ ID NO: 10939 - DNA, 615 bp, Cannabis sativa
ctgttagtcttataatatgttaaaatcttaaaaagttgtgttactttgatttcattttacatttctacaagggcgaatgtactcatttatttcttcattatatctaggaaaagaaactttatatctgcatatgatcttgtaattctgtatagttaatttgaaaacgatcgggtaaatataatgcagtcacatttcaagagcatggcagatagctggcacgcgatatgaggatcccaagttagctaagagaagtgaattcaacttgttctctggtgaagatggcagaatatcacttgaatgttatcattgtcgaacaactggaggtgagtccaatcggtgttgtcagaacaaaagtacagatgctcaagcagacacatactgtggtctgcagattgtgtatttgaatatgcatactcatagcaacatggtttttcatttctgagaatatatgcatttgctagcatgtagtggcatatgttacgacacttttatgtggtgatttttctcttctgtggtgtgagtgtgttgcatgataaatgggcacttgctatgttttttgggttttcttttgtattcaatcacaacaatttatatgaagttacaggaaatggaaac

SEQ ID NO: 10940 - DNA, 685 bp, Cannabis sativa
tatatatatgtatatgatcactccatgctttggtactttgatgaatttattataatgtgtttttgtttttaattatggataatatttacttgtgtttctgtcatgattataatgtatttagtttacatatagtggcaatattgtcatattttaattaattaataagattgatttatatattattatttatttcatacaaacttaataaagaaaaagaaaaagctcttcatccacacctttgatgatgatcttattcctattaggcaccatgcctagcattaccacaggtattgcctgctggccactattataaaatggcctttttctgtcgttcaacatgacaatcaaagctcgagaccgatcaaacaaattagtgctaaaatttttgattaaaaataaaaaaaaattgtgactattattaattatcattcttatgttgtgactaaaaagttcgccgctaaatgtattatactacaaaaaatattacttttaatcacaataaaatttgtgactaaaagtaaaaatattgtgactatcttacttctggtcatgctttgagttaattcggttcttttttgcttgttctgtgttggttcttctagcttctatgtttgttgtttttgctggttgttgttgttcatctcctgtagtttgttggtgcctctgttagtttatggctaggcgg

SEQ ID NO: 10941 - DNA, 544 bp, Cannabis sativa
tgcaaattatattgaatcaatcaaagttaaatcttgaatacccctaaaattagtaatccatatatttttttcatttgcttaacatgtaaattatctttagacaactaaaagcctaaaagggcctaatattacttttacaattatctttataaattgataaagtgaacaaggaaagaacgtcgtttatgataactaggttaatgtacctatattagttgtattattagtttttaatatatttttaattgtatatttaattttttttatattatttattaaataatattattttaattaaaaatatttaatttaagcgctaattatataaataaaaatatataataatacttaaaatttattgttaaatataatattttttttttattgttacgctatattattatttttttttttaaaatatgtaaattgagtaaaaagatagggttgaacatgaaattctaaaaactgaaaaaactgttcaagctgacttatcgaacactgttgataccgaaaaccaaaaacaaaaaaaactgctaacagttaa

SEQ ID NO: 10942 - DNA, 815 bp, Cannabis sativa
tgcaactgaagttaatttccctatatttcattcttgataaaatcttgtttattgttttgttatttaatttttgcttagattatttagttttaaaatccatttatttgattgtagaaacaagaattcaatttattgatacttagctacagtcctcgtgggaacaatctcagctacctgttaagtattacttgttaaaacgatacatacatttgcgtactgttggatttatcacactaaatttttggcgccgttgccgggaactattttagttaatattaaaataattttttttattttaatttggtttttttttcccaattttactaattctatcaaatttttctcatctcaggtttaggtagtatatgcgacatcaaggacctactgcaagaaagagtttgatcctaaaattgagaagacttatagattgaatagaaaaaacaagaggttggaaagagaggctgctagtgaaagaggggttgaagtagaagaagcaatgacaaataatggtaataatgggggtgtagtagaagaccaagctagctaatagccagaatctaccagtcagaagcttgagcgtgctatccactatgacatggactcaatctagtataggaccacctgttgttgatgctaatacttttaaaattaagcctgccattttttaaatgattcgatttaaaataagtacgcacgtgtgtataagagtcataaattcgtgaaaagatgtcgaataaaaatttgaaacgagaaggttacagaaagtatatgtatactagctagctagcttttaagaagtttttgtagttagctag

SEQ ID NO: 10943 - DNA, 760 bp, Cannabis sativa
tctctcaacaaggatttcatgaaaatttcttagttcttggttaggaagctaatattcaagaatatcattgttacttagtaacattagcctttttgtagaatgaaattcttaaacatatcctaggtcgtacttttatcaatgggctatgaacaatagtttgggtcgaattgtgcgatgaagccatttgggtttcatcatatggacataaacttcctccttcaacaatctagtggcacattgtgcccatgttctagcaagggaaaaagttactttcctcttagtttttttttttcttttctttttcctttgtcattattagagttagtctcacattgctaatgtgtggaaataaaatgtcatatataagatgaatgagctactcctctcattgccaattggttttgagatggaactctatgcaccttaaccatactcttcctaaattctaagatggcattagagccaaacaaaaaacttctgctgtctcccccttaaacctccatttaggacctttcgaccaatgtgtaccagtttccagtgttggggtctttgacctgtttcaaaaatccacaaatttcttggtgtgtacacccacaaattctcgatttggccatgtgggattctttcaaatgtcaggtttgggcctgtggtctcttaaaggtcgttcgttatacccacactttccaggtccaaatgtgaagagggtgtattagagttagtcctccattactaatgcgtggaaataaaatgtcatatataa

SEQ ID NO: 10944 - DNA, 952 bp, Cannabis sativa
ctattatgccacaaagtgaagttgaaataggtacattggaaacagaatgaaaatattgaaaactattgctagtaggatgaagaatggattgctggtatggcatagcagtagagttgtggcttgactaagaggaggtagtaggttgatcaaacttgtaaaggccattttcaacattcccaaccaacaaagtcttcatattgacctgatctttgacacaacagtggttagggtgtaattcaaaaaagacaagattatctttagcaaattgattgacactgagtagatttttagtgatagcaagtacatgaagaagattgtttaaataaaggagttgagaactgaaaatgggaattaatagtagaaaaacaacggtgtttgatgtcaaaacctaaaccatttcccatgtaaatctagtcagagccttggaattcttgagtattctgtagattggtgacatcaggagtgagatgatgagttgccccttagtcaagatactagctcgaatcatttacagtctcagctgtagcaaccatggcttgcatttcagccaaattttttgatccatcattgaaggtttgaaaacactcaggacctgtaaaggttttatcaaatcaatagaagcatttattgacagtatgatcttgttaatggcaaagttggcattgaggttttgtggtagtagatcctcaaccaccaggactaggagcacggtatccaccttgagtgggtctaaagttttgagagaagggtggatataatggtggaggaagtaatccatagccattgtatagatgtgtaggatatgatccaaacattagataactagcacgaggattgcatacttctgccagaatttgatgcagcagatgatggatagtgagatccaggtctaggcatggaggtttttgactgagctgcaagattaacttcagaattggcgatatcaagttca

SEQ ID NO: 10945 - DNA, 867 bp, Cannabis sativa
tctttacatttacctacatacaaacttgtaccacatatggtggcctactatttgttaaatttgctttagagttatagacaacgatttaaaattgttcaagagttttttattgatatatagtatgtctaaaataatcccgtttataagattatgagctattgattaccaatttagttttgagatttttatttttaaaaagcatttagattgtacggtttagaatgtagggtgatatatttaatttagttttgagattaaacctcatacttcttaaaatacacatcaataccttactttctaaaccatgcattgtaacatgcatgatatcaagagctaaagagaactctcgcgagtaaatctgatccaaatctaaaaagtaaggccaaaaaaattacttgtgatcgaaccgttcaggattggtaaataaaaattatcaccatcttgatacaaaatattagattcttatatattaatagtgtgtaagaatataatatcaatatcaattatataagatcatgtatatgtacttcactcattattaattgatttttagattaaatttgactgtactttcaaatatttagattgtatttaaataaaataaattatgatagatcgcagtgataacataagctatccattcactacaaaatatcttgtaaaaaagttaagactaaaaaaactaacatattaaacttgtgttatcattaaaagaaactaaatatattttacaaaatatttattgtgaataaaattaaattatctagtaaactcttgtatcaaaatactcatttttagtagggatggaaattaagcgggtaataggtgggggaggctcccctatcccatccccgttaactattttaa

SEQ ID NO: 10946 - DNA, 896 bp, Cannabis sativa
ttcttcttcatactccttttaatgttttcatctacatatcctcctctaccattagcctagctaattatatagtaaaaaaacaactaaaaattttaactagctcattttaatcacaacagagtcatgttaaagcattgcacagatatctaaattgctctaccgcactgaaatccatacacaagaaataacattaggccaaggctgaaaaagccatatacataggtaataggttataggtgatgtacatacttaaaaataacatttatatattggctctgtattctttgacaagccaatagaatctttgctattccaaaggttatgaaagtttttacgccaacttgcacgcctactctgctagcaaaaaacatatatctcaatatacataaattgttgtgtgtaggagtgttgaaaatgagctaatgctgatctttagatctattgatatagttcaactctgctttacttttttactttagccgttgaggcttgaagacactttgctattaagagggtttgaaattcttgagtccttatatgtgaaacctctattaattatgtcgaagaaaaaggaaaaaagcagattctttgctacacatagggaatcatatctaactagggagagagagagagagagagagcccttaattcactcacacactctctctctctcgaaaatgcatgccactactcaaaagcttaaggctcaacacgcaaagcctacgtgcactcttgcattattctcttcacccttgttggactaatgttccccttaaaaaaaaaataatataaatgtatacttaccaaagaacaaaaggacaaccccatatgatcatcgattggggggtcccaccacagtacatgatctaagactctactcttgtgtgattacatca

SEQ ID NO: 10947 - DNA, 584 bp, Cannabis sativa
ttaactattaaaaactttccatcccaaaaaataaactattagaaatcatgtttataaaagctcccataaaacttcttacaacacatctgtaattctttttccctttcaagttaacacaaagtattattacacatttgcgaacagaaatcactgcaagtacgagcaaagattgcacccaagctgcgtaatcaacctatgacaacttaagaaatcaggtaacttcccattcaaaccttcataggttctttaccaatcatgtgtcataaaactccctcacattgacattgaattacaagattctttgcaaggaaaattgacatgtcgttcgagtaatttataacaagcctcattattttttagggatctctttcttcctatgaatgaaaagaaaacagaaaaaaggaactgcaactaaagtagagaaagagaacattagaatgccatcaacggttaattggtgtgttcattcgctctacaattctgttgattgcagcacgagacattacgagtgtgtcgtgttgcagaatgctgtagacattgagaccctgtaaaacatgtaagaaaatggattaagtagaatgtta

SEQ ID NO: 10948 - DNA, 731 bp, Cannabis sativa
tgccaatttatgcaaaattctcttcaatctcattgggttgctatgaaaaagaaattgaggtatgttagtgggattgtgacacattgattgcttctcaaaaaaccttcttttatggattttgttatcttctgtgatgctaactgggcaattgatccagatgatagaagttccactttagggtttgctatcttccttggcagaaacttagtcatttggcaatgtaaaaagcagcatattgtgtctcgatctagcattgagacagagtataagagtctagtcaatgtggtagttgcgctaacttagatgcacaatttgtttcatgagctaaatatcacattgcctatagttctcacactgtggtgtgatgataacttgagtactgtcatgctcactgtcaatctagttcttctttcaaggacaaaacacattaagttaggtctcaagttcaacacaagtttgtagaagtaaatcactcttgctgctgatcagatagttgatggtctaaccaaagctatctcaagttagagatttctttcatttcgtgacactcacaattgaggatgcctcaattctaagtttgagaagaactattaagacaactactaggagttagttaatactgttagtttagggttttcgttaagagccaattagttaagctcagctaagctcaagttagttgtctcaactgaattttgttattttcggttgtcatttgttatggatgtctt

SEQ ID NO: 10949 - DNA, 500 bp, Cannabis sativa
cggatcaccattaaccaggtgtcttggtggagacaagtcagtgagcaagatttcatcaagctcgtgaccaataaccgtgggtaaaacttgagacttccatgccaggaagttgttttgatcaagcttgatcgtgagagaggacgtcaaggaatgagaaaagggattccaagcagtagcagagggtgcagcaggatcagagatacttgcaggagacgagttgtcgcctgatgaagccattgacgaaggtcaaaggctctaataccatgaaacaaacagaacagaggagaacagagagaaaaattgagaagcaaagcttatcccatacaagggactttattgatatttatatagctcaaaagagctgaaacaatacaagacaattagttataacataattggtaaaatgattacaagtgtcttaacagaaataacagacccaagacaaattaactaactaatcttgattttgtttatcagagcttgtccatatggtaaagagg

SEQ ID NO: 10950 - DNA, 759 bp, Cannabis sativa
accagaattgcccaaaattgatgttcactctgcacatcggccaatatcaaatggttcagatcctgaatccccagtttcacctctattaacatctgatcccaaaaatgaacgatcccattcacaaacttttagccgacctcatagtcactcaggtgatattccaacaaaagcaagtgaagcaaaggataccgaaaaggagccaccatcattttggaggctggctgagcttagtttcgcagaatggctttatgctgtgttgggaagcattggtgctgctatctttggttcttttaatccgcttctagcttatgttatcgcattgattgtgacagcatactataaaaatgaaggccatcacttgcggcatgaagtagacaaatggtgtttgatcattgcttgcatgggtgtagtaacagttgttgccaacttcttgcagcatttctattttggaattatgggtgagaaaatgaccgaacgtgttagaagaatgatgttctcaggtgtgcgtctctttctttcattctctttttcttaaactttgtttcaatgttcttgagattacttgtatgcactttaccttatctgttttaatcttgtcacagcgatgcttcgcaatgaagttggatggtttgatgaagaggaaaacagtgctgataccttatccatgcgcctggcaaatgatgctacatttgtgcgagctgcttttagtaaccggctttccatttttatacaggacagtgctgctgttattgtggctgg

SEQ ID NO: 10951 - DNA, 743 bp, Cannabis sativa
gtcgatccagagcagggatccctttggaccggccctcaaccatggccggagaagccaatgccggtctgaaagcaccaccatttttgcccgataacaccacagaggcagagcttgatccaccgaagaccggcccagagaaaacatcatggtaggccgaggacgttgaaagccacggtccgaacattggaaacggaattccatcacctttcgacaccgtcaccggcgacgacaaagagcatcctcggcgttgatggcctagacgaccacagttatagcagaaaataccaatcttttcatacttcatttgtaaccactgtttgacaccactattcaggtcgaaaaaacatccagagaccaacggtttgttgatgtcaagatcaactaaaatcttgaagaacgtagaccaggtggctggcttgtcctccaccatttctagattcagcaccttcccaaccagccccccgagaagaagcccattgtctttggagtaaaattcatgaggaagattatgaacttggacccaaactctaagagagttaaataaaatcgggccatccactctcggagaccaatcttgcagagcaagagtataccctcggatacaccaggggccgttagagatagcccagtttctatcttctatgttatcaaatccaaacttgaacacattggatgtcttcaagtcatcttccaatactataacactcaccggtcttttccaagttttcgccacaaattcgagc

SEQ ID NO: 10952 - DNA, 688 bp, Cannabis sativa
gtcccaccgataggaactcttcggaaagtgaccccactggtactgctcggaatcgtagaaggaggagctgcttgagcatcgcccaagaggtgatgggtcggcgttggttctcccattgaaaccaagatagagcatcaccttcaagtccgacgatagccgtatccaacatcatcgcttcagtcattcgggataggagaaagtaacgctcggcacgataaatccaaccgtcggggttgtcgccgttgaacaagggaatttccatccgtggtggtcggaagtcttgaccgtatgattgtcccgattggaatgtccccagctgaattggtgaaccagtaggaatatgaagtgggggtatcgccattttcgatgaaaactttggtggttgctgttccgagcggtttcccacgccactgacttctccgatcgaaattccatcaccatccaatgcccttcgatgccgatctgcactaatggccgctgcgtctggaacgctcctccctgccggagctaggagttgagaaatttgactaaccactgtctccatttgtttggctaccacttgttcgatggtggtttggatctgtccttgtagtttcaacacttcttcttcaactttctcttctatgatttcagccatattgtctttcttaggtcccatgaattgtccgctctgataccactttgatag

SEQ ID NO: 10953 - DNA, 1202 bp, Cannabis sativa
ggatgaatgtgattcaagaagaggctgtgatgctgaccatgattatcagcccccatgtcctaataacattgtggatgcctctaaagctgtttggaaggccttaggagtccccaaacatgatcggggtgaacttcatatcttctggtctgaaacttgattttctttaataatttctcaatgtaatgctagtgatagttgttattatatcatgcataatgggaatgctgatgattgttgttagaaaaggtattgtctcatatcagttggaatatcctcaggtgcttaattatcaaaattgcttaattttattttattttactcgggaaaatttgtcactgctttgaccagtgtactattattttgcttgtacgattatgtcgtcgtttgaaatcttgttagtgcagaagatgcatgaaaagggaccccttacttgtgcttcttcattattaggagaaaatcatagcttaacataaacataatataaagagtgagtgcttataagatatgggttttctggttttgattccttatctgtctcaatatctcatgttaatttttaattcatccaagaaattagaaaataactacacctaatttggaaatatagaaaatctctcatataaattcattaaaaaagtccctaatattgaggctttttcatgtcaaatgagaatctgctatgtcattgagaatgtttgtcatataaaattgtgaatcacactcgattatttgaaattcataaattatttaattaaattaaaatcattaattaaatttgtaaaactataattttttttaaaagtaaaacaaaaaataaaaagaatggaagtgcatcttccgccatcgtccttggcagcttcttattggtaaattgtcttgtgcacgtagggacaattcgaaattgctcactttaatggcacaattgagcaaggtgttattctcctctacttaacttactcatttattttctctttagattttctttctttaagtttggcatgttattgcacgatttttttttttttttcaacagttgtttttttgaatgaaaaaaagaagtggattttagtcccatatttgttttgtagtaaatttgataaacctgaaaggctataaatagagatataagcctcgtttatttttaacaaattttgtatattaattgtattaggaatgtggtattcgtttgttagattgtatta

SEQ ID NO: 10954 - DNA, 694 bp, Cannabis sativa
aaaaaaaaaaaaaaatcagacaagatgatattgtaagagtgattgctcttctgttttatatcagcgttcctctctctataaatacattacatgttattaattggatcacatttaatagatttggattcaactaattcaatccaattatttattaaagattaaattttatcatccgatccaatctaatcgaactgagttatccgatctgatccgatccaatagatatattagattggatcaattctaatcattgaatgtgttgattgattatttattagaatattagattggatttatccaatccattttaactactatttaaattaatttcattaaaaaatatatagtatatataaaaaatcataatttaaaagttaatgatccaacatatataataaatattagtttagtccaacataattctcataatctctcataataaaactgttaaaataaaatatattaaatatataaaatcatcactactacaaaaataatttttctcggtgtttttaaatagtcgtttaaagtattcacatcggtttccataaccatcgcctatacgaccgtcacaaaacaggcaaaataagcaacagttaaaaaccgtcactaatatagacttcccgatgttttaaaaccggtgcctaagccctgttataggcgatggtttaaccgtcgggaatgaaaaaataga

SEQ ID NO: 10955 - DNA, 520 bp, Cannabis sativa
attttgggagagaaggagcgagaaaaaggagagtgaaattggtgtcaagaaacaacacaacacaacgtcgcaacccaatcatggaagatgatcaaggatcaaccccaaatccaaatccaaatcctaatcccaattctaaccctaaccctactcctaatcggagcagcagagcgggaggaggatccatgggaaagtcatgtaaaggatgcctctactactcatctcttcagaaagccaaatccaacaaccccacttgcattggcttctccactactcttcaaaaaggtcaccttcttctcttctcttctcttatttatgtataaagctattatgaaataaaatggatagatgggcaattcttttagggcttggattaatggtttgttttacttttagtgctaatagttgttgggtttgtattgaaattttgatttgactagtataatttaggtgggtgtttttttaatcattaaaagattctgtaatttagtgctatttcttgttgggtttgtaaagattt

SEQ ID NO: 10956 - DNA, 699 bp, Cannabis sativa
  modified_base (80)..(93): a, c, t, g, unknown or other
aaattttttaaatcgttaaaaatgacatctcaactattaggattgttgaatttaaaaacttttatctaatttcattcaannnnnnnnnnnnnntaattgtgtatgtactaaaccatgcttcccaatctttgatatctaccaaatcatgcccatggaacttagacatgtactaaatcatgttccctgaatttttatccatattagagtttttttactaaaattagaaaaaaaaaaaattaaatcgatcaatctcaataattcataagaaacgaccttaaaaataaaattcaggaacaaaaatcctaattagccatgcatatacagtataaccaaaatggtggttggtggtggagcttagatgaactcacaatgcggttcaagaaaacaccgaccattaattaatgaattagtaacattctgtgactgccaaaaattactcccatctattctatttctaacccaatcacaaacatatattccacacacatttcaaatttttacaatatttaatgatcgatagtacttactactactagttaggtaaaatttcaagtacagtatcaatttcaaccacttcctctcctctccatttggttataaacatacatacatgcatacaaatagagatgagatgagcacatgagattccccctatttatgtcaaagggaccaatatactctttcacatcttaaattatt

SEQ ID NO: 10957 - DNA, 914 bp, Cannabis sativa
aagcaagaaaagttcaatcataacaaactttctagtgaaacttactgcaaaatcgcctccattgatgaggttgatgattccacgatttcctgtagtctgcaatagagccataaactctgaagctgtcacaactaagaactcaaggaggagaaaaattcggaacctatggctaatcttggataggttatgatttaggcgaatgtgttcggtgatgtattcagaaacatctaagtccctttctaagagcttcccataattctctaagtgtattatttgtaagttgcagactaaattgaacaaagcactgcctgaaaggaaaattatgttcaaataagtccatgagaagagcaaaccaagtatgatagcggcggattgccaccacgagtctttgtcaatgtatcggattctggaaacttctcgagcagccttcaagaggaaacaaggtaacacccacaccactagtaagtggaagaagccctgagtaaagagtattaaaaaaacactatgagacaccatagaaaaatacaagaataatcccattttgtaatgacattctattggagaacattatctcacatgaattaaatgagaaagtattgaatcatatataagaacatgggctgctcgttttgagatggaacctcacgagtctcaacacattctcatatttccaccattttttttgtttgtgagatctataatcatcactcaaagcatataagaataacaattgatagtttccatgttcacaatttcaaccaattggttttgtaggggtatagagtccctctacaatcatcaagaaaaaaaattaaaagaatcaaaatgttctcattttcagccaattttattttgttaagtagagtctacaatcaataattagatcaaaccattttcaatttttattttgctag

SEQ ID NO: 10958 - DNA, 1045 bp, Cannabis sativa
  modified_base (117)..(118): a, c, t, g, unknown or other
tatcactatattcaaagatttatcttacaaataccaaccataaataatattgtaaacagtacatgtacttttttacaaaatacagtactgaatctatacccaaaccaaccaagaccnntgattggagacacaagatccccttgtgtgaatgatgagctctcttgaaccattttcttcaatttgaactcccttcagatctagtgctgaagaagatactgaaattccttcagtctaaactcaacatcatcaagctccggtctacaactttggattaataccaccaagctcaaggttcagacctgccatgtaacacaaagacaaaacaagaagaaagaaacataattcttaatctccaatcaaaaaggttactcaacaccatagcaagaagttgtatttatacccagctaaactatgaaccccgaaataaacagctttcaccatttgaacaattaaaacccaaaatatatttgttgacgtggactatcactaacaatataaacttcagacgcaactagacctaatttgtccctataaaaaatactggttcttacatacttgtgcagtgcctttgccgtcaccagagaacgcaccgaagagtgaaattaatgattcccgagccgagctggaaccatgccaagggtttctgtagagactacctttctcaacagagataattgagagaatatcttcagaagatttacaactgacaataaagatttgcatcgacagtctccaatctactttgatcctcgtgaaatgctcggttgctgcaaagctacgtctattaacgaagaatcggtctgaaaaccaagctttaattggtgagtctggtgctgtccctactctaattcctctcctctgatgcaacgacccatggactcaagaacatgttgtgtcgacggccttgctgaacctctctgaatatctgagctttagaaggttcaactttttgaatatctttcatataatactctgttgcggcacgcccaagtgctccactaaatccctagcttattccatatattaaaatcactcctagtactca

SEQ ID NO: 10959 - DNA, 891 bp, Cannabis sativa
tctactaccaccggatttaattaaattaaatattgatgccagctatgcatgtccaaaaaagtaaggttggaattggggcagtgattaaaacttacaaatgggaggcggttgctagtttcccattgtcagaagaaattgaaattgtatatgatattcctcaaagaaagatgtacacagtacaggggtatttatattacctaatagagagagcaaataacatatttaggagacttagtacaagaataaaagagaatagtaaatgttatttctattgtttaacatccccccgcaaacgaacgggactgggaaagaccgcaagtttggtgcgaagagtctaaaactgaggtgtagcaagaggcttcgtcaagcgatcaacaacttggtcttctaaaggagcgaagcagagttggagcagcccacgcttgaaccgttcctgaacaaagtaataatcaatttcgacatgctttgtgcgagcatgaatgactgggtttgaagcaagattaagagtgttcatgttatcacaatgaagagttggaagaacctgaagaggaaagccaagttccccaagaagattttacagccacaaaatttcatttgcgacattggcaagagcgtagtattctgactcggtactagaatgagaaataactttctattttgttgaagaccatgaaatgaggttatgacccaaataaacacagtaggcactagtactccgtcgatcatcgagacacgatgcccaatcaacattagtaaagcaatgaagttcatgagtgggatcaggttggagaagaatgtcaagatgtgccatacctttaagatagtgaatgaccctctttgctccttgataatgaacactggtggggacatgaagaaactgacataatttgt

SEQ ID NO: 10960 - DNA, 594 bp, Cannabis sativa
ctaactaaactgaaggagaaagttcgttatttatcagtcctgaataccagcacttaccaaatagagcaagcatacaggttgttgtatcatattttttgtttttagaagccaaaaaaacttacactatctttttttttttttgcaggtatgtattgagttatagtggaaagaatatagactaacttaagtaatatagtaagtcaaatttaaaaagtaatttaataatttttataacctaattaactttttagattttcataattaaatatagcataaacaaattaataaattaataaatgatattttattttgatagacagataattctattaaggtgcttacttttaagtaattttaattttttttattataatattagaatgaatgatgcaataatacaaaattagagggttggagatgtaattttaaatctataatattattcttttacattttttattttatgggatcagaggtataaaatcattttttacactcataatattacctcaaaatctatatttttccaaatcattcataaccacaaacatatgatattgtattttatacctatagagcttaaaaaataataat

SEQ ID NO: 10961 - DNA, 857 bp, Cannabis sativa
tttatggagagttctatttgcacctgtacaccccaatacttaaaaaaattaagtttaaaataatttttaaaagttactcttaatattttttcaaatttttttctcacattattttgtgttaatttcaatacttatttttattttattttcataatttttttaataaatttcgtatctttttttattttaattttctgttataatatttaaaatataatttatttttgtttgataggtttactttttaagaatatgaattagaagaaaattttttaaaaaattaatataattaaaattatttattttatgtaaaataaaaattattgaaatgatatgtatcatgtatttataagtttttgggtataaataaaatttccctttatttatttattttacaacggcgttcgttgtagttacaccatccttcccgttaatttttgaataatttcgaataatttatagtatcgacaacaaagttgctcatattccgcttttctaagcgtgtttgaaaaaattcaaatttatcttggcgcggtaaattatttaatttcttttgaaaatttacaggttggattccgttactacaacgaacacttcattaaaaaaattagaaaaaaagtacttccgcataggacttaatttaagattatttcttattaatacattgaaataaaaatttgaagagaaaatttgcaggtgtctttttcatgtgtaatcaagaattttccttgtgtattatgttattccatctgttaaaatccatttgatttgattgtgtcattgatgacagatcttgtcaagtataattgtgctgtaattatgatattatttcttgcacctcctgttgtaaaaatgat

SEQ ID NO: 10962 - DNA, 611 bp, Cannabis sativa
gaggatcgacactcttgatgctttcgctgtaggatattgtgatgtaggagatgtagatgagggtatggagtggttggtagagatgttgaggaataagctaaaaccaaggaagcaaacgtttttgagactaataggaagtttcactcgaagagataggttaaatgattctttacttgttgtagattatatgttgaggacaggttatatacttcaaaaagacatgttgagatttctggttcataacctttgccaaggaaattctaattttgttgaaacatacttagagatcttagagagaagttgattcatcaagcttttttgggtacgttttttacaactttgtacaatttattggtgagaaacaaataaatggaagagggttggttcatttattttttgatagttgtgcttacaactgatattcattgatggattatatttccattttctattttcttcttgggtctctaggctttatatggacctcatctttttttttttttttggttgaaacaaaagtccatttagtaaccattacaattacaaaagatttggcgaatctcactgtaaagcatgactctcccacaacggggattaatctcaatctatat

SEQ ID NO: 10963 - DNA, 542 bp, Cannabis sativa
tcttgaagaactctatggagcacattccagagccaatatggatgatctcaggaccaaaatccaaaccactcgaaagggatctcagtctatgactgattatctcaagatgaaaagaatgtgggctgattccttggcccttgcaggtgaaccctatcccgaaaaacacttagtttctaatgttttgtctggtttggatgcagaatacttgtctattgtggttctcattgagtctcaagcccagacttcatggcagcagctataaagcactctgttaagttttgatggcagattggaaaggcttaatgtcatttccaacaatagcaaactggtgaataatgcctctgccaacattgctcataaacatggttcaacttcaagccaaggaagtcaacaatattcaggctcgagaaaaccaaatccacatcagaatagtggaagaggcaaccaaaattactctggaaactcgagaggtggtggataccgaggccgtggtcgagggggaaggggaagtggacccaaacccacttgtcaagtgtgtggga

SEQ ID NO: 10964 - DNA, 679 bp, Cannabis sativa
aagtgttcttaaagataactataatactgacatactgcaatctttttcatttgatattatttaaggtttttttgtcaaacgatcgaagaaccagacagtcgattggttgtcatgtttccattgcaagatcgaaagaaaaaaaaaaactaattgcactcatgaatatggtaggaatattctgtcgtttttcttcttaacatttcacacatcaaaaagcaaaacagtattgtataaatatataacacaaagctgcctacaaaacatgatgacgcaaaaacttctaaaatacattttcttcaaagcagtggtaagagaaatttcaccagcaatcttccaagtacaagatgccttgaaaactcctctctctatccgaagaaaaaagaaagatggcttgaagactcgcgcgtgggatccggtcacaaaccaacctaagccaccaaccaaaatatgcatgggaatactaacaacgagaacaaacaaatatagaatgactacctcacctttatcaagttagctatgaaaaatgctccatcaacctcgcaccacccaactttcatatggacaagtacgaaatcaatttcatagagcagaaacaaatcaagtagtctttcctaacttcttcagtaactctactctatgtatttacatggcacgatgttgcaatatattaaggcatgaa

SEQ ID NO: 10965 - DNA, 1049 bp, Cannabis sativa
cgttggatcataataagcttgatttgagctcatgctacgtttatggagaaacaaaatttggaaatattatttcaaatgttttccttattcttcttagcgtttcgcttttgtggtcccttttttatgggcttaactatggatatggataaactagtacattttattattattattttagttgtgaatcatcttttcattattaggcatatttgtcattaattattattagcaataattaattaattaataattcataattcatagttagtttctaattattcaatccataagaatatacttatttcttagtggaattgttaattattttgttttttttattattattattatacatatgttaacaattgtaattattctttatataatacatcaattttaaattgaaatgtaatacccttatgttattctaattaatgttttatatgtaaattcaaataaattaactgatttatatggaatagaataacaattaaaaactgtactgagttttttaatatataaatctatatcaaaaataaaaggtcggtcattactttagtaattacactatatttaataataaaatgtgtgtttggatataatcttgtaaatatatatatatatgaataattaatgtcttattttattattattattatatcttaatgttttttttttttttaaaaaaagctaaaaacgtacacattagaattatcatttttatattattatattattactattattataatatatatttttaaaataaaagccaaaagcgttaaggttgtatattgtattattattactataatttgagttttatggagtctatatttttttatagaattaaaattaaaaaagtgagagaattaaggagaaaagaaaaaaaatagttttagagcaattttatatgaattaaaaattaaaaaaatgagataattaaagagagaaaagaaaaataattttaaagaaattttagaatatcatgtcaccgctttatgtctatgctttatatatatagataaaatctataagaacaaaaccaa

SEQ ID NO: 10966 - DNA, 707 bp, Cannabis sativa
ttttttttttttaatcttttttattaaaaaaaaaaaaaccaagccatatacataggtgaaaaaaaaggagtttgcaccctaaaatctataaatacactacatgatttccattttaataatttttatgtttcacaaaaatatatatctttaattatattagtaatattttttatttttttcttctagttcatattataaaaaatatacttattaaataaaaaataaattatatttaaatattataacaaaaaaaattaaaaattatatttgataatcagtgattaatattataattctgaacacatgaataatattttgaaattctcccagccatatgtatattctttttcttttgtataattgtttaattgtttcatttaatttttgtttgaatattaattgctggtgtaatattatcataattaataattgaaactagtatgtaaagtatataattaaagattgtagacttgtcttcctattgatataacagtactaattaactttaattattttgaagattattaataaaatcaaaaagcatacgtttacattaataaattaatgcctatatatataatacatataatatagagggtgtgcaattaaactcaaaaaattagacaaaaaaaaatcgtatcttaattttttgatctaattaatcccatttagttgtattttgtacttcaatcagtcgttgtatataa

SEQ ID NO: 10967 - DNA, 782 bp, Cannabis sativa
taataagtctgtttcggccctctctcgtgcccacttttaaactcaccatttttaatgtattgtgtgtcattatgctgacaactgatcgaacaaaagtcgaaattgtgaattcttaagcagctactttgtaaatgcttgaatttacatagtaaactgaacacatacaatctctatacacaggctgacactgaaagtgaggacatctatttaggtatcaatttctagatgatttgttttggccatttttcttgttatatcttggatgtgttatatactattattcactttttaaaataataaaatgtttctttataggtgatctggtttggttcttttacatgttttttttacctttgtttgatttttaggttagtttaaatcttgaattgaaaaaaattcttaattacagaatgaaaagtgaaagatggtaagcttagcaaaatatatattagagataatactgataacaaagaaacaaatgaaacttggatcaacaaagtacccctcttgatgcacacaaacacaaagtgaatttcaaagtatttaaaattataattgagaaagatgaaagaaatcaaagataatcatttatagttatatgggtggagtaaaacaagtgagatacgaattgaaagaggtaaatgttgacaaaactgagactacaaaattgaatattcaaacatgcaattattgagaatttgaggagtgtaactgttgatatcttattacaatcttttagtcaaattttgtgtttgaaaatacttgttggaatattttttttt

SEQ ID NO: 10968 - DNA, 1032 bp, Cannabis sativa
ttcatccctaaccgaactctgaccacgaaccaccagcagcatgaaaccgtcgagcaccactaccaatccaacacgaagaatcgaccaccatcaatagctcgacgtttccattttacacgacctcattatcagacccgaagcactcacatagggtagtttcaacacaacagaaaattgaggtaaatttttggattctgagaaatgtctaaagggttgtgttgaagtgaatattgggtaatcaaaatcttagttgtgtgatctgaataaattgttgtggtggagtagtattggatttgtttttcaaatctgtgagtatactagtgtggattgggactgtgttgaaaaagaaattgtgtggctgaattttactgaatcagaagacaaatgccaaaaatcaagcactgtgcccataaacctccatagaaagatgcccaagaagctaaaaaatttgtttcggaagctgctaaaaaaatatcttgactcggtgcgccacttggaattttatattgagcgaggaatgatagtatgagatgataacttcagcagcattggctaatagagaacataaaaaagaggaaatggttagaattgtgtgaagatccagcctcagcagtttgttaagtggtaaaggaattctatgcaaattttctggcgcatgaattggcagctgagattacagtgcgagaggtcaaagtgaaattctccaacagagacataaaccattacttccagcttaaaaatgtgacttgtgagttctctaaggatagtggcaagctcactgatgagctgatgcacaagattgtgcctgaattgaaaactctagaagcagagtgggaaatagatgggcatggtgtgttccgtttcaaacggactgatttgaagcacgatatcaaatgtctatataatttcgttcaatccactctgctgcctacttcacatgactccacggtgagtcgggaaaggatgtggatgcgatattgcatcgagaaaggcaagaagatcaatgtaggcaaggtgatagctaaagagatc

SEQ ID NO: 10969 - DNA, 536 bp, Cannabis sativa
atgttacatcataaaactcaagttcgtgtttcaaagagtattgagctcagaagcgatattctaattaggaaagctcgtccactccttaattatcatattttggtactattaaggtgtactaagacttgaaattctacttatggtgtagaatgccaaagggtgtggtggacaatgtattctgatgcttaatttgtttatgaattaggattaagcataaaaaattagtaaggtttttatgattagttaaatttctcaagtaatatgagaagagattgctaggaatcatgagtatgtctgatttcgtatggtactactttaatacaagagcttgtaaggaaaattataatggagatagtatgactttacgtgactctaaagtccatcattttggattggaaaccgaaattcatctttatgttttaacaatgtctacagagggccattattatgtagttgaagtttagtctagcttcctacctttatacacatggccagtcgagaggggcaattcaagtactaaaatatatattgcaagc

SEQ ID NO: 10970 - DNA, 760 bp, Cannabis sativa
actccccccattgaaatcgaccttgtccttaaggtcttccaatccatacatacgcagaaaatcatcagacttcccaagtcgcatcttcaggactgcttagagaccattgaaccaacacttgttttgtaggaacattgttaatctgatgaactcgagctgcaattattgccactgggaacatgaccggtttgtttgcaatacgaatctccggaagtgggaagcaagcaggtaggggtgttctgatataaggcttcaacagtgagacatggaacgttgggtgcactcgacttccttgaggcaacttcagtgtatacgcaacttgacccacgcgagccaggatttcgaaaggtccaaagtaacgtcgactgagttttgcattcaaccgcttggcgactatagactgtcgatacggttggagcttcaccaacactaaatccccaatctgaaactcgatatctctgtgtttcttattagcttgctggcgcatcctattctgagcttgctgtaagttggacttgagtttctataagatctcatccctagataacaaatcatcttccactgcttggattgaagtcgcgcctcttgtataagatggaatggtgggtggagttttgccatagaccgcttgaaacggagtcattccgatggcggagtggaagctggtgttgtaatggtactcggcccaagttaggaacttactccactttttgggatactcggctgtgaatgccctgaggtactgctccaagtaacgatt

SEQ ID NO: 10971 - DNA, 659 bp, Cannabis sativa
tccgccgtgaacgaattgtttactaattgttatatattataatcgaggcgttttcaatttcaactgtctctaccttaagtgttaaagaggcgcttagttggataaggaagaataataagttgaatgtgataattaagacgggctgcattttagttgttcaagccattcttagttcggtctctatgccttttattttcgatttgtttgttcaagattgccaatttattttatcttctttaaataatgtttccattggtcatgttaaacggtctgctagtatggcacgtggtgcttgttattggttaggtcgtctttttaccgagagtgatgttccacttgctcttccgtccattatattagcagatttatttgtctaatgaattatttactttattcaaaaaaaaaaaaattgtatctcctttttttagttgtattactaatataaaagtaaataaaaaatgagaaagttaatgaatgaaaaaagaaaagctctctccaaaaatgaatcgaattagtactcaaatatccatttatcatccaaaagttaggctttcaagtgatcatgatcatagctagcttacccactttccgaattttagaagcactgatgggtaacttctgtgctgaaatcaaccagccattagaaaaaaaaaaaaaaa

SEQ ID NO: 10972 - DNA, 671 bp, Cannabis sativa
tccaagcaataatagaagcaaacagacatagaaactcaaaccaccattattgagccaagcttgagttttcaaactcaaacttgcaaacttcttaccaaaccagcaaaactagctaaaaatgacctcaatcaacttaactaacccaaaaattgaactaaaataaactttaacttaaactgaacctaaattccaattatgcatgtttaaaccttaccaaaactcccaaaactcaaactaaaagagtgataaagcttacctttggtttccagcttccaattctctttaaaatcttattaaacaactaagagtggatgaaaccaaatctttgattcttccctggttgctttagccataggaaagaaagagagaaagagctagaaatgttgttgattttttttcttatgctaggttagattacttaattaatttttgatgaatgaaaataaatattaggcttatcctatcaccaaaaatggccagttgtaggcttagtggaataatccatttatcattaaaataaaaagccaaaattaatcttactttagtgcttaaataacaaaatgacttaggggtaagatggtccaataccaaaacccagcctaatcccgatatccaaaatttaacatatgattatccccctaactaaaggttctaaaagatcggaagagcgt

SEQ ID NO: 10973 - DNA, 597 bp, Cannabis sativa
ataaatacaatgagtatgtggaccccgtcgactaatctgaccaggaaatatgtcggaggcttgaagctcaagtgaagtatcttactaaaacatccaacgattttacacaggaaaaagagttcattgaggctcaagtggagactaggaacatggacatccaaaataaatgacttgagattagcggcctagagctttgacttaagaaggtggatgcgttgctcaaagtggcaaagggagaggttcatatgctaaaggaagaggtgaagatgcaaaaagataaggtgggctctctggaactgaccgtggtgcatgaaaagacttatggaagagtcacgttgatgttgagaagcgcctaaggaaggaattggactcatgggaagccattgttccgaagtcctttgtatctgccaaagctttagctaggttggctgctacttcttatcaatgaatgagggattttatcaaggctgttgaataggaagaagctttacgtctttattctgtggagatatcttttgtggccactcttcattggctatggaaagtagaccctgcagtcttgaagttgcttgaaaacgaagaagatgagtacttggc

SEQ ID NO: 10974 - DNA, 647 bp, Cannabis sativa
caagatataagtatgagctagtccgtagggtaagctggtataaaaaatgtcaaagaactttaataggacaattagcttaagcattaatcatctcaagatctagaatgaattgacctatggtcagctattgtgaggtgactagattagcttaacctacattatactctgttatataatatgaagtttagattaatgctaatgtaacaaatacatgcaatcttatctactttgctaattttctaggaagaacataacacttgccaagtgtaagtagatcaaatcatagattagctagttagtgtaaatccaatgcatagactaatcttaggactacttattttgaacatacattgcttatataccactgtgactacatcactataattatgaattcatgatcttgttcatatgatccagatttgatagatgaatatattaaataatgatatacaagaaacatggaattttatatgggtataaaaccctaacaaactcccacttgaacatataaaacaaatgatacatgtttcttaaactaataattatattgagctctctatcagtatcttttataataagattttttagcatactctgtcactatcttattaattttttaaataatacattgccacatattccatgaa

SEQ ID NO: 10975 - DNA, 612 bp, Cannabis sativa
ctagactttcgaatttaataactaattgagtaaataataagttatatggtttataagtgaaaaaattaatcctttctacatttagctttgacgtgtgtaaactatataatgtattcacaactgagtaaagttcacttgtacagtttgagcactcaattactttagagaaagggaaaaaaaaaataatgaccgtgaggatttaactattagaaaatttcaaaactagtaaacaacctcatgaaaatggtgggttacttacatttacaacatttcttttaacactacctatgcaaataatgcttacacttggtatttgctattaaaccaaaatctcatacatccagcttcagatggcattcattcaagttcacaattatcaaaagcaaataagaaacaaggaaacaaggtaataggtgaacagttagcatatgaattatgaaacaagaatcaagcacgccttttacttaatcgccatgagttaggctcgtggtatctgtcgtagagcggctcaatacgttcttgacgtttgcgcttactcatcttcgtaggatcggctactttgaagaatcttggagccaattcaacaagccatttcgggtctataactgtgac

SEQ ID NO: 10976 - DNA, 566 bp, Cannabis sativa
cctttgtcagatgcatttggagacaattaatcatgtttttttctggtgcaatcgggctagacaggtctggaggaattgggaatcaaacattaattggcatttgtcaaaaacttgttctttctcagactttctagtatatgtttcttcactattgcaatcggataaggttgaacttttcatcactattctctggtgcatttggaaagcaaggaatgctgacactcattcgaagactcccaaatctgctatgcaaatttggcaatttgctaacaattatattgctgagtacaagaaggctcaatcttcccaccatcacactatcctcagcttcaatggttcacctgcagatgctcagaatatcactgctcctactggtgcaagttctcagcctctttctgctgcattttctcctgaaccactgcctcatgactttgttccacaatcacgggtgtccccagctaagcctaaatggctggctcctccttcaggcagactcaagttaaatactgatgctgctgtaaatgtcaacactggtatttttagactagctgctattcttcgtgact

SEQ ID NO: 10977 - DNA, 628 bp, Cannabis sativa
ttttttttcttcttgaagtagagttcctcttttaccctccgattttattttttttaccactgcaaacgcgtatgtgagaaaactaacgtatagttgtcgtgatcagctaaaattagtttaaaggtaggtgaatttcccgatgcaaaaagttcatacaaaaatcttgtgataattgataagtgatgttataaagtaatttattcattaccttcttttttatatatgttatataatcttgccaatcaaggaagaaaaaaccataataataataaaaagagatgggcaacttacaaaattttaggaaaattattttgaatattatttcttaattttttttaaaatttttaatttcggttgctttatgtgggttgcatatgaattttggttgcgatttaggttttttcgttagttgctatagagatttttgtgtaaaattcagtaaaaaatataaaaatatataaatatataaaaaatataaaaaattattttaaagtgtaaaaataaaataatatctttttattgtttatttaaaattataaaaaaaaaaaaaagaggaggcattgtgattggaaaaaagtaaattagtgaaatcacacactgcgctatgaacagattcttaattttcacg

SEQ ID NO: 10978 - DNA, 658 bp, Cannabis sativa
tatagtataaagttggcaaatatttcccaacttagacaaccttctattaaagaagagaataagagctcgtttggaatgccgtattaggccgtattgtattgtattatattgaactgttttttatgcagtatttttatgtaaaattatatgtggtattaacttttatggacacctaaatatataatattttagtataaattaaagtttaacatattattatataaaatatgatatataatctgattcaatatattacaatacaatacaatatcacttaatacggcatttaaaacgagacctaaatgagtaactaataatcatagtaaggttaaaactgataacatagacaaaaaagaaaaaaaaaaagtgatggagcaaacttcattttttctttttattggaaaataggataatctttcaatttttatatatataaaaaataaatttataaataaacttatttgtcattgttcctaattcattttagtctgtcaaacatgattttgtcgatttttcaagatcattttttgtttttatctattttcttgaataatattattcaattttgtcgttaaagtcattttccaaaattcatgtggttttacagttaaatgtcgtgttctaatataattgtcgttttttaattggaagtcgttta

SEQ ID NO: 10979 - DNA, 506 bp, Cannabis sativa
tacctcttttgcttctctgtaaattattatccacctctgaggcccgatcctgaattttagtgagtcattaacaaaaaaataaatttttatttagaaaaaaaatatataatttatttgaaattaataaaaaaaatatgtaattttaaagggaatttttttttgaccctaggcaaaagcctctaccccgcctataccaaaatcgagttgcacgtctctatatagagatatttggaataaaactattccatatttaagtttgtaaccggcaagctcattgatttgttttagcactaccaatgatactaaaggtgtaagtttatccaatttcgtcctaagatcatctccaatgcaatcaatgtttaaaattgtcataaaactccccatcactttaaaatataatattttattctctttcctccatattatttttggtcacctcctactaaaaaatattccaatactaagcaactctagaaattatgtctcatacactattatgttcttaa

SEQ ID NO: 10980 - DNA, 783 bp, Cannabis sativa
agttataacttttcttagtagttctacaaagttaatttgagattttttttttaataatttcttacaattttgtgtaaaactttagaaatatctgactatattcttgtgcagagatgttggccacaacacatttcatggggcggtaccaaaggagcttggcaacctgaagaatctaaatatgctgtaagctatcaaacctgatgtaacatcaactctttgtttggggctgaattttgaaaatcttttaatctgttaagataaatttaactttcaattttgataagagatatggaggaaatgctattagcaagttcttctgtatatctggtatgttcaggctaactgtaaggaaagtgaacttaaaagttatttttggaggatcgtaggtgctttttatctaccttatttccaaattgtgttgaaactctatgctgtcaaaacactgagacgctcttgcaaattgtggtttgcatattgtttgttaataatgcattgttggcaattatattgtcaaaattactcaagactgtgtcaatgcaagtgcaagtgattgctttcaaatatttattcccatttttcctatgctttgcagtgccttggggtcaaataatttttctggaccacttcccgcagaaattggtaatttattgaaactcgagcaaatgtaagtcccttttcttattttaagataaatgccaatctattcactttctgcaattttctccttgtttaaataattgcttttgaacttagtgttaattttctgtataatgaaacaactga

SEQ ID NO: 10981 - DNA, 681 bp, Cannabis sativa
agttaaatatctctattaataattgttagtttgtggtatcgttgtcttggcaaacttttctaatcacaacacttgttttgtgcctggctttattttgtgaatgtttagactttgtcatgtgcttatttatataccttctcaaacttgttttgtgttattgttggcattaaactaaagggaaatctgttgcccattagtagttttaatctaatattcaagattttgaaaagttttttttttaatggttagttgtgttgatctcgcttttagtcaacgacgataaattctaattaaagcaataagaataattaaataacaaaaaataaatagtataaagaaaagaaaacactaaatttatagaggtttggtcccttataattagtaatagtgtacttttttttttgttgtatttgtgagaagagtgagcaagaaggctctgatctctctcaaaaactcttataatgatttttgagtggttcactcttagattgaggtttcactcttgagtgttgtttctctgaattaattcgtgtccctaaatagtgagattaaactactatttatagggactaaatacatgaggaataatttctcttaatctataacaaataaaataggaaacttacatgtttccataattacaataaaaagattagaaaatttaagctaattgcctttatt

SEQ ID NO: 10982 - DNA, 588 bp, Cannabis sativa
ttctaatagatttttcagtatgatccttttatatatgtaaatagatcagtctatatacattgcatacaattgtttagtgtaggcgatattcataagtatatgttggaactatgtaaaattttataaaaattgagaattaaaatgcctgagtgaataaagtctcacataggatgaaaacactttattagaaatatatataatgtgcaaatttaaaatatgagttggggctctaagaggtattcaattttgtgcgcatggatgagaactaacacgcatcgccgtcgccattcgtgccgagttagcaagtgtggtgtcactttatatttttgtagaaaatttatttattaattattatttttacttaattaattaaacagtaaaaatgtgtttaattaattggtaagcaaagactcacttcgtattttcagcaacgttcacttgatccgttacacgatccctgtgatcagaaaaccgactttcttcccattactttattttgtgcgttcctatataatgcatcagaatcaatgatagaaaaatattccttttttacaagaaaaaatctgttgggctccgttcttccacctt

SEQ ID NO: 10983 - DNA, 705 bp, Cannabis sativa
gttaggttgaacttgctgataagctccctcacgtgcaatcactctgcatacatgagatgcttgttagagcctacaaacacatactacaagctgtcatagcagcagttgataatattgctgacttggctgcatcaatagcatcgtgtttaaatatattgctcggaacaccttcaactgaaaatgttaatgcaaattccacagacgatggaaaattaaaatggaggtgggtggaaactttcctttcaaagagattcgggtggcaatggaaatgtgaaaatggccaggacctaaggaagtatgctattcttcgtggattgtgccacaaggtagacaatgaacagaatgttttctgtatttgtgaggtcttttagtaatattagcaatcttcattaatacttaacaaacattcctcaggtgggacttgagcttgtaccaaaagactatgatatggacagtgcatctccttttcagaaatcagacatcataagcatggtacctgtttacaaggtgaatacacatttaactggttacttttacaatatagctaatgggtattcagttccattaaatttataataatatgcattaaatctattacttccttctacagcatgttgcttgttcatctgctgatgggcgtacactattggaatcatcaaaaacttccttggacaaaggcaaactggaggatgctgttaatttcgg

SEQ ID NO: 10984 - DNA, 674 bp, Cannabis sativa
tgatgctgagaatcggctgatcctagaccaacggttgaagaactggtttgatgaggtcaaggatactgtttatgatgcagatgacttgctttataaaatcgacactgaagaaatattcactatcaatcgcctttctcgtaagccactcatcaatctctgtcttccatctcctttcatttctctcaaagctttcaattttgtcagaactttgaaaactgagataataaagataattaatgaattaaatgcgcttcgttcagatagtgtatatcttggattgatggatatagaaaagccggcatttgcagagagtataattgcgccttctgcagaagaatcttatgtttatggaagcgatgctgaaaatattattgatttgttaagatcggatgataacatggccggtggtgacaacaaattaagtgtgattcctatagtgggtatgggtggtattggaaagactgctcttgctcaagctgtatacaatgatgagagagtcaatgaaatgtttgataccaaagtatggataacagtgggagatggagaacttgattgcatgaaagtgatgaaactaattgtggagaaagtcactggtaaaaaatgtgaatttgaggagccttatgaacttgtagatgaagtaaagaaagctctggataacaagaagtttctctttg

SEQ ID NO: 10985 - DNA, 716 bp, Cannabis sativa
aaatttttatgtaaaaactatagacattaatgtatgtagagtcttaaaaaagttaaaactagtgtgagtcattaattgtaagtcttgaaactatagacattaatatatatgctattgtaagtactaatcaattatcaagaaaaaaatgagggtggcttaccattaacgttattcctgttgaagagatttaaactaaaaaaattgaggaggtagttagattgctcttgaagctccttttgttgaagagtatggaagcaaacttcttatgagggtggcttaccattgatgttatttcttcttaaagaactctggcagcctactgtgtttaggtttgtgtgttttactcttccatccaagcattaagataatggttgatccagcccttagtgcgttatttgaagactcagttcaagtatctacaaaagacattacatgtgatcttcatccaaaagaagttgacctcctgaaggaaccaaatcgggttttgttgggtaaattagtttgtcataccaggctggggaagaaggcaatccaaggatcactaaacaatgcatggagttcaatctcgggttggagctggaaggagtgtgatgatggtctcccgcagttctccttctagataaaatttgacgctgacaatgtcttaatgagacgcccatgactggtgtgtgggtatcttttggtcctgatgccatggccttcatggttaactacag

SEQ ID NO: 10986 - DNA, 644 bp, Cannabis sativa
gcatgcgagtggcctggtgcctacgagcgacatgtggcttgtggtggcctgggcctgcgagaagcctgatgcctacgagtggcacagcctggaagaggcctgatgcctacaagtggcatggcccgtgtgtggcatggtctgtgagaggcctcaacaagtgagtatgtcgttgaaccatctcgtcatggttaatctccgaaagcgagctttatcatcctctcgaattggcctgggcaaatcctaaaagttagaggtgctaattttggaagttaagagacaccagcttgacatacattatacataaattgagttataattttttcaagtacaaaaaataaggaccttcctactaataagtgaatttttcaatatttattataaatttgaatcactctttacaaattatattggacattagaaatgggataattatatttatttcccatatatacaccaattatttattgccatatattttgcatctacaaaatacaaattattagtagaagacaatataatcttgttatattttgcataaagtcatttgttggctcaataggtgtcataacattatttaccacccaaaactagataatcttaaagaagaataaaaatgatcaagaatatatatacatatagtcata

SEQ ID NO: 10987 - DNA, 825 bp, Cannabis sativa
ctgagtaatgtattaggatttctacttgtatttaaaatttaacccatttggtgaaaataaaataatgacttttgttgggtataagagtagttgtctttgactctttagaacaaaggggtgtcccttcaccattttcatttggactcaaaagttcttagatatttaaggtttgttgttcacattggtaatgggatgttgcagctgctatctcatgcttggataaagcaataaacattttcatggacaatggcaaagatagtatggctgctagatattgcaaggtaattccttttttttttctttttttttatttctcttccttttagttacatagcaattttaatacatttgttttatatttcatgaattgctcaacttaattatttcacttggatcttgtaagttttcattatttgtgagcttgtagtatatgatatctttgtcttttcttaacggacatagtttttttattggaattttaggagattggtgagatgtatgagcttgagaaagacaatgaaaaggcaatgttatattttgaacgagctgccgaatttttcgaaatgggaggaggagcaactactgcaaaccaatgcaagttgaaagttgcacagttttctgcacaagttgaacagtatgctgtgacctatactactctcttatttagtcattcatgtaaaaccttaatagatattgaatagaataatgtacttgtacatttgttaaatacacatacatacaagacatagttatacacatacacaaaagataccatctcttcttcactctttatcttcctttttcttctatcttggtttggaattt

SEQ ID NO: 10988 - DNA, 544 bp, Cannabis sativa
  modified_base (489)..(494): a, c, t, g, unknown or other
taagttattcgtgttatataatattataaaccaatcataataatcatcacaagctatatatatagcgcaatatttatatatgtataatagtgtatgtggtgtgcgtttcataggatcgatcgatcgatgtcatgtcaaaagtgaaaggtagctcttttgtgagaaatgaaactatatatgtataaaaacaaaatactatatatatatatatatatgtaattaatacttatgatatattttattgaaaaactctatcatgcaacccctttaaatagatatattgatgcatttctatctattttagcatctgaaataattttttagtttaattttttctcatggtcatgtaggttatagttatttaagacatcttgcaaaattttaataaatttgaaaaaatttaacatgctgaaaactatattcaaataatgtgttgcacgcgtgactattttattttatacgcgtgtaaaaaagattgtttgaacattnnnnnntatattgtaaattatttcgaattatttaaaatttggtaggatatcttaaa

SEQ ID NO: 10989 - DNA, 565 bp, Cannabis sativa
taaggcagttcaatgaaagaactgactgtcagaagaggtcaagatttgataagagatcctttcaaggaaggctcatcaataagtcaggcaggtagacaatggacaaacagtcaatccaggctccttgaacacgaggatagacctttgcctacatgacaacagtcaaatcttaccagattgactgtatggcataaacaaccagttcttagcaccacgatgcattagaggacgacaaaacaactctgaagaggggatattgcttactagctaggcctggccggccaacactatgactctctcttgaagtatccgagaacaagttgttccaaggtctaaggaccctattcttggcaggcttgatcctgggataaccgacaacacacgagacaataataactcgatgagtgagacttggaatgactttgttccaccacagaacaataatttcaggcaggtagatctaccaaactcaaaaaattggtacgatcaacctcccattaacccgcggagcgacctggccagccaggagaatttggctagtttgggcggccaaggaagtgtaatc

SEQ ID NO: 10990 - DNA, 513 bp, Cannabis sativa
cgtcatctacaaaaagtttgcatgctgttccaatggttgggaagccaacaagctgcattcaacgttaacccgcgcccatcaactggagaaaattattactgtcgcggggatcaaaccctccgatttgggggtctaccatcgcctccctaggcacggagagacgccaaaccataactacaacggcttcaaggcatggagccagacccatctgatgtccggggccatgcttcctctccaggattatttcattgactttcttgtcttcattggcctttcacctaaccaattgatcccacaagcttatcgcctgttgtcagacttgtatattttctatgtagccaggaactgggccccgcccagtcttgctgaaattttgtatttttacgaacttctttcagtcccccaaaaggggcacaaatttaaggatggtttttacaaactccaagcccatccggccaatgaaactctggtgcccttcatttttcaaaagaatgtgaaggagtactgccacag

SEQ ID NO: 10991 - DNA, 528 bp, Cannabis sativa
tctattgtaaaacaaaacttggatgaaaatgtctaaaataataatatttaccatgagtatttcagtttacttttcaatgtcttatttaatatttaccactcattaatattttttcttaattaaatagtttcgatcagtttttatttatttaattaatttttttatgataaattaagtgataaccttttttttttcatttattttttcttattcttgtttacacatttttattttcataagtagaataatgtctgagatgttatggatttttctatttattagttagttaaatgaaaaattgcattctctttaaagttaggtataatatagttaagtaaattttaaattttaaattttaaagttaggtataatattaaattttaacatttatttaaaattaaaaattaaagttaaatatttataccttaaattactcaaattaatcctaatgcactcactttattccatcagttccctctcaatttcccaatatatataaataatgccaaaaatgaaaaaaaaaaaaaa

SEQ ID NO: 10992 - DNA, 737 bp, Cannabis sativa
taccaatgtatttatagagatggatgtttgaatacatttgatcatctcaatacagtattatatgtgctactagtccatgtgcatgtgcatgtgcatgtgcatgcatttttatagtaacgtaaggaacaaaaagttttttttagtattatgagatccatctaacaagcttattcattctcttttcttcaataacttttaactgctcacctcaaaatacaaatatatataaatatatatatatatatataattataacactaatcccattaattaattaattggttctttatttatcgagatctcaaactatttatttattaattaataccctaaatagatatatctatccttccatctgaattcattaattagttctaattaaaataaatgcttaataaacacaagcaactctactatactagagttgataaaacacacaagaattttagcataaacgattttaacttataccagttttaggaaatttttaaataattttgataagttttttttatccatatatattgtttacaaattaaatagatttttgaaccctaaccatatgcacaaattattcaaaaaataaaaaataaaaaatttaaaatgggtaagagaactcccaaagctaggggtgcacatttacacctaaaaatccattcacccaacaaacccgccaagcccaaaacttgaaaaaaaagtggtttcaattgggaaatttcaatttttggccttaataa

SEQ ID NO: 10993 - DNA, 1045 bp, Cannabis sativa
ctttgatactcaaagcgcatttatcctaagcgtctcatctcagataatgtaatggttgattttgaagttatgcactacctgaaacgtaaaagaaaaggtaagaaaggcttcgtggctcttaagcttgatatgagcaaagccactgatcgagttgaatgggattttttagggcggttatgcaccgtatgggctttgctagtagatggattaatcttgttatgacttgtgtctccacggttcgttacaaaattgtacatggtggtcatgtgttggagcctatttgcccatctcgtggcattcgtcaaggtgatcctctttcaacttacctcttcattatttgtgttgaaggcctttcagctttaattcagaaatttgaagcaaacagactcattcaagggtgtcgtgttgctcactgtggaccctcaatcacacatatgttttttgcagatgatagctacttattttgccaagtgacaagaggtgctgctggtagtatctccactttacttcaattatttgaaaatgcttctggccaaaaaattaatcacttaaaatcatcgatcttcttcagccccaacactgattcttcaagtcgtgttcaggtttgctctactctccacatgactgaagctcccgaaggaagcctttatcttggcttccctaatattattggccgtaataaaaatgtcatgattggtttcatcaaaattaaagtcattgcttgtatcaacaattgggatggtaaatttttgtcttgtgcagggaaagaaatccttcttaaaatagttattcaatctctgcccacctatgctatgagtgtcttccttttacctattaatcttgcaatgaaattgaaaaattaatgacaagcttttggtggaaaacctatactagtaaagggtgtggcatcatatggatgtcttgggatcgtttagccattcccaaagaagaaggaggtatgggatttagacacctccatgattttaacctcgatatgcttgcaaaaaaaggatggagtttattatgtaaccccgattctcttgct

SEQ ID NO: 10994 - DNA, 666 bp, Cannabis sativa
aaccgctcttccgatcttgacctagccttctgtgccaagtatcctttagggaaattgaaactacatttctggatggctgaacttgagaggaataggtgctgatatgagattggtggcaggtattgaaacgggttgatggtttttccagctggtagagtccatctttatgcactcctctcagtatcaccttccctgtttgatccttcacacaacaaaaaccagcaaagaattcaatggagacattgttgtcatgtgttaatttcgaaacactaatcaagtcttttgttatggcagggacatgtaaaacatcctttaaaatcaaatgagaattagagagggtgtctagtttactgcgtcctatatgagagatgaccagttgactgccatctcctatagtgactttatccttaccaccataatcgctttttcctgtcatttttccagcttcagcggttagatgattacttgccccactatcagcataccagccctcatcatgaagaacttcaggtgttgcaaccatggcatattgctgctgcttgtcttgagaaggatctgtgttaggagggtgcccagtataggtttcatcgtacctattatagcaaacagcagcagaatgtccgtactttccgcaaacttgacaggtgggtttggagttattgttgc

SEQ ID NO: 10995 - DNA, 511 bp, Cannabis sativa
atctctcaagctgtcataatactagatttggatgaaactgttggaatattatatagatacacttatagaaactgaaaaagttattcctaatgttaaacacattgtggactgggattctttctagtgcaagtgatttgataattatcacggtcgtagaaataaattttattcccatttttaagttattgaaagttttctttttcagtaatcaatttatttttactaaaagatctcaccaatgatcattcatagagagtttgttgagtttgaacctaccttgaactatataagtttgactctagctagtatatgaaatactaactaaccatgcttctaaacactaaacaaatgttatatttatctaatatttataatattgtaccaatttggtagagtacacttctttactgtaatggtatgagtgtacacactctacataaggacacatagagagttttggtgtttatttgtagccgatctcttgtagtttttcaaaatattataattaaag

SEQ ID NO: 10996 - DNA, 559 bp, Cannabis sativa
gcttccttcccctgctataaccattccaagcaaagtactgatgttgtctctagtatttgaagctgtgttggtgctgtagaaaattgaagactttgaaaaattcactttttgcccagacgctgcttcgaacttgtgcaagatttccttcattcttgaagcttccaacatagtggctttacaatacagataactgtcatctgcaaatagcatgtgggaaatgcgaggagctccattagaaaccttacaaccatggatgaggcctcttctttcatacttttggagtaaggccgacaggccctctgcgcacagaataaagaggtacggagacaatggatctccttgtcggataccccgagtgggaacaatcggtccaacctcgtgattaccatgaaccaccacatatttggccgaagttacacacttcatcaacaaccgaatccaccaatcttcaaagccgagtttccttagcattgcttccaagaatggccattcaatcctatcgtaagctttactcatgtctagcttaagtgccataaaaccttctttgcctttccttttc

SEQ ID NO: 10997 - DNA, 651 bp, Cannabis sativa
aagcaactctagaaattatgtctcatacactattatgttcttaaaatttacattttaggcatattaattttaaattgaaatatattttaatgacatggcaatatattattgtatatgacatttattaaagtatttttataattattttacaatttatgtatattttaaaaaaaaatccctaaacaattatacaaatattaatcagtgtctttacatgtgtgtacacaaacttagaaacaaaatctgttgggagagaattggacgaaattaaattttaagaacattgggtagttttactgttaaaaaacagcggttaaacattgtgtagttataaaacaaatatttctctttttttttggtgaataatatcccttttgtatttgaactcatcttttctaatgctttttctctgttttgtttttggtctgatttcttactaagtaatttagttgaacagaagctattatctaagttttactttcttctttgttgttgtagctgcaaaaattaagaacatatataaatgaacaaaaaagtatcaaagtgacttcatccaaaaatcatttataattcatgtgatgtgttctttattgtcgttttaacagtattgtgtgtgatgatagacattccaaagtggtggggatttgatta

SEQ ID NO: 10998 - DNA, 507 bp, Cannabis sativa
gaagtttctacttaactgaactagatccgagataagtaggtatatatattcagtgttgtgaattactgcaaataaggttaataacttaaagtagaacaacatgaaaaaacaaatttcggttaacacattaatactaacttcagaagaccatcttgtacttatgggcaatccagccaagtttacaacaccatctgaaccttgaatgcagtctttccactctacctcctctgcaatccttataccaggaaactcccttgctacaaaaaccaaagaaatcttcaataccggatacaagctttaagaacatgtcaacattggctacatatctcaatgcaagtattgggataaacaatatcaatcattcactaccttcttacccggaaaaattgactcagctttagttctagatcgtgtcaagacgcgaacagtatgattatctgcatttcacaatgatcaaaagaaaactgaaagtaagcttatctgtatatacattcatattatctctaa

SEQ ID NO: 10999 - DNA, 552 bp, Cannabis sativa
atatatatatttataaaacttattaaactaacacagttaaatttaacaatcgtaaaatagatacatcaatatatgaagataaagatatattgattaaattttctttgaatcttggatataaggagaaagaaattaaaaagataaagatataaagattcttgctttcaaaaataaaaattaaaaagattttattttcttatgtttagattgaatatataaattaaaaattttattcttcaaaaatcaaaacatgatgtagtataatttatgaaatttgatcaataaatatatagaaaaacaaaacaaaaggtctcaattatcaaatttattgaaaatattttgcttatctttttctcataaaaattttcctaagtaaaatctaaggtccaaacaaaatctagaaaattctcatcaataatttattttctttcaagaagttcttgcaaaaaaggtatttttttttagtcttaacgaaacatgtgaaattaattgtctattttattgttatattacacgctaattaatgaatttttactgttattttatatatat

SEQ ID NO: 11000 - DNA, 637 bp, Cannabis sativa
aattttaacgaaatctttcaattttttattttactatatgttcttctttttaccaccccagatcgactctttggtcttaagaatactgatttcacgaatgagtgattgtgtttgcccttctccgacctttattgcccaacccgaaagcaaacaaccgttttcacaaaattttttgatgaaaaaaaaatagagtttgattctgttaacttaattgttataaaagaaaatgcttaactgttttaaagttatttaattaattatttttatattttgtgataatattattagggcttttaagatgtgggaagagttgtagactgaggtggattaattacttacgcccagatatcaaaagaggaaatttcacagcagaagaagaacaaaccattatcaacttacaccaaatgcttggcaataggtaattaattataattaattatatcatgttataatatggattaattagccgcccacttacatcttccacttttctctttttttattggtctattaatttatatgccatatcttaatccaatcaatttagaaataagagtcaataaaaaaacaaaacatgtttggggaaaataattaaagtgtttttagatattttttaatggtggggtagaattaattt

SEQ ID NO: 11001 - DNA, 900 bp, Cannabis sativa
acctttatatatataggtcgaaaagagtacaagaactggcacacaaaataacagaaataactgtcaatacccaactgtattaacaacctaactaatacttacaccagtaaataaacctgacaagtaagatatataattataacacacatttttttaacgggaattacgtgcttgtggcacatcctccacacctatatcatgtatattaataacatcgtgctcagtaccttttatgagtttcaattaaattacgccttatgatccttttttatttgtgttatcgattttcttggttgacataagtaatttaaatttgagaataatactatgtattatatgtttatgacttattctctacttttaaaaaagatcattaagtgatcagaaaactaacaactataaaataatatatatactcactacaccaaacaccatatcaatatatgataatcgaaattaatgtttgaaatatatatgatgcttatttttggacatgcatgttcgaagtttgctggacaacaaaatgttggtatcctatgccgtcaagttaagcatatataagtaaatttctgttttttttttaaatatatatatataatactaaaaataattatttaattataacatgtataataaaaaaaaattaggcatactacaaaatatttaaattttattttgtattaaaattagataaatttacatattattttttaggatgttttttttaatagtttatttatagttgtagtcaagctaatttttcaagcatctttaatatgctctctaaacacattctttagctaaaatatagagttagttttaaaaaaattaattccaaccatgtaaagtataatttcctattataaagaatagataggaaactctttttttttttttttt

SEQ ID NO: 11002 - DNA, 622 bp, Cannabis sativa
  modified_base (80)..(85): a, c, t, g, unknown or other
agacccggacccggaccccaacctcgacctagacacggacccggacgcgtagttggtgttgggatcgagtgtattaaaannnnnntataactttacacaatcaattaataaaagtcaataccaaacattgtattgtattaaataatactaatacaatacaataaaacacaatccaacacaatacaatacattacaatacgacataccaaacgagtccttcatttcttaattttaatcaagtaagtaaacaaatataagagaatgactaccttatcattgattctcatttctcattacttattagtaaacatgtcattagtaatacatttcttcagaaagagtttcttcacaacaggagatagatagagaagacaatgaatgcatgataaccatttatacaggaatttataggaaaaaaaaaaaaaaactgtaaataaatcgttggatggtggagaaatggagcaaggattgaaactaaaaatcgtgggaaaagtttttagtgagaaatagatttttgattgtggtttcaaaatgaaaaagtgaaattgaaaaaaatatgagtaaaatttgagtgtgatggttacataatgacatcaccgtgtgtgtaggaggtatgagtaag

SEQ ID NO: 11003 - DNA, 536 bp, Cannabis sativa
tggttgtacacctctttgagcagcatctgcaaccaacaccgaaatattattatgattcataaaagaattcaaatattacgcatgtaaatgattcatcacgagtgagaatggtaaagtgacagtacaattgcggagtatcgattcgccagcagcagggaatctgagaagccaaagtgcactattaggtactcgcttaaggatgttgcacctgcattaaatgacatgaatcattatagttattgctgtgattattcaatcgattcaaactttttatgtcaataacaaacaatcaaccaaccatgtattgaaaatatcgggatccatcttgtatagttggttaaaacatgcgaaaatgaatttgtcctctggtaagccatagctagatctcttgggttggcagttcgggtccaaaacatcacaatttttctgcaaaggaatagtgaaagtagtcatggcacaggtgcatatgataaatataaagaaagaaatgcgaagagaatatttacacagagacaaacctgcttgtaatcatttac

SEQ ID NO: 11004 - DNA, 517 bp, Cannabis sativa
ttaaggtcttacaattacaaattcatggagtaaaaattttaattcaccttatttattaaactaaaatgtgtggaacaccatacaccaataacatattatgccactttttggaatgtttgatactttaaagtatggtttagcatttttcatttagaaaatattagatgaaagtatatagatcattgctattaaatattaaatatcaatttagtttgtaatattctttaaaattagatgaaatcctatacttaatttgtatttacgttattttgaaataaataaaaggtttgtgcatattggtttagggttgactaaaaagccaatcccagccgtcgactcgtgaaaggcagtatcaagggtcccactcccacctcatcaacccaacccaaattgcctaacgtaaataatttaactaaacaggtaaactatactcttatattacaccctctataaatccacattttgctacttttatttgtttcacgtagcattcaacaaaggtttttttttttttttt

SEQ ID NO: 11005 - DNA, 506 bp, Cannabis sativa
tttccctattaatattattagtttccttgtttcaaaataataaaaaataaaaacaccagcgaaaaataaagtattataaattaataatatccacgcattcgtgttggtatagtagacattacattacacataattaatattatattattagttattttggcaaactatatgtcatataattttattattattattattattatttatggaacatatcatatactttatttaattctggaaaaactaagtccccatgaagatgaagaaaataaagaagacctaattaatacgttacatatatataaataccaaaatgaatatataccacatagtttcactatatatatatcggtggaaattatatagtttttcttttaagaaaactgtgacatgggacaaataaatcatacttcttattttttaaaataaatttataaaattagttaaaatgtatgtttagatattacatatattattattcatgatattaacataaattttaaaat

SEQ ID NO: 11006 - DNA, 560 bp, Cannabis sativa
ctggtgagtacttagttatcttatatttacaaatgaagcttttgaagggaaaaaagaaataagaagattgattctgttaccagtgttttaatgagttgggattataacgcatggttgtttttgatcaataggttagagtttctgctgtgcttacaaatgcaccattcatgttgaatctggattgtgatcactaccttaacaatagcaaggccgtgagggaagctatgtgttttctaatggatcctcaattgggaaagaagctctgttatgttcaatttcctcaaagatttgatggtattgatcgtcatgatagatatgccaatagaaacacagtgttctttgatgtaagttatattaataaattcagtgtgattatataatgtggttctatggtattcagctcattgtcttgtttctttcttccttcattttagatcaacatgaaaggtcttgacgggatccaaggaccggtgtatgtcggtactggatgtgtcttcaataggcaggctttgtatggctatgatccaccagtgtcggaaaaaagaccaaagatgacatgt

SEQ ID NO: 11007 - DNA, 781 bp, Cannabis sativa
attagcaaagtaaacttttatcaagtgtatagaatttacattgggctggactaatattgatagttgaaaaaatatcataaacttactttatatgttttctaggtcaatatcatttagttgattttagatcaatttgatctcaattctacaaaaaatagctacttttagtcacaacataaattttttatgactaaatgtaacttttagtcataacaaaatattacgtacttgtgactaaaacataacatttggttacaagttgtcactaatttagttttagcaacaataagtattgtgactaaaaacacatttagttacaacaaattgtaatttttgtgactatacatttagctacggaccttttagtcacaacataagaatgatattttataattagtcacaattttttaattttagtagcaaattttattgtgactaaaaataaaaatttttgtagtgtaaaatgattaagctttaaactaattgaattacttgagttctttgatttgttcgtagcttactcatcagtctagctaaaacatagttattttcatgtatgcacacatgcttacgttgaaggagagtggttccacaagtgatggaattggaacctactggttttttccctgcagaattttggtatcagcttaaattaattactttgatttttaatgagcagtttctatgtagtataaatgtgtgttagactccttaccttttgatgttttgataatacaaaaaaagtatagatgacttaggcagactcagcatgtacatctca

SEQ ID NO: 11008 - DNA, 515 bp, Cannabis sativa
caacagacccatcagggcacataattctgttatctgacttttttatttatttattaatttattctgtactaaatgtaatttgataactaaatgatgttcagatcttgtctaaaatattaagttaattaatcataatagtttatttttaattagaatcaattcggaattatagttattggtcatatttaaacaaggctaacatagataaaaaaaaaaggaaaaaaaagactaaacatttagtagtcttgttaatttattattgtgtcttgtacatttctgtttctcatagatgagcaaaaagtagttctaacggcaagaactttattcaggcattcacatctttattaaaacaaacaataattatttaggaagtacatggaataaaattctagttgggacgggtgcaatcctttcgaatttcgccttgtttgccagtaagaacgccaactctaccaagcttggtcatggcttcagcgaaggccttgttgaaggctgcagggctggaagcgaagctg

SEQ ID NO: 11009 - DNA, 1619 bp, Cannabis sativa
  modified_base (861)..(866): a, c, t, g, unknown or other
tggtgtagggcatttattcctacaaataccttttgatttttggttgtgcaatgatttatattagtagagaatagtaagtattgtaagcttatgggatatattgggtttatagatcgatggatgtaatttgcatgcataaattgtttcaattgttagttaagtgctaattatggtttcgtgaacaaaataaaagattgaagtgagtcaagggtgtgattaatttaaaattttgaattaatatacataggtgtaatttttcatacatagccatgttatttggcttacttgaaaattacccatgtttcggttgattgacttgtttcctttaagctgtgttatttttagttattagtgctttactcgagagtgagtaaaggttaagttgttagtcccaagcaacagcgccaaaaaacttattgtggtattttcaacacacaagtatatgtatcgttaacaagttatagactgacaaaaagtaaggtcgatcccacaaggattgtagctaaatactttaaaattaacttttaattctatttggttgttcaaaattaagaaaagattaacactagaaagaaaaaacaataaaacaataaaataagaaagcaacatgcaagtgaattgatatgaaaattaacaataattgaaagttagggttattaattttaattgtatctatctattatggtctaatatgattcaatttccattactaatttctaagtaatagcaggtttactcaagtaatttatagtcttctcaaatatattaatgtcaattacatgcaaattttttactttcgtgataaattaaacatgtaaaaggtattaaacagaaaaccctataagttatccaaaccacatnnnnnntctcgtcctatatcgaaatttgttcctatttcactatagcataattgacactcactttttagatctcgtatcaaaatcataaatatttatttgatgctcagataattaaaagtaattaagtacgaataaaatagaatacatacaaaattggagaagaattaaatcagattaaaactataaatagatgtcaaataatatccatcaataccctaatactcttgttcatcgtaagaacttgacacatatcaattaagaacaaaagaaaaaattgagaagaagagaatattaaaaactccatcgaaaaagccttctcggtcgtttctactctctaattttcgtactatctgaatgcttgttgaaaaaaatgaaagtccgcctctttttatagccgaaaaaagatatgaaaaatattaatttttttttattttttctgagacacgggcctcgccactagatttcagtgccttggcataacaccttaaatttgggcagcaagcttactgataatatttttaccataactcttttaatattgctcacaattgaacgattcaatatgttttggaaagataaaagtaagatctagaacttttattcataacattattcctcaaagtgagtgcatcatagttaaaaattggcttgaagatttagactttgattttcgatcacaaacagaatgtgttgagcatctaaaacttaaaaaatttcaccactgtacgtctccactatccacaaaatccctgatagtat

SEQ ID NO: 11010 - DNA, 811 bp, Cannabis sativa
gcttagccgaccagacctacattgggtacgggctggccgcccagttctccttcatggtcggctatacctgcaaagggcaaagtttggccgcccattatgcctccatgatcggctagacctgccttggccagggtctggctgcccgcgactcctcgattgactgttgttggttgtgtattgatcaaagatacatcacaccaatggttagagtttggtggatctaaatgcctgaagtggtcaatttcacttcttgaatcaccatttaaggtgtttccacccagtctcggtcctcgtgagtcgaagatcgacctctgtgcacctcgatctgcttagggaggaaatgatgtaccctggccaaccatgggttctcctgctactggctggccggttagtggtattacaatggggattgctgttgagccagagatccctggccagcccccaagccactagttgccgggatttggctgttctcgccgtttgacctttgagcaaaggtctctcctccctctggtaggggaagattcgtcctagttcctaaggaacttgacgacaatctttcttgaagtgggtccctaaagagatcttggcctcttttgtcggttctctaattgaaccgtcttattagatcactggcctcccgagttgtggcgatctagttctgcctggtgagatcaaaggatgtacttctggtcatccatccatctcaggaattcgcgtctctgctgagcaaatacatcacaatctgtagcgcgtggttcttcattcagccctgcacggcctacaacttccctgagtctagccaactcaa

SEQ ID NO: 11011 - DNA, 528 bp, Cannabis sativa
taaacttatatgaaaaggaagtactgaacatttccatacaggcaaggtcctagaattaggtaatcacacatgcatacatacgttaatagagaatagagattgatatataataaatatatatgaaatatatatatatattgatggagaaagggaaagggagaggtgtaatgaacttagaagatgaagtgataatgttgctgccagccagttttgaagaatatttagagaagaatgagttgaaattggattggctggatgagtttcagaaggacaatttgttcaatctttggagtaaactcaaggtagctgaatgcgatactattatttccaaagccaactttcattcccttttattacatctcaaactccagatctatcaacaattttagtctaccttctcacttttactattttgtttttttatttaatatatatatgtatttggacaacctttaatttatctgcatatatatgattctccttttttttagtggttccatcaattaatatccaattaaaatactaaaa

SEQ ID NO: 11012 - DNA, 722 bp, Cannabis sativa
catcttgtgacttaatgaatgcccacatcccaaccttctagtatgaatagttcaaaatattcaatagtagaggtcatgatatggaacttccttcttcaaagaaagacatctcacacaaaaataaattaaaaaaaaaataatctcaagatctcactaagattttagtaacttgctctgataccaattgaaattttttattttatgattaccaacttattatttaattcaataattaattaaaagcataatgataaagttggtactgaaatagatattctgtagctaaagaccaaggttttgtaactacaaaccagaaaaccattaaagaactaaactgttgaaaataaaaatacacaacactggttgcccagtcgcccctttgggactgctatggccggtcagcccctcacagcagcatccaaggccagccagccacatgcaatatgcctcatggccagccagcctgtaaagtgccaaaaagatgaatagagcttaaagtacatcttaccaaagaaatatcccgaagaccgatagattagagcttgtttggctcaccatcgccaaactccttcagaacctcatccatgaaggggagagctctctctatacgcctgttggcttcctcaacaaccttctgctcattatctaacacaactcctctaataggcctccaagtaccctagcctacaggccgtatgcaggctgcccagcaggtgcagacc

SEQ ID NO: 11013 - DNA, 612 bp, Cannabis sativa
tgcctgacttcagcctctctctggtgaagagttgggttgagcggatcctgcctcaaactgttctgcaagtcctctaattcagctcttgcttaaattgtctctgcctgtagatctgtgtacccttctttgttgattgctttgaaaactttttttaactccttaagctttgacaccacttgaaacatttttgttccagtgtaagttgcatcccacacttctctaagctttctatcatactccgtgtcggatctccacatccgaaaatacctgaatggtttcttacctgattgagtcacggggtgtaaattcagtataccaggtgaatgatcaaaagtaccctcatttgagaaaagaacctcagttgtagggtatgcatccaaccatgcttgattagccatcatcctgtctatttttgaaaaaaattctatcttccctgaactgtttgttactccaagtgaagaagttgcccgtatattttatgtcttcaagagcatactgctcaatgcactctataaagtctctatcagcatggtatctaacacgatgcccaactctttcctctttagccaaatctcattgaaatcccccattatcacccatttctcatttgtt

SEQ ID NO: 11014 - DNA, 516 bp, Cannabis sativa
tgtaaatgctcctcactcgaacggctgtataccagaatgtcgtcaaaaaaaaaaacagtgacaaaacgccgtaaaaatggctgaaagacatgattcattgctgcgtgaaatgtggaaggagcattggttaacccaaatggcatgactacaaactcgtagtgaccatcatgggtccgaaaaagccatcttgtgaatgaccctcggatccattctaatttgatggtaacccgctcgaaggtccagcttcgaaaaaactcgagcgttgcccaattcatctagcaattcgtctattgttgggatagggaagcggtccttgatggtaatgccgttgagagccctatagtccacacaaaatcgccatgtcccgtcctttttcttcactaacaagaccggtgatgaataagcactagtgcttgatcgaataaacccacatgccttcatttcttgaatcaactgctcaatgatatccttttggaaataagggtatctatacggtcttacattaatgggagatgt

SEQ ID NO: 11015 - DNA, 681 bp, Cannabis sativa
attcataacatgctaaaatagtcagcacataaaagtgataaaacctcagagaaaaaaggaaagactaatatactaaccactcttgaagaaaaacaaatatcatttcaaatgcatcttttggaaggattacaccaagctcctcctgaagctccctcctgaaaccacaagtcacaatttttcaggaacaagtgtatccataaactaacccacaaaactaaagtagtctttcaacaatctataacaagcgattggttcctaaacaaactcacaacaccgtataattctttagttagattggcaaagcaatttgaggatacagcttttttaattactctcgactagaaaaacactttgtttagtagtacttagtttttctttcttctagcttttgtttgtaatttttttccctcctcttgttttcattttggtcttttcgttcacaccaacaaaagttttgtttcttattcgaaaaagataaaattatgatcaaagttgacaatctataacagacacaattttttttttccctattgttctaacaaagttagcaattttctcacctagttttttgtcaaaagtattaacaaaaaaaaaaaaacagattttgaaatcctatccatttcaaatgattcaaggaaatttggtgctagataaagttattaccgagctgtaagaagcgag

SEQ ID NO: 11016 - DNA, 1420 bp, Cannabis sativa
aagctttaagaaaagcatagtttcacttctaatggaagttatagattttatatctgtgattaacgatcctactcaattgtactaccgaattctcaagatgtaagtatgggctagtcttacaagtaagctggtaacgaacaagtcaaagaacccgtatagtaaaattaagttagaatttaaccatcttaggattgagatcaattgacctaagattaattaagtgacattgacttagaaaagacataacagtaagtttatgatatctttttcactatcaatatcagttcaatttgatgtatagtcgatacatctgatactagtttactttgctaatgacctgaaaaggacattccacttatacaagtgtaagtaaaccacatcattgattatcacacgtcaatataaatccagtgcactgataaatcgtgggactaaatagtttgaagcatataatcatatgattattttccattatatagacaacattataatcatgaataactatatgttcaggatataatagaatttatatattaaacatataattatgaaagttatcatgttaactatgcaatatatttatgtccaacttctaaggagagtaatttatgatttagacacctaatttaaaggaggtttctgtaatattatctttgcgggttctacatgtttttttttttggtaaaatatgtcttcaatattatatttttactcattgttatataaacattgacaactttgtttgttaatttatagttgaaattgagaaatttatgtccagcttttaaggagagaataatttatgatatagatagttttttctaaaagaaatataatatgttcatgatgataatcctttgcgagttgctgatttaggagatgatattttacagagaatcctcctaactgtgttgctgacagtttttcatcttctatgcctcctacacctcagtataattggaatgagttaatgtaggtaaaaataataaggaatcaagaacaatccttacaacaagtctaaaaaaaaatcaactagagtaacccttacaaataatttagcaacccttttgagcaccatgtaaaaataataaccaaactcatctaacaatctcacaaacaaatttagcaacccttacaacaacttaatataaaaacaaccaaattcagcaacatgtgaagtacacccaacccaaacacaatgcaaaaacatgtaagaaccaatcaatcaaaatagagaacaaatttagatttacctataatatcaagaaccaaataatttataattttgaatgagatttttaagctttggatttaccttaagctgagatatgaatggttgtaataaacttctaattcgaaattccatagttaaagttgaatggctagaaataatattagcataaatccatagtttatacaa

SEQ ID NO: 11017 - DNA, 669 bp, Cannabis sativa
aaaacaaaagaaagtaataaggaaagatagatgattatcatgatggccttcttgaagttcttcaaagcaagtaaaaaaattgttggttttgtaaagcccatgtattttttgtttatattttatttggaatttaaaataaagtaatttgaggtataaatattaagtttaattttggataaataaatatttaaattattattttagaatttttataggtatttaagtaaattatcacttgtcaattcttaatcagtccaagtcattatatttttactttttgtttaaaaattaatttaaatatactaataaaaaataagacgtggataataacttgataattaacaactaagtatttataaaaattttagaaatataacttagatattattacttaaaaaattatttatatatttatctacaaccaaaaattaaacttaagtatttacacagtaaattactctttaaaatattagttaaattaatttaaatatactaataaaaaataacatgtaaataataatttgacacttaacggttaagtactcatgaaagttttaaaaatataacttaaatattattactgtaaaaattactaattaattagcaatccaatagttaaatttatgtattcacattacaaattagtctttaaattaaaataataataat

SEQ ID NO: 11018 - DNA, 511 bp, Cannabis sativa
caggcctcctaagggcatatctagaggtaggacgcaaaggatgacaccagaaagcctaccacaaatcgggagcctaatgtctactgcaaggtgagtaccaaatgtcaactgaaagataagtatcggatgtctaccgcaaggtgaatgctggatgtttaccttagaacaatgtgtctacctctctaacacaagattcgatactgtcccctaggtcagacaatggtagtgcgtggaccaccatacaccccttttgttcgatgactccactgacacctttgtctaccagacgtgatctctgtgcaacacgtgccctgcactaaacgatctttttgccagtacaaaaccatcaccctacgagctaaatattttaagtgggcctcatagtcacgtgtatatgtattttaccccaatagaaggcttgcgtttacaagataaaactcgaatgggtcacgatatgtccggaccccaaatcaagcctatacaaaccacattattccttcatgcaaggggg

SEQ ID NO: 11019 - DNA, 712 bp, Cannabis sativa
tccagttatatattagatgttagactttacgattcgattcgatctaattaatttcagtcatccaatcgatccagcatctattggatgttggattggatcggttatatcattggatgtattttatttatatttattggtggttctatctattagatgtattttatttatatttattggtggttctatcatgtattttatttatatttattggtttaatttgagtttatccaatattttagactttgaattggactaaatccatccaattcaagaaaaatagagtaaaatttaatgttaattttatatatacctatagattttaagtataataataaaaaatctaattactcatcaaaactaaataaaaatactaattagtttgattggttgttggatgtattagattttcggacaccccatccaccaaccgattcgatccaagatatttaaaaataacatccaatcctatcacaattgaatatccaatatttggtggtcggttcggatcaattcatgcatacccatagatctctcctttataatagttatatcttttttcgtcggtttttatggagatctctcatcgttggtaactcttgccatggttgaatattgaagcaaagcttctcagcaatgctcacggagattgaaaaaagcttctcaccggcattcatatttcatggtgatttgatttggcggtgttgttgatttc

SEQ ID NO: 11020 - DNA, 521 bp, Cannabis sativa
gatgtggttaatgtgaatgtggctacgttcttgggttggcttgataacttgctgcaagtgttagatgtggagcagaagaaggtcattgcaatgacctgttgggctatttggaagacaaggtacgaattggtctggatgaaaaaagagccaatggtttctggggtgtctattttggctcaatattatttggaccattaggctcgggcacaagatagaaaccaagtccctcgtgcaacatttttgactgatggctgaaactagcagtaggtgctttgaagataaacatcgatgcaaccttgttttcagtatcagctacttatagcttcgtttgtgttgcacggaatgtagatggggctttggtggaggcaatttcttattgtcgtccatgccaaataactcctgaaatggctgaggctatgggggttagagaaactttgagctggataaagagaaaatcttggcaggggtttattgttgaaacaaatagtctcattataatgcaggcaatccatagccctctt

SEQ ID NO: 11021 - DNA, 588 bp, Cannabis sativa
atttctttcagacattttatcaaatacttgatgagtggtggcactgtccatgcatttcaaataagcgtgcgttacatgatttaacaggactagcaagtttgattctggaaagccagattttaacacaaaaccatggacagctcgtgtagcttctaaatatcttttatttgtagaatcgtgcaaaaaatcaactaatatttattttcaagtcttgtgtacagtaattgaactcaaaagtcatcttgtaaatctctatttgatttctcagcagtaggctatggcttagttactggtctagtctgcatcaaaaaggaaaatttccttcccttgagttaaaacaatcacaaacttacaaagagtcaagaagtcaaaaagaaaagaaaagaaatacaaaaaataagggtgaagtgacttactttgttggtgggagctaggtttaggaagacgaaggaattcataggtggggaagaaaccccagagcctcgaataaactcatgctctcacctgttacttgcaaaaaaatgttggacgattacttggttatcgttaagtatgtaataaggtcagtgtaataccctaagattaaga

SEQ ID NO: 11022 - DNA, 600 bp, Cannabis sativa
atttcaatttcacaaaaaaattcgacataattttctttttataaacctcttagtattacccagcttcatcttgtatttattttttttttcaaaggatatgcatatctaatttatctttgattatgttacttttacattttcttttattgcaacctaagatattagttttttactaatagtatagagagatcttaggttccaagctccctcaccactaaactagccttggtgggagtcttttttacatccaacaataatgaaagctgctagcttttgaaaaagcaataaagctactttggcttgtttcatctttcattttgctttttacaattgaatctttccttttgataattggaatctttttattgctatttttatgtctatatgtgataagatatgacttgtttacccacccaatttataagtagctgtaagaatacacacaatcgatcgaacttttaaccagggcaagctaattattagtagttacatatataacaaaccatgcagataacgtacaaattctcacgaataattaatagtattaaagaaccagtaacttcaaactaggtatagtgggcatgcaaattactctcatgc

SEQ ID NO: 11023 - DNA, 1405 bp, Cannabis sativa
ttgggttcttgtaccatacacaccaggaatgcaatttattgaaaataaatgggtgcataagataaagctgaatgcagatggctctctcaatcggtttaaatcaagactagtggcaaaagggtatttacaaaccctaggtattgactatgaggagaccttctcctcagttgtaaaacctgtcactatgcgcactgttctttcacttgcagtatctcagaattggtccattaagcagtttaatgtttctaatgctttcctcaatggcactctccaagagacagtctacatgaaacaaccttcaggctttgtcaatcctggaaaactagatcatgtatgccttttaaagaaagccatttatggccttaaacaggcccctcgggcctggaatgacaagctcaaaagttgcctatatcagtggggtttcactgcttcgaagtcagataattccttgttcacttatggctcaggatcgaatcaagttatacttttagtatatgtagatgatatactagttacagggccaaatatgtctctcatcaccaagcttgttactgacttgaatcatcaattctcactcaatgacttaggagaagtccattatttcttgggtgtcgagatttacagggatcacacggggatgtatctgtctcagactaaatatataattgatcttctcctaaagcttcatatggaaggtgcaaaaggttgtccaaatcctgcaagtgccagtgcaaaattgtctctaacagaaggagagcccttctctgatattactctgtatcgcagcaccattggtgccttacagtacttgtctctcacactgcctgatgtggccttcatcagaaacaagttaagtcagtttttaaaggcacctacaacttctcattgggaagcttgtaaacgagttatgaggtatctcaaggcaacaatttctcacgggctagtttttcgaccaacaactgacatggctcttacaagttattcggatgccgactgggcgagttgtgtggatgatagacattctataggaggctatgtcatctacctaggacaaaatctaatatcctggtcctcgaaaaagcaacagaaggttgctcgatctagcacaaaaagtgagttcagagctcttgctaacacagctgctgaactcaaatggatcatgtctctgctcactgagcttcaagtcaaaatacctcggtgtcctgtgatctgggtcgataatcagagtgcatctgcacttgctgcgaatccagtttttcacgcccgatccaagcatatagaaattgatttacatttcattcgtgaccagatccttgctcaccaacttgctgttcaatttgtcccatctattgatcaagttgcagacctgctcacgaaatccttgtctacagaaaggttcaactac

SEQ ID NO: 11024 - DNA, 1325 bp, Cannabis sativa
tgatagcgaatgccttattagatttcaacaatcaaagatttgtccttctctcagagtcatgcatcccactcttcaacttcaccactatctactcttatttaataaactccaaccatagcttcctcaactcctttgacgacccaagaaaggctggtagaggccgatacaacccccaaatgtcccctcacatcaacatcacccattggcgcaagggctcccaatggttcgaactccgtcgagatctcgcccttcgcctcatctctgatcgaaaatactaccctatcttccgagacctatgtcgaccctcatgctacagcgacgagcattacattccaacgcttgtcaatatgctttatgctccactcaactccaaccgaactattacttgggtggactggtccagagggggccctcaccctcgtaaattcggttgggttgatattagtaccgagcttcttaataggattcgattcgggtcgtctgattgcctttacaacggaaatgttagctctatttgttttcttttcgcaagaaagttcttaccgaatactttgaaccctcttctgagggtggccccatccttgtttggttttaattcgtagctacatgcactagttgatctattctattataatggaaacattttccaatactttttttttaaaaaagttaaatgaaaaaattaactatatttgtaatatatgacatttaaaacttcatgtacttagatctaaaaaaaagttccaaccacaatcaatgaatgaataatatgttctaattggcaatgagatgaatagtccattcatcttatgtatggtatttagttttcacacacaatgcgggactctctaacagtctttctcaagatggtggttattttttgctcactcaatttttattcaaatgatgtggttcaagggggattggaaaagttttttcaaagcgaaactaagcttgtctaatgtccttatgattttgacattttaagcctcaaaaatagttcgcgagctctgttacgattttccaataaatttctaccagtgaactaacctacttgtaaaaatctctggcagccataaattatttcttgaacattgattggaaatcatgctagttccagattgaccttggcggtagcctctttcaccactcttttgtggattcagctaaagtgagggaaaagtagaagcactttccatcgtcactaacgtgtgccaccttcatgagtctatcataactagacaagtgaatcttgggggccatcttgccctcatacaggtccatctgaggcatccaaaaattatctggtaggactgtatctagga

SEQ ID NO: 11025 - DNA, 885 bp, Cannabis sativa
tttatgccatattttttaaataaatgtatatatcccatttgttaaatcaaatgattgactaaagccaagtaccaatggtggtgtccctgtacacgtagagaaaggtagtgggatcgaatggcgggagttcccaacgggtgggttttcagcgccagttgatgagatcccgaccattagatttattgccggagatgcaatttcagtccttgaaattctccttacacgtatggtcgtacttgggggagtagttgcacgattcaagtgaagctcccaggttagataagccgttagttttggggaattgaattgattgatgatgagaatgtgaaggaattgaagtagtgtttcttatggaagagagtaggagttagatagagacaaagcagataatagaaaccaagaggaatagaggaaccttcttaacttgattttgttgtagagtttgagatagagactggttcaccaccatggggagctcactcttacttaagccccaaactttagttatctatgaagtttatttaaagtaataaaaaaaagaacaagtggatatcttggtcaacagctgatgtggatatctctcataaaaaaactgataataaagagagtattttacttgtaactgatggggatatcttggtgaatgaaaaaattaatgatgtgagcaaaagtggagttgataccttggctggtgaacagctggatgtccaaatacaagaagactcttttgcttcaagcaagttgataattcagtcaccactgtgcaaagcatcgtctcaagcagaactgatttagtggtaatgatattgaaagtcaaatgaatgctgtaagtaattgataatactcgaagtcaggtttcaagcaaagagaaaatctttgaatact

SEQ ID NO: 11026 - DNA, 612 bp, Cannabis sativa
ggtccttgactgcaatatttttgtgttagatttaatttaaaggttgtagttaggttgtgatattgcggtaaaaattggattcttctttcaggaattttattgactttttttcttactatttttttgaaaaatatgaactttgtttgcaaattgccaactggtcatatgaagatcaccaatgtctatgttgccatctataccaacctaacaagtcctaaagttactactgaaatttactcaccttcgcttgcaaatttactactgaatttgatcatacgagaaataatagagtgaaaaaacaagacgttgaggttatttgtgaatttagttaatgtagtctcttgctatcttgaagttcagactaacattgagttattacttgtaaataattaagaatttgacttgtcttcaaggtcaatgattctgaaggaaaattcccaaattatcaggctttgaagaacttgattcgctatgttcttaaaattccagcagtttactaagtttgagatacgtaataactagataattattaaggctttgaagaacttgattagctatgttcttaaaatttcagcagtttactaagtataaggtacataatagctagataag

SEQ ID NO: 11027 - DNA, 570 bp, Cannabis sativa
aaggcagacaatttgttttagaacattagataaatttatatcattgttttatgtgttattattattatttaagtacataaagtaaactttagtttactcttgaaacctttaattttaagctctaacaaatctaaaagaatgtctttataaattgtataacttacatatgaaattgttggttgaaatataaaatggaaaatacaaaataatagtacgactaagataagaaaaaattacgtacgtacgttgtttaagaagttgaactatatctatcaaatgtaatacatttagagctaaatataaataattgtaatcattgactcattggaaagacaacgttaacttgtacaaaaaattagtgtgtatgtggcaattgcgagtcaaaaggtgtttgtttcacaaataaaacatggatttttttttttgaaaaaaacaataggaaaagtgatttagtgaatgaggggttgttgggtttgggtattaaaatttaaatatatatttgtatataatttgatgggtgtaaataaatataatataagattcttgacccatacaaaaaaaaaaaaaaaa

SEQ ID NO: 11028 - DNA, 1137 bp, Cannabis sativa
actaattatttgtttaaaaaatatggtctctcgtgactagtgactagctatatatagatgtatatgtaacctattactattaggattatagttatgtaattttgattttaaaaattattatgttttattttttaataaaatgatagatacttttattgggataatttatttgtagttttcgtgttttatgtataagatttttgtttttgaaatcatattagtattaggattataataattaattatgtaattttgatttaaaaaataattaatatctatctttttgattttatttttttagatgataccgactagactacgactgacctctgcttgagcttcgactctagctcctctgttttgacttgggcttcgtcttcgactttcttccgatcataagcttcgtctttcttcttcctctgcatctcccgatcgatcataagcttgtctttcttcttcctcttcttcttcatcttccaatattgcaacttcgccaaaacaccagtccgatgagtacgcatgctgtgtatatatatctctgaaatcttcattttcattgaaaagaattacaaccattttacttgaaagaaagaggaattgtaaatactctataatgtttttcattgaaaatttgtgttagaatttggaagtactgcagacttgcacgcaaatggtttggagtttataaaaaattaagctttatgggagaacgtacacctcaattcataaccaaatttatgaatatttaaataaattgatgtgtgaactacaaaaaaaaaaaaaaaaaaaaacataaactacatgaactcaattcaaaaaacataaactacacctcaattcaaaaaacatgaactacatgaactcatcagatcttgaaatgtcaaattgatgtgtgaactatttcaattgggttgagtttgttttagttttatgtgatttaattttgcgaaaaaagatgtagtgtatattcaataaataaaattaatatgacatcataattccatatctacctttaagaatatttaaatattttattttgtattgataatgagttgtgactaaaataagtagtaacaataaaatattatagatcaataagtagtagtgagttaagtagtatcagtgataataaaaatt

SEQ ID NO: 11029 - DNA, 1326 bp, Cannabis sativa
agtctctcagagataccgtaaagagcaaagtccgtgtgcatctcagtgggttgttggctggtgaagagttgagcaaagtgttgttcaattgttgtcagaatgcttggagtatcagtggcagttgagccatcttggcgtgtaagggaacgaatcatgtttttggctcgtcaggaagaagcaaattggtgaaagtagcgcgtgttcttatcaccaagttttagctaagtaacatgggagcgttgttgccaatattcctcctctttaaagagaagtctatcaagatccccttgaagctgacgacattggagaagcagagtgttggaaggttaggggttgttttgagcatactagagctgagactggatgtttttgatttggtgaggaaggggaggtcctagcgtttgtttccacttggagagattagaagcacaattctgaagctttgtaataagattggatatgggatcctggtcatgacaattattggtggaaatccatgcctgactaatgcaattctcaaagacagttttggtgagccatctgttgtcgaaatggaatcgttggtgggaggcagaggggctggcttcagtttttctaagagaaatgattaaggttcgatggtcagagccaaaaaaatcaccgtggagaaggtgagcattgggaaaggatgatgtcgacggggggttcgagatcccccagtctaatcgctcttggatacaggtggggtgtgagtgtttattagtctaggtgtaagggtttccattgccatggaagggatggagtgtgtaagtgtctaagaaagttcggaaaaaaggcgacggacttttattaatgtggcctccaagtttgtctgcatgggagagaaaagcattacagtcgtccattaaaagccaagggttgttatatacagtgtcactaagacgatggagaagttgccacgtaatggggcgattattatgttgaggggctccataaaaaccagtgaaagtgaaagggcaatgattaagaaaccagatataatattgaaaatgatttatattatatgaaagtaaagttacatcaacatcctgagtccataacaaaaggagaccgccactaaggccgagccgagggacttcaagtccattagcaaaagaaagcttagttctaaatttatttatagcaccaacatggagtctagtctccataatatacaaaatggttggtttatattgcttaactaaaagggagagccgacggaatactcgtttactccctaatccaggagcattccaatttataatgctcatggctcctggcgggtgcactgagcttcacccgcctcat

SEQ ID NO: 11030 - DNA, 635 bp, Cannabis sativa
gagtttgagtactagaggcaagagcaagacgagtgttttggtgagcctaagatggtataggatcactgttttgactagaggtctgtggggtaacaaaagcactaggttgtggtggattaaaaaaatgaaattgagttggtaagggagcagtggaagaagagataggtggtcggccaagaatagtgaaaaggggagacacagatgatgagagtttagattcaacaacttttgagaatggaaaacctaactcatcaaataggacatccctggaaatgtatagtctgccatcttttgctaagcacttatacccttaatgagttccaaaacacacaaggttgagatctatactgaagtttattcttgttacatggtcttagatttggctaacataaataccaaaacactcttagcatagagtaatgaggcttagtatgaaatcaaacctcaagtggagaaagaaagttcaattgaggagagggcattttatggatcaagaaggctgcagaaatgcatgcctcagtccaatactttaatggaagagtagagttagagcactctctatgatatatttatgttttctctcaactaccccattctgctcatgtgtgtgaggacataaaagtttgtgaattata

SEQ ID NO: 11031 - DNA, 512 bp, Cannabis sativa
tggttggttgtagtcattctcaggcatgtgttttggctttgtagtgttatttttctttctcttttttttagatctcagtgttttctcgtgagtttctattcaagtgtcctagttccggtgcataagggctcttgattagttttcggagtgttgtagatgtaggggggactcgagtcttacccaaagggttgtgcttctcttgtcctggcactttcaccgttcaaaactgcaataagagattgagtgtagacttttctcataaattggcagggggcctttgtttttggcctttcgggcagcctcctctgcgtttgggagagttctttggagttgttctatatgttatttgttttttatattttagtttagttagtctttgtgattttgtacaccttatgtcttttgtggatttagctttaagctttgagctatatgtctagtttagtttagttgttctatatgtcttttgggggtttattcctttaaatgttcatgtgtaagctttgagcttt

SEQ ID NO: 11032 - DNA, 717 bp, Cannabis sativa
aaattgtttaaaattgagcaaatggtcctatttctatcattttaaaaaatataggtttattttgtcatctaacaaaatagtatgtctaatcggtaatttttataaaaaaaaatagtattttattttttaccttacatataaatttggattctgtgctgcattattattcgttgagaccttatattttaaactctattgaatgtaaacaattaaaattaggtctccaaacctatttttttccaaaatattttgttagtattttgactacaatcgggtttaagggtgtaattataattttatacccaaaaaaaatgaagtttacaaattaaaaaattataaaatactgaatccaaacaattcactgccaaactagtagtaataaaaagaagattattccttatagataaaaagattgttaaaaaaaaaagaataaataaatgatgtatagtagctatgtatatgaacttaaagtaggtaagtatatattgtattgaatgaaatgaaaccataaaaaagtttttgcagttacctgaaatagtaacaatatttacttatcaataaaggaagaatatcactttctgatcaaattacttgcttgcgtaaggtccacatcttatgttggatcttacacccaaaatatttagaaaattaaataattatacattatatgggaatggattttgtcttttattttctttcattcattttttctttatg

SEQ ID NO: 11033 - DNA, 797 bp, Cannabis sativa
aaaaagtaaagcacgaatttaatcctgaatataaaaatgagctggcctgtctaagaaagatgggccggcacgagtaaagcacgatacaaatctgagcacgacacgaaaaatatcgggcctacaggtcgtgccaagccgtgccgagcctaccctttaaaaatattggcacgacacagcacaactcgcttttttcatgacacagaaaaatatgacctattttttgaaaagcacggataaatacggaccgagcctgcatagcacacacgaacttacagtactactcaaaactatatcaaaatcccatgcaatttaattaatgtgaacaccacccacattgttcattcagcaaaagataataaaaaatacttgtattgttcttacttacttcatactaaatcagaaagtaaattgcgcttcgcgtgtggttggatgtttagtgacataaaattatgtaaaacttcaaattttgatattctatataaatatatattgttatctctattttcggcaaggagcacgtaaaatttaggtcaacaaggcccaccattatgtcctaaggaagacaatttgggccaagcccaagttgtataggaccttccaagaacgtaccttagctctgtgaccagatggtcttccgccagtgacagttcgtatccagaagcagctccagtaccatgatgctagaagatcagacaacgtgtttctcaagactagtccagtttccttttttattcaagcgcacaaaataaggaaataaatgctcctcaaattgtgaaagaagatcgtatcaagctaaa

SEQ ID NO: 11034 - DNA, 533 bp, Cannabis sativa
tagtagatagacactgaacattatattttatgagaagcaaacagaataaattttgtttggttctagaatagtttcgtattctttcttgcatatatttgagttgtacatttaaaatatccttagcttcattaatctatcaaattatggtccattgagttgcctttcgaacttttatgtgccctttggcataatttgagccagtttatgtttgctattgtttcagggtagttgttttctgccataattttctgtttgactgattatggatcacttttcattttcctcaaaatttcttatcattcttggtttgtccttttgttacagggttcagctgaagtggtgtataccagaagaagtgatgcctttgcagcattgaagcgttacaataatgtactgctggatgggaagccaatgaagcttgagattgtgggtctcaattcagaagttcctttagctcgtgtgaatgttgctggattaaatggaaggaagaagaggactgtggttatgacgtatgtattcttatctctgttctg

SEQ ID NO: 11035 - DNA, 575 bp, Cannabis sativa
tggtacgtacgtaacacctaacacctcatatatgtaaatgtaatacgtatacatgcatatatattgtagtcacagttaactgtgttgcactttttcgagaaatttcatacacttatttgtattgtattaatacaatttttaacccatgccaaaaacttataccaaaaaaaaattgttgtaacatacttataacaattactataccatatactagtagaataatagaaaagactaccttacattaatccgactatatatatatttagttattacatttatttatttaattttgatttatataatgtgcgaaggcatggagttagacaactccgaacagggtggtcagatgggccagcgttcataacacaatgtccaatccaaccaggacaaagctatttgtacaatttcacactcacagggcaacgtggaaccctactttggcacgctcatattctctggctcagggcaactgtccatggcgctatagtcattctccccaagcgtggtgtcccttatccatttcccaaaccacacaaagaaattccaattgtattaggtaatcatcatcatcatca

SEQ ID NO: 11036 - DNA, 545 bp, Cannabis sativa
tgaatctttagacttatctagtttattctgatttaatctttaatatttgttgtttactattctctttccctgacattgttattttttatgtcaagagaaatgttacccaaactgctcatgatttagcaaaaatatgttcttgagttgaatattgacatttgttggatgggagaaattccttattctattttctctattattataaatgattgttgattataataacagtgaatcttttaaaaaaaattactaatttagaaatacatatggatttaaatttttataaatataaaagttttcgaagaatttttaacaagtagaattataattgctaattattcaaaataaaaagttaccgccgatgtgcaacccacatgcacgcctccttcttctcttctctgcgtttctttcttcattctctacgattttcatctgaatcctcattcgattcttcttcttcttcagctggctccttcttcgccagctatcctcgccggtagcggtagcctcttcttagccctaatctctccctcaacaaatctgaa

SEQ ID NO: 11037 - DNA, 591 bp, Cannabis sativa
agttttaaagccttatgtatatatatttagtaattattcaagtaatttttcaaaataaaaacaaattagtaaagctaagtgcaacaataatatccaattaattcccacaccacaatattattggacatttattataccttagttaataaaagaatgttgataaatgaataaattgatgttcaattgtacaaatcgaaaacataaaatacacaacaaaaaagattataaaggaattttaaaagtaagaattaaagaaaaaaaaatatatatagaacaacaaaagcaatagaagaagaattggcctaatcgaactttgatcaaccctctaccatatccattatccaatagccaaagataaatacctctttaaggttcgggtgaacataaaacccgacccgaaccacattatatttgacccttttacttgtatacgagattctcagccgagggacttcgaattcgagcactattacttgatttttttgagactgacccgccacccgacccgcaaacaatggaacattccactccacaaatattgctaaagcaagaaaatagaccattgtcgccgccaccatcagtgtggcgggg

SEQ ID NO: 11038 - DNA, 541 bp, Cannabis sativa
gcttacatattatattcactgcattgactactttcctattgtatgttccttctgttctcatttgacttagtatttaactttttgtgaccattaaatgagaatggtaatggtttcatactttcatattattggttttactttttgagatttagaatctattatgtatgggtcaaagaggttcttgtaatcctatctataatctatccccacatcactattattttattcacttgatcaataagacaacaacaatacaagccttgctaaactgtattttctcattatgtgcaataatacaatcacatataccaatcatttttttattcaaatgaatgattaatttaggatgtaatacaattcaggttatgatagggaataaaatgaatataaaaaaaaaaaaaacaatttccctagagaaaagaaatagacatgtataaatggtttataaagcacttgaacccataacatcatattatagtctaattagttaattcaagtatagatgtatatataaaccaaaatcaagtttgagaaagaatca

SEQ ID NO: 11039 - DNA, 806 bp, Cannabis sativa
ttttttttagtgaaaacacatttattaattaaagcattttgaataatacaataagtttttaagctcagcaggagcaatgtgttcaagaatgctacgattaaaattgaatcaagatagatatggtaaactatacgatttgtagattattttttttcttcttgaaaatagatttgcagattgtttaatgaaacgtaactgagctagaagaaagaaaaacttgacaatctttcatccaagaaaattgagcacactacaaaaaaatattatttttagtcacaacaaaaattgcgactaaaagtaagaaaattatgactaattataaatcattatttttattttgtgactaaaaggtctgtagttaaaagtattagtcacaaaaattacaattttttatgtgttattagtcacaatacttgttgtgactataactaaattgatgacaatttgtatttaaatactataatttagtcacaagtaactttttgttgtgacttttagtcacatttagtcacaaaaaatttatgttataaataaaaaattgtcaccaaagatatctattttttgtagtggcatggcatgtggacattgtaacgcacggtttagacaatgactaatcaatttaaatgatcgcccgttctcaaccagaacccttcacccagttcaagggcgcgcgcttctttcactcacattgcttccactaactcaacaagataataactatgtaattaggagcttttaacttcaatgagagaacccaacttcctagcaacaattccaaacctatattttctttctgtttcaaaaat

SEQ ID NO: 11040 - DNA, 737 bp, Cannabis sativa
cattttactttgtaatgtgtctagtgatggaaataatcaaatgtttattgtgtgtttacaatttaattattaaaaataaatgataccccacacttagtttaatagtaaatatatctgtatttataaagaggagatattaagttcgaagtttcttttttaatgtaaaaagagtttggatttgaactcttgaatcaaaaaattagtttgcaatatcatttgttggacgaagtgttttaaaaatttgagttttggaataaaaatgttaaaagtcgattattagactcgatttaggtcaaaatatttttgaaatatgactacatctaagaaacctaacgactaaagaaaaagtcaagtagttccacttgggcggatcttaagtaacagcaaaattattgagtctttttcaaaagaaaatctagtccgacctagtcctcacccgactacagggacggacccattaacattaatgtaaattaaaggtaaatactgtatttcaaaaaattaaatgtaaattttttaatttaataattataaaccaaaatagtagaaaaatcctcacaaaattagataaatttagtaagagtgattatgataaataagcccctacaaagtaaaaattctaggtccgtcgctacccgtctagtcgaacgaaaatctagtccaaatgcttatttttaacctttttcacaaaacaccacacaaagtccactaaccaaaataatataaactctaaaatg

SEQ ID NO: 11041 - DNA, 595 bp, Cannabis sativa
aaaattatccccttttaaaaatacgcattatttttttattaattttaaaaaataacatatattttttttttaaataagagtcgaaaaatatatttttattacctgtagttcactaaattttaggatcaattctgaaaagtgttaaataaatactaataatattttctctaattatatatataatcttgaatgaattagaaataactttgacacattataaattttagtacatgcatgtcaccacacccacataatgagcattgattaaaatagaaattaacaaaaagtataatcaaaaaattgagcactaaaagtctaaaatacagtatgcaaacatgcatgagacgacatacgttaaaaataaactcaataatttaataataataaatatttaatattgtcaaatcatataaatttaaaataattataaagctcaaatataaaataaaaaatgtgagtattttaattagtagatatttaaattgatttattacgctccttgattgtaagaaaatattaaaaagtgaaacataaatatttcaaattagtatttaaaaaacaagttgatttatttaagaaaaataaatcaacacaa

SEQ ID NO: 11042 - DNA, 1078 bp, Cannabis sativa
  modified_base (448)..(451): a, c, t, g, unknown or other
tctatattttagtcaattaaaaaaaaaattaagttccttgctttaatataatagttttttatctccaaaaaaaaagttctaatagtagtttaaaacgcctttcaaatttagaacatcttaaaagtttttttttttttgaatgaaatttatctttattaaacttgaacttcaactactaatctaggttgcaaaacagttgagacatcctccaaactaaaaacacaatcaggatattaagaattgaaagctcttgcaaaaacatgagctactgagttcgctgaccgtttaacaaaataaacagaaacatttctcatagtagcaagcaaattcttacaatctttaatgaccaaactaaataaaagaaatcatatctattgagctaagtaaagcttgaactattgtaatatcctagaaaataatatggtatttaattggacatattttattnnnnatgtaattattttggtaatgaagtgagattatgatcttacttaagttaattagtgtggatttaataaatgattaaataaaacataatttattaattacggagattttattataatatgtgggtatcgtggataccatttttgaaataaaatgttttcggatccggctaccatgagaactcgacagagtggtcggatatgtcatgataataaaatacaaattggaatggaggttatatcggactaagttagagtgttaggttgtcggtttggcggattagttagaattactaaaatacccctaggtttaattttaagttaaagggtattaggaagggtataatggtcattttggttaatagttattaatattgtattggctgaattattaggataatttattttttttttaaaaaaaaaaagaaaagaaaagaagaaattaagttaataggattaaagtggataagttagaagcatttgggtcttgcttcttcttcttggccaaaccctaggggagctgcaacctaagagtttctcttgcaattcatcatattcttggttggattggttgggtgctggggtcaattaagctttaaggatcgggattgcccaacgttgttttccactca

SEQ ID NO: 11043 - DNA, 639 bp, Cannabis sativa
gtattgagtgggattttcttagcggagtgatgctttgaatgagttttgcccaacgttttgtggacctcattatttccactcctaattcgattcagtatactgttgttcatggtggacggtctttggggcctattgttcatagatatgagcttaggcaagatgatccattttcaccttatttgttctaattgtgtgttgaaggcttctattctttgattcattatttataaaggtgtggtgatcttaagggcattaaagtggctaatggcgcacatgtagtttctcatatgttgtttgcagatagtagttacatttattattgtgctaataataaagatgcaaataatcttctgtgcttgctgagtatttttgaagaagcttcaggtcaaaaggttagtttttcagtcatttgtatttttcagttctaatactcctcaagggactcgagatatatattctcttttagggattgctcatgttgatgttaatagtatgtatttaggattgccttgtattatgggtaagaataaatttgatattttagcattctttagagagaagatgcaaaagaaaattcagagttaggaggatcgttttttatccaaggttggtaaggaaattatgcttaagactgtggca

SEQ ID NO: 11044 - DNA, 577 bp, Cannabis sativa
aagccttaaatgttatgttaaatagagtacataaatctccacatagcaaattacgtaatttgcataaatatttaaatatttaagttaattttttagagaagttttataaatataacttaagtattattattgtaaaaaattaaacttaaatatttaattataattgagttaaactttaagtatttacgctacaaatcaagtgatcttttgacaagaaacaaaagatcaagttatgatcagggctagctatgagattgggtgaatttttaaaaaaaataaattattgggctatttataaaaagaaaatgttgtattttcaaaagttaataattctttttttcagtctttagatggtcgtagacataaatttagcccgccttagtgcaaattagacctggttatgaccaagcaacaaaaactacttaccaaaacttgcctttgagaaattttgtaaatatgtatatttatttatatatagaatagaataaaagaataaaaccctaaggttgctcatgggatttttctcttattatattatatgtatgtagtgttagtgttccgaaattaatgcagggtc

SEQ ID NO: 11045 - DNA, 941 bp, Cannabis sativa
gagtgtttcatgtgatagttgaggttgttggtgttgtctaaaacacaacaatatgcaatacattgcagcccaatgtttgatagagtaatgataattgcaaacaaaaccagtaactgggttggaaggtttagtttagaattagtcaaaattatattgaaaaacgtcgaaagcaaagggaagattgatacatacattgaccacagtggcgccccagtcacgaagaaaatcagcaggagctggtctaggccttacgaggcacctaacatcgtagccttcgtctagtgcccgccttacaatctgccggcccaaagttccggtagcacccaccacaagtatgctagtcggcctaaccggcgtcccgggagcaagattcactgctccaacattcgtccgagcagtacaagttactaaaggccgcttgtgagaattcactgataccaaaatgcccacaaaaacagtaatcaactcaaataaggaaattggaagccaacccaataatacccaaaacataaatttcgtaaatgttgaataaaaaatgaaggtgacgaaccagagagagctgtggaagaagatggggttgaagaacagagagcatccgttgctaaagtacgccgccaggatagtacgccatggcaagttgagagctttgtgtgatgaggatgatggagttttccaggtgtagccagctgcgtcggaagcctacaagccattgttaattaagttttgttcagtccggcgggaacagaggccacagacgaaaataaaaaataaaaaataataaataaataaataaaaatgaagtggaagggatgaagatgaacaatagatctcaattctgccacgtccttctcagtaactggattacgggttgtgccacgtgtcatatgaaagaaaggcatttctttctacttctcagttttgactttctttaagtcagtttg

SEQ ID NO: 11046 - DNA, 649 bp, Cannabis sativa
taatttgaattaagtaaattttgtccatactcaagttaccttatcaaattggtatatttaagtaacagctctcatatattttattttaaattaaaaaagaaaaaaaatatgaaaaggtaccaagagtgtgtagcagcttactacatgataatatcactattaatacaattaatgattgagtctcatataatttaatgtaataattttttatggagtatcgctaactaattatagggtgacacgtctaaaagctggtaggcaccattggtacttaatagccattcgcattattattgagtaccagtaatacctagcacactttaaaggtagcaccccacgattagttattccctaaaaactattctcaatagtagtatgataccgagaagggtgctaggcactaataataccctttagcatttctcaataataatactaaaaaaatattaaaaaataataatagcaccttaatacgagataataaactgtaattaattatcagttctcatatttttttaatttaatacttattaactatttgcaaggagtcaccttatgatagtgcttaatatcaatgctccaaattaaaatatgtaaaatctgatacaaaattacactaataacgatatctcacaaattctctattata

SEQ ID NO: 11047 - DNA, 544 bp, Cannabis sativa
acaaatttagctaataagttatgtgaattgttttatttaattataacacattagtttcttaaataagtttaaaggtaacacaaatgttactaaaaaagtaatgtaaaagtttcttaaacaataaaataacataatataatctcaaactaaatatataattttctaatgcattagtttcttagatatgtttgaaagtaacacagatgttactaaaaagaagtaatttaaaagtttcttaagaacataattatataatctaaataaacataattttaaaagtaactaaacaaaaaatgtatatgaaatcatttttatcttaaagtggatcttttcatcctattaatctcataagtaactaaaatgtttctattttacacaaaaagtaaaaaaaaaaatcttttcataaaagataagtcattagtatgtttaaattttgctaattaactatgtagcatgttctttataagttatcttttagtaatttatcaaagttaatctaataaataaacttatatttaaaattacattgtaagttttagactta

SEQ ID NO: 11048 - DNA, 546 bp, Cannabis sativa
gttactttccaatttgaagtgacaacaagggataatacagtttgaactgtgacaggctgaacaactgagaaaaagtctcctcatagtcaattcctagggcctataaataacctttagcaaccaatctcgatttgaacctgtccaaggacccatcagcattgagtttgatcctgtgtacccacttattgccaataatgtgcatcctaggtttcttaggtactagtatccatgtgtctgctcttttcaatgcaaaaacttcagtttgcatagaattaagtcattgaggatctttaagtgtagcttgtagagatttgggttctgaaggtaatagggactctgataatgggtgtttgtggccaaatatgcttttggttttgtgatcccatttctggacctggttatcataggatgtgacctatgcgcaggggtagatgctgtgttgtttgagacaattggtggggacaaatgggagacagaagcatgattttggtcagtagagatagataggttagtggcatgtattgtatttggttgtggaggtgtttg

SEQ ID NO: 11049 - DNA, 511 bp, Cannabis sativa
acatttatgaaatcgaggaacacaagggagttttcaagtaacctccaccaatcggggcaactgtgacaagagggacccacgtaaattttgttttcatttttgcaattttgatccctaagttgtagcattctcacgagtcagactggactcctcgacagatcccacaccaatgggtgtggggaattacattgtaaaatgagaaatcaaagtaacaatattcacctctttcaaaattagcctttctatactgtgttgtaagctacatattaatcgatcactgtgaaatcttccttagatctcgttgttactggtgtagttccaagggtaatgggtaactttatcatacccttaatttggatggtgtcttcggttgatccatagatacttgagatgatgggtttgagatctttctcgtgcaacctcatttgcttaaaagtctataaattcaaaagattatatgtactaccgttatcaactaaaatgcaatgtacattgtcacatctgatattca

SEQ ID NO: 11050 - DNA, 508 bp, Cannabis sativa
gcacatgacttaaattctcatgagaagagtatgaaatctagttgaaatggctaaaattgttagtttgggttagttatttcaaatgaataggacgtacacttttctatttctgaaaatgagtaaatgaattttactgagctgatcaagagtatttatacaaacccattacttactcaaaataaaaccgacttaacaaactgttttagagactcagttgaaaaacagacataacttgagacaacacaatggacatgatttggacaatacggtccttattacataaacatatatgaagataggtaaatattgtaataccttatgttaattttagtattaatgaagatatgatctttgatctcctatgattacgtacctctccttttaaatctagtgttgtttcttaggaagcatttccaccaaacgatgatggcgataaccactaataccacaagcactactaatactgagtttttaacttactagtgaggtatgtcaaatttcaggttag

SEQ ID NO: 11051 - DNA, 1491 bp, Cannabis sativa
  modified_base (344)..(353): a, c, t, g, unknown or other
aaaattctatctctagtttgagaattttttttaaaactaaccatttaaataataaaatttccaaataactattttaatttatgattcgtttttttctcttattattatttttttttagttttttacctgtattttttaataaaacaacaagagtaaataaataaataactttattattattatttatattaaaataaatataaattatctcatatattattttttaatttataacttgggataattcaatagtaagttgccatttaaatttgatgagttttatttagactctataaaataataaataaactctattattaaaaaaaaaaaatataaacttaaannnnnnnnnnaaattactcttaatattttttaaattttttttttttacatgttaatttcaatatttattttaattttattttcataattttttttatatatttttattttttttataatatttaaaacataatttagttttattttataagtatatttagtataattaaaaatataaattttatataaaataaaaattattaatatagggtgtgtttaaaaaattttagggtggaaataaattttttcttaaattttaattgtaatttaagttaaaaataataaaaaaaaaacatattttaaagtataaaaattataaaaaaaaataatcaaaaattaagttgattgtacaattttgacatgatcattttgctattttcacaaacactcatagatcatttgataatttgttcttattttcttacacagatcgagcaggtttgcaagattacagacaataaaatgcacaattgcaggaaaaaatctgtacatgagattctgctgcaccacaggagacgcaatgggaatgaacatgatatcaaaaggagtacaaaacgttcttgattttctccaaaatgatttcccagacatggacgtaattggaatctcaggaaacttctgttcggacaagaaacccgcggccgtaaactggatcgaagggcgaggcaaatcggttgtgtgcgaagccacaatcaaaggtgaggtggtgagaaaagtgttgaagactaatgtggaagctctcgttgaacttaacatgctcaagaatctgactggttcagctatggctggtgctcttggtgggttcaatgcccatgctagtaacatagtctctgctgtgttcatagccactggtcaagatcctgctcagaacgtggaaagctcacattgtataactatgatggagccagtcaatgatggcaaagatcttcatgtttctgtcactatgccatctattgaggtaaaattttattataatgttttatatttttgccttaaattgtcaccaaaaatattagttgctataagatcttatcagatattattggtgcctaaaatgacatattttaatgtcatccttattggtgccattcattaattagtaccatcatcattaattgctgtcttattggggccactaatataatatta

SEQ ID NO: 11052 - DNA, 774 bp, Cannabis sativa
ctttgttaagagagatttactctcatttgatgatggtttggattctcaagctagaaccggtgttgctgggttaactactgctatttggatcttcccctgtggatcctactattttttagtccttaatgaacttgttccaaaaaataaaaggctttagagataaagattaatagataacatgtgaggatttttttcattattttaataatttaatttttttattaggtgcatgcaagtgtatattaattattgtgtacactcaaaagtcatatatatcaatagttaagaaaatattcacatgctataagaataaaataagggtacctatcatagaattattctatatttatacatattgaaaaaaaaaaaaaaaactaaattgtataatgacaatgcaaaaaagaaatatttaccaaaaatttgtgattcttttttaaatgaagcttatgtggacaaattaaaatattattttcactttcaacccaaaataaaatttcaaaaaaagaaaagacatagcataactaataaattaaactatcaaagaaagttccaccaatagaagaaaaaaaaaaactaatacatgagaaattatgtaaccaaagggttaaaataactaattaattacattacattcatttcatctaatcctaattaatatatatataaaataattattataaaaaaaaataatatataaattttaaatttctaagttcataatcaatgataattttataactaagcaaactacacaaacaattaaacgacgaaaaa

SEQ ID NO: 11053 - DNA, 515 bp, Cannabis sativa
ttcaattcacatccccatatttcagtagcttttgaacctagtccccattatcatgatattcataatgctcctgaacacgatacaccagattccaatttactagcaattgttcctaattctgatgttcctaatacactagtttccatttctaatcctgatattgttgccattccagcacctgttgctaataccaaacttataagacatacttaaagacctacctatttacaagattatcattgctttttgtccacaacaatgttcaatctaaggttactaaagcttctacaaatcatcctatttctgaaataattgattacagcaggttgtctcctcaatttcgtgctctggttcttgccatctccagccactttgagcctcaattttatcaccaagccaaagggatccctgtgtgggataatgctatgaaccatgagatcacagcccttgaatctaatgggacttggatcattgttagtcttcctgctggccatcatgcaatcgggtgcaaatgg

SEQ ID NO: 11054 - DNA, 818 bp, Cannabis sativa
aatcttacattttatgcccttttttctcagcatgtataaattataaatacattcctgacaaagaaatacatatatattatattattaatttatatattttgttgcatgcagttcaacaacacctcatatggtccacgaggcaggagttttatgcttttggtatacatgaacagtacacatatattgtatatgaatatacaataatttataatggatagatgacgatggtcagcgttgacacatacatggaatggaaccattaatataaaccagattacatgggttggggttagtactatatgtactttttaattaattaatttgaattagctatgtatattatagttaggcacttgggtgttctgctagattctttttacttgtaataattttgtatcagctttgatttttgtattcaacatatatatagtaaaattaattcagtatgttatatgtaaatattgcaacttcacaagaaaaactataaaaacttgactattcaccgtatgctatggaaagaactcacatcatatctaattttatcatcgggacaatatttgtgtcaccttttaaaatgtgaaattttaatgtatgcttttatgtatattattttccatttgattgtagcagtaatactgtaatatataaacacttattttatgaaaactatataagttcaaaagataaattttggtgtggactggtaatgatagaaacttgtattcttattagttgaaattacatattgtcaagacagttagttataactgtttcagttataactgttttggttgtttgttattgctgttggcttttct

SEQ ID NO: 11055 - DNA, 561 bp, Cannabis sativa
tgactttccatcataacaattatttcctcttttaaattatgtttttgagtaaattaataattggaatgtagaattaatggaaatttggttcatggagatttgagacaatgtatgattctaagccgattgtcaaaatgtacatataaatccaagttttaagttagatacaaagcataaaatgatttagtgatgcttctctataactaaattggtaagcataaagccatggtcaattaaagtatattccaatagacttttgaagaatagtcaaaagatgtaacatctctagtctctactagtgtttatgcattgaagagaaaagatttgagaaccctaaagagaaaatagagtgtctacttaaaagagaaaacatagtattaagcatgataagaaatcgaaatggacaaagactgcaattgaaaatggaaagggcacttgaaagcattttgagaataaaacctattgcatcttggcttctctttgcggtgagccacaaagagtagtcaatatgaagattttgagtcttgactagagttcctataacatagaggagtgcatgat

SEQ ID NO: 11056 - DNA, 922 bp, Cannabis sativa
ttgtactttaagatcaaaatatgggatgattcttaattgataccgttaatctcctattctaattttttataacggtattcgttatagttacgtatcatctacgtaattttttaaaaaattctaaataatttatagtatcgaaaatagagtttctgatattcaatttaccacgcgtgtttaaaaaatttcaaacgtattttcgacattataaattattcaaaaaaatttaaaaatttacaaggatgatgttgtaactataacgagtaccgctataaaaaatatgaaaaaaaaaatatttcaacatatgacttcgaacgtagaaattgactaaaatggtataatagaaaattttaattagcacttctcttcttaatttatttacaattttcgcgagtaagtggtcagtcactaattactatactaaagaagcggttatttttttaggctaattagattttttgtccctgaactttgacatttaccaaatcatgcccttgaatttttttggtcgttaataatcgcccctgaactattgagtttgttggatttaaggacttttatccaattttgtaaaatgaaggatcaatcaaatgttttgatgtttatctcaaaaaaggaaaaattacatgttttgatgttaccatgtccaataattaatattgtgatgatttttttctttcatttacaaaaataaaataaaaaaaaaaagttaattaggatttttatctcttaaactttgatatatatcaaatcatgtctcttgaactttttttaccgttaaaaattctccctgaactattgagattatcaaatttaaggatttttgtccaatttcatttaattttactaatttagtgattgtttatgtactaaatcatgttttttagattttaatatctaccaaattacgctcctcaaactt

SEQ ID NO: 11057 - DNA, 542 bp, Cannabis sativa
cgagatggaaatcgtgaggaatcaataggctctcctcttgcagcgttgttgtagggcctggagccaccatttctggagccaaatgtgaggttggctgccattttgttggagagatccatcattgtggtatgcctttcgagtcgtgtttcatgagagaggagcaaggcttggacttccttacgagaaacattgtcacttcgggtggtgatgccagataccacagaatcaaactcaggtccgagaccattgagaagatgcagaacaagatcaagatcagaaataggatggccagcaatggcaagagaatcacacaaaactttgatcttatcaacataatcagagatcgattgattacctttctgtatattcgacaattgactcttgagttgcaacaaccgagccttcgattgactggagaacttctgttcaagagcagtccaaacagcattgaaactggtgtagctagccacagtacccaggatgccttttgtcatggaggatcggagctaagaaagaaaaagtcgatctttcttgcgccattg

SEQ ID NO: 11058 - DNA, 964 bp, Cannabis sativa
caattaaaaatggtcatcatgatacatctcacttaaattttaatgtaatatatatttatattattgcaaatggttattatttaataaactatgaaacattataatctagggactaaattttgtgtttaggatctaagtgttatttgacaaattattagatgattgtagtactaaaaattatatataattatatttggattagatatgaagttaatattgtagtgataacaaatatctcatttagtttagaaaaaatttgaataatttaaatgttgaaaataaagtttatataagctatttttttaaataaaatcatagaattttattaatggcaatttaattaaaataatagtttgcaatgtaaatagaatatctttcctgttggaggtacgactatgattaaaattagaaaaacgagtcaaataattagtcgtctaattctcatattgtttgacaaaaaagaaactaaaataaaattaaataaaaaagattgcagcattaattaaccataagaatacatatattatatatgtttcatccaccgctcacaatatgaagcaatagaaattattgcaataggttcattcaacttcgagcagtactcagctattgtatgaggtacataattacactactaatactctcttcagtagcagagaacttgttatcactaaccactaacaatgatttgatgtcgagtcatcaaagaacaaacaagaccaacaacgaaacaaaataaaattatgtcacgcagacaagactaaaacactaaaattcatgaacagagacaagactataaaacactcaaaactatttcacatagacaaaattaaaatactcaaaatcatgtcacagagataagactaatcacaatagtaaaaattaattgtagtagcaaaatacaaccttgatcaagccatacttaagcccaaaaagaaagtcggcagatctagccagagaaaaa

SEQ ID NO: 11059 - DNA, 926 bp, Cannabis sativa
gagactttatagtttttttatgatcgtatatcatagttatttaagataatttgtaaatttttaaaaaatctaaatattttacgatgcccaaaataaagtttaaatattttgttttacacaaaattattttttctcatataaatggtatgtaactgtttgaatttttatttttggcactgaaaattattcataattatttaaaaatttacaaacggtcttaaatagctacaatatacgtgattataaaaaaaaaaaaaataaactaaaaaaaatttctagataccaaaagattctaccaaaacattcatttaccaggtgtactagagaaatttccaatagttaaatatcactttacgatgcaactttttgaactatattaatataggaagattttattttaaagagtgcatcgatgtatccctaactatttcggcatctaaaagaattttttagtcaagattttttatggtggtgtacgttgcagttatttaaaacatcctgcaaaattttaagaaatttaaaaaattttaacacgctaaaaataaggttcaaacaatctgttgcatgtgtgacttttttattttatacacatgtgaaatagactatttgaacatgttttgtatattgtaaattatttagaatttttaaaattttacatgatatcttaaataactataacgtacatgattataagaaaatattaaactaaatttttttcttagatacctaaacaaataaaaagatgtatcagtacattctttttaagatgtgcattataaaagcacccgttaatatatatttcctaataaattttgttaatattttagagcttttcaaatttgttcgattcaagagtttttcaaatttgttcgattgttggaatttaatgatcatctttatgcatattatcctcattgggatgggct

SEQ ID NO: 11060 - DNA, 601 bp, Cannabis sativa
tatatacaagtacatgggaaagggaaaccaaatcaattgagcagcagataaccacaacatggtactatgatctcactcgaagtttactatgtctatctagattattaggtaatattttcactagcaacccaaattcccagccgacaactcagttatgaattggggaattcgaagctctatttctttcagggctagatatatataactaacgatttgcacctgtggtcatgtggataaaactgaagatttcttctcttgtataatatattttagaggttttttttatttttacacttcaaaactgtttttttttttttgcattttacgaaattttacatagaaactcctattgcaattagcgctgcaacttaaattgcaacaaaaaatcgtacagaaactactattgcaactagcgttgcaatcattttagaaactcaaaccgtaaatttgaaaaaaaaagttaaaaaatagtatatagggtaattcgcctgataaaatatattttatcattaagcataattatagctaaatatcattgaatataccagaacatatacatagcataaggcattagtaataattgacgatgcatttaattaga

SEQ ID NO: 11061 - DNA, 743 bp, Cannabis sativa
aaaagaaaacaaaaaagaaagaaaattattttctatttgttagtgttatcgttttgatcaagaatctcaaaatactttcacaatttatttatggtggttttaaattagtagttaggagtgagttttcttttcaatactattgagtctggctatttaattatggtatttgtgctctctaagatatcttacttttgtaataatttataatctttgttaaaaaaatattactatccaatttcactaagacatctgtaatatatgtctatttttaatcagaataattgcttacgaaataattgtgcatgttataggattgatagcaaattattttaaatggataattttctattattttttatatatgatgtatataacttaaattattattttcaatgaagtgctcattgtttaaaatagaataaatgcatatagaaaaagtaaaggattatttcacaattatacaaaaataaaattacggttgtataaaatttaaatatttttataatttttatgattttatttatagaaaatatatttttttgatgtattttatgttgtatgtatcattgttaatttgttgttgattttttattgttatttagatgttatttttatataatttttatattattttcgtattatttttataaaatactataaatatgtaaaagaaatcgtaaaaattttacaaacgctttgtgtcactatccctagaagtaacgctaggtgaggaagccatttaa

SEQ ID NO: 11062 - DNA, 654 bp, Cannabis sativa
ttttgtctatctctctataattcgcgacctcctctcattaaatagagttttttagcccaaaacgagaaaagacaaagttctcctagacccgtacagagtcggcaccatggtggccaatagtctcaccgcgggggctgtagaaaagtgaaaaatgggatttctgtagtccctcgtcgcggccataaatcgtgctcatcgcggccatgaatattagtcgcgaccaaaatattcctactttaacctctctcagtagaatatgcataactttcacatacaaactccaaatgaactgattcaagatgttttggaaagctaaaaaaagatctaaaacttttatgttttgacttttccaaaatctaatcagaacatagtcgaatttaggcttgaatttataagtttactttcttaaaaaaatttctctattttatagatcaccgttttttgaaatttgaccaatttatacattataagtgtcgaaacatgaaattaaaaaaactagcgtaattttattccaaagataataacaaagaagaaaaataactataaaaagtgaccggaaacgtaggctaaaaataacataataccaattacacacactgaggtaagaagctataaaaaagtagcaactagccaagaacaaaaatccccaaatga

SEQ ID NO: 11063 - DNA, 560 bp, Cannabis sativa
ataaattaagtgaaattattcatttaaattagttcgttattcattttgagtgctaactaataaaaatatctaaaaaaaatccaaagaacaaaaaataatctcttaaaaaatataatattacaattacaggtgtaataaaatattttaaaaaataatattaatacgtgctaaaataaataactaatctaccaaaacacttcttaattacatgggtattgcagacttacacataaatataaatttataacattttcttagaaaaaattataaatctatataatttgttgagactcatattttaatcattttttttggtttaattcttttttccggtcctactattaattattcgaaattaaaaaaatatataaaaaggtacattagattttagtcaatgtcaaattattatttagtatataattaattattatgttttatatattttaatttaataaaatcatgaaatactgctaattttttcataaaacacctcgtaatagtatagtatcaccttctactgatgtggaactttcttaaacttgtataaaattataaaaaaa

SEQ ID NO: 11064 - DNA, 795 bp, Cannabis sativa
tatatatatatagtagtgagctataacatcaaatttattgcaataaataattattttgcatgttaaataattttagtaatgaaaaggacaatagtgtggccctaatgtgggacatcatttaattaaaaacctatgtataaatttgctgagctgatcttcatcaaaaaaagtactatacatatatttatcaactaataaatattaataagagagaggtaaagaaatgaaatattaattaattgatgagtcatccaaggtagattatatatagggtaaatagcgataagaatttaaagttttgaatttgtaagcagcataaattcaatatttaaatttataaaaatataattttttccaattttatgatttgtacagatttcattttgaatttattaaaagaaaaatttggaagtaattacacccaataatatatatagaatctgaaccttatatatctcatatttaagataataacaaaaattgtactgacatcgaaattagagaaaaaaatacagttttacaaacattgaatacttattatgttactaaaaaatattaaatttataatacttataaacttaaaactttaaaatacttatacaattatttatacatatatatattattaataaagaaaagtgtccttatctacctcatttatagtcaccaagtgtatataaatatacacatataaatatatataaaagatcataaatcacatgttgatgacagcactatttgatgatgatgatgaaattaaaggtcaatatagaaaattaaagatagagagagaga

SEQ ID NO: 11065 - DNA, 990 bp, Cannabis sativa
attactcatttaataatatacaaaaaatcattcaactcaaattctctctatccttttctctctgttatgttattcctcactaacaagtcaaagaacttaaataacagaattagtttaaagtttaatcatctcagaattcaaatctaattgatctatgataaactaagagatattaacataaaatagatataacaataaaattataatattttttctactttcaatatcggttcagttcaatgtaaatttatacatccgatttaaatctattttattaacgccttaaaaaagacataccactcgtttttattgtaaaaagaccactagctgataaaactttactttgcacaccaatcctctgtcaacttcctctgtcacatctcaaaagataccctgataaaactttatccaatgcatcatcaattttaggcatgatcttcccatgaatggagaacaatttggaataaaccacacttgccaagttcacacaataaattgatccaactattcttcgaatttgcctttctttctaaaggcaaagaagaggtaaaagtgttattaaaatagttatgaatagcacatgcaacatcctctatgtttgagatcttactccatcaggaccaataagattaaaaattggtgtttttccctatacttaagcctcattcttttcaagcaagagcagaattcgaaaggcagggaagatatattctcctccagaattaaaaccgaaaaccttaattttagtcaattttttcattgttctgtaaaaaataacatataccaataattctcattaaaatactccaataatttttcctcatgtttgagcaaatggtcaattcatagagattagtcataaaatacgctgatttgtatctttgtattcttgaaaaagatcaactcaggactttatttaaagaatttgtaatgacagattgtcgtagattctcaaactcacacgaaactccttcaaaatagaattagagt

SEQ ID NO: 11066 - DNA, 699 bp, Cannabis sativa
ggttgacgagctccatcgaatttgtggtagattttggtggggtggtgattgtgataactggaaagcgcactggtgtacatgagataggctttgttggcaccagtctagggttccatgtctcaatgtctctaagtttcctttttataatcgctcaacaaatttaattgctcataattttgctaaaatgactcatagatatagcaagaaatatttggtggctgaggataattgagtttgtgtaagtttttgacttgtgtttggcagatgtctaatgaagtgtttcattttattaaaaaaaataaaaagattccgtgcaatatactactattttgatatttgaaattatctagaatttaagatcttccatacgttgaaactaatcaatataccaaatatatataaattgtttaaaaatatatatgtaaaaaaatatagataacgattaaaaataaatttacaaatcataaataataacttgttactcgaaacataatgaaccgcaaattaataattttattattgaaaagtaaataaagcatatcattaatggctctttctacaggggttcctttattagacaggcaaaattagcttcttctttttttcataatttttttgagtacttttgaaagggataaaaattacatgtcccaaaatttactgtgccttcctgttcctccaataaatagttgccatgta

SEQ ID NO: 11067 - DNA, 1202 bp, Cannabis sativa
attaatggggtagacttaagcaaagaattaacatcaagaatagaatcatcaacatctaaccacattccaaatatttttgtataagtttcatgagattaatccatgtccaattcaaaaataatttccgtgttaatcatgttaacttcatgtatttcttcacactcaattaatttagcaacattaaaaacgttcaattcaacagtcatgtttccaaaagataattttaataaaccattatgacagttgataattgcattacatgtagctaaaaatagtctacctaaaatgaggggtagttgagcatgggatttttaacaagttgagtatcaagaacaataaatcaacactaaaatagaacttatccactttaattaaaacatcttctataatacctctaggaattttaacaaaacaatcagctgattgaagtgttattgaagttggttttaattctcctataccaagctgcttataaatagaataaggcaattgtttaccgagatttttggaaactaaaatatttaagagctaaagaaataataaatggcgagaaataagagaggaaggttttttatatggttcaggtattaataaaccctagtccacgagtcagtctattggcctcgcttaggtaaaattgatgaatttataatgtgatgcaggaaacactaacactttttccttaatttcttttctaaaaagaagaagaagatcaaggataatttgagcaaagttttcgctatgtgtttttttggcttgacccctttgcatgaaaataaagggggtatttataagctaagtgatgggtgcgggtcaccccacgacccacctaggatctcttcttaaattctacaattggggtaaattacatacaatgtagagctgattggttggtcctgtgggtaaccttattctcatgcatattgtagctggataatagagatcattttataccacttgaacacgtgtcaagcaaaggttcaacctttaaaagtgacagacacatgtcattccaagctttctcctttccaagcagtattctgtagtgttcgtctggtagaaggatggtggtggtgcacgcactgccatgtctagatgtaagagacaagatcatattttgttaggaaaaacataattgtcaccttgttgacctggctcatgagaaaagtcgacatctgcgaacacccatgagggtcggtatc

SEQ ID NO: 11068 - DNA, 560 bp, Cannabis sativa
  modified_base (221)..(244): a, c, t, g, unknown or other
ttgagcagtacaataatcctgcaaataagagctcacccattgttcgatatcctcaataagaggcttatgagcagcaaaaagagacttaatacgataattccatatagcccaaatactaccaaaaaataaaggtatttgttagaatttggggataagatgaatgaggttccatctcaaaaccaattggcaatgggaggaatagtccattcatcttatatatnnnnnnnnnnnnnnnnnnnnnnnnaatgtgggactaactctaatagtatttgttttcactcttttgtatgacaatttgaagtctatataaatatagtaggtgctgccattgctgattactcagattttgtttcctcgaattgaatcaaaagctacaaaagatgataaggaagaaatatgtaagtgtattgtgtgtgcacaactaaagtaggttttatatttcatttagatcttcactttttctcatagctggcatagttaaaattatcacctatttatgaaggctgataaataaaaaagaaatattatagaattagaatagaatacttgtacagattaaa

SEQ ID NO: 11069 - DNA, 529 bp, Cannabis sativa
tgattcttttgactgttttccttacttcttatattaaataattcaatttcaaaaaatctctgtaaacaactatcaattagcaaaccatcatgatttacattatgtcaaccattcaataaaaatattaacaattattctaaatatagtggtgattacaaaaaagatacggtagtaatagcgactttgaatgtaataacatatacaagtgagtcagtgatggcaacagttttgaaatcttatgataattattttttatacggatttatcaattaaaaaaaacttctattttgtgaggatctctaatcaatttgaaaaattagtaaaatagttactcatactaacaaaataaatatatataaaaaatatgaaaatttaaaatataatatgatttcatgatataattatcactaaacaaaatataactgtaagtaaagtccaatttattttctagtttaatataagagagatattatcttgtgttttatttgtgtaattttttttaaaaattactaataaaaagagccttaat

SEQ ID NO: 11070 - DNA, 863 bp, Cannabis sativa
tttttttttttttaaaaaaaaaaaaaaacattaatattcaaatttaaactcactctcttatcttttatcttatattaaatgatcctatataaagtattttttttaatattccaattcaaatttaaattcattacatatatctaaaaaatatttttttattatttttttttacggaaaaagatatcttattatcattattattattattattattattatttaaaaaataatagaaaaattgtttgacatttctaaaaaaaataaaaagtattatgaaattcaaaatattttggttaaactaaaattataattaacaatcaattttgaatattattataatttctttataaataacacttaaattattttttttcaataaaaatgatttgtttattgaataatattcaaaaaaacattagttatacaactaaaattatactttaacaaaaataaaaattaagtatacatgcattgcacgtaatattaacctaatatatgttaatatatataatatatattatattgagtgtaatgttatattatatgccatgatatttggagtattttgtaagatttgttttgttaagaaataaaattcccccactaccactattgttgaggtggcataacagattttgtgtaattcttaggctaacaacttttacacttttgctagcatattcttttgtcttataaaacctttatataatcggtacaattttctagatgactcttgtaatactcatttattgaatataaatataaagggcctcattggaagtgagttgagctttttattcttctgccattttttctctatttacaatgtttttaaacttggtatcagaaccactttctgcacc

SEQ ID NO: 11071 - DNA, 1117 bp, Cannabis sativa
  modified_base (662)..(675): a, c, t, g, unknown or other
  modified_base (725)..(731): a, c, t, g, unknown or other
aaaaaaaaataattagcatttttgctccttaaactttcgacgtactatctgatcatgcctcctaaaatatacatattattaaaaattcctcttaaaatataaaagttatgtaattatgtttcttctgttaggttctatttcttttactattaaaattaatatttttaccttgtcaactttcactaaataaaattttggctcatttattaaaaataaataatttaaaaaattataatattttattaattctaaaaaataaaaataaaaaactattgaaaaacatgataaaattattaaattattaaaaaaattaagtttacgtaaattttttaaattattttaaaaaatatatattttcaaacattattctatttaggaacacatgtcttaaatcttaaactaaaattactgaaaaatctaataagtaataggtaaatactattttggatgctatgttttgtaaaaattatcaattgaaccctttgttatgtcaaatgacaaaatagattccaaaatagtaaaaaagggacactcaactcaattgtcaataattttattttttaatataacaaactttaagacaatttttaacactaacagatatagaaaatataatcatatttgtcataacatctatagatcagattattattaagttttannnnnnnnnnnnnncagttcagggtcctatttgtacaagtttagaaaatacatggtctattttnnnnnnnaacaaaacagagggttcaattagtgtaacttttacaaaatatagagtccaaaatagtatttacccataaataatttaaaaaaattaaaatttttagaagaaaaaatcaagcttatttatatttgtaaactcacatcttaaaaaataatgaaaaataattacaaattcaataaaaatataaaattatttttaaaaaaagttagaaattaaactaaaaaatagttatgtttacttaaataaatctaaatttttagtaaaaaaattatgggtgttcataaaattacctgcaccacaccacataaaaaatacgtttagaaacacttcgtgagatggttgtggtttgtatttttgttaaatcgcacatattgatttagtttgcaattttaa

SEQ ID NO: 11072 - DNA, 572 bp, Cannabis sativa
gcaacatatccctgtgtgcccaatactcgagttgagacgtgccctccagctttgtcagacccgatcttagccagtccaaaatcagaaactttcgcatgtaaacttttgtccaaaagaatgttgctgcttttaaaatctctgtgaatcacaggaggactgacatgttcgtggagatattccaaaccctttgcagcttcaatggctatcctcaaccgtgtctcccagtccaaatttagagacggagcatttgaacctgcacacataaaacatgaaataaagttcagcagcaaactgcctcctcaaatataaaatattgcataaaaacttcaagtatgaaacaatagacagtagacactaaggataacacattgacacagcagaaagagtgccagcatattaaatatattcttttgaaagctggtcatctaaagatttcacactcagttgggaaaagatttacacattatctgatgcaataaaattaagatgcccattaattagtcaaataataactatgcagtgtagaagcaaaactaaaattagagcacataatttatccgttattctgacat

SEQ ID NO: 11073 - DNA, 532 bp, Cannabis sativa
ttatataatttgagataattgaagatttctcatggtctcatgagaattaccaaatattattttttaaaaaaaatagtattattttttagacaatttgttattatacaattacattttttgttaattgcacacattttttcaaacacaactttattatatattaaggagtattcttattatatatgaaggtattaatcatagtagaaatgcccccccacctatcccacttatttttcgcagatgatctcattctcgtggggagagcaacaattgatgaagctaaggatttttggagtgcttagataagttttgtgattggtctgatcaaaaagtgaataaactctaaacctcaatcttcttcagtaataacactagtaagggaatgaagagaggaattaaagaagctttgggtatagaaggtgtggtgggaaacatcaactatttaggtttacctctgttcaggtccaaacaaaaggatgcagatttcaactttgtgttggacaatcgtgtgtcgaaagttcaagactgaaaa

SEQ ID NO: 11074 - DNA, 644 bp, Cannabis sativa
agacttcagtaaaaaattaggaaatgtattccattctcaaaataaataacaatggtaaattaagatcaccttatctaagtccccttttagaatgaaagtaccaatgtaatgtaccattcaccatcaacgagaattttgtagtggtagaacactccatcactaagctgataaactaattaaagagaaaagtttagagcagtcaacatttctttaatgaaactccattccactgtatcgtaaggttttctcaaatccatcttggtcatacacaacgacctattatttattcaaactaggaagtacctgtcttaaacgaatacagtgaactttggtgatgactttataaatcacattgcaataagcagtattggactcaaaatttttactttgtgggggcttatttatcattaaaaaaatatttatacctacattataattacaatttattaggtttatttaattttgtgagggctattctactattttggtctataattaccaaattaaaaaatttatatttaattttttaaaagacaatatttttgttagtgacaataggtttaaaattgctaacacacttcatgttaggaatgagagtcaaagttgttgcattcatctctttgagaaacttgcccgaattcata

SEQ ID NO: 11075 - DNA, 828 bp, Cannabis sativa
ttttgatttaatgtgcaaacatatgaagatcctaggagctatgttacgatgtaattaaataatacgaaactttttcgttgttacttagtaccataaaactaacaagtataagtttaaaattaatactaaaagtgcagtttgtagtaatgtgggttctgaacattactcgtaagaagatttggaggtgcagtgcagggatggtgccaagaatgtatccatcaagattgaaggcacgcaattgtaaggactaaagatcaccaaaaagagtaatttgtctaatccaaatgaagatttgatggaagtaaatagttgtttggcaaaatgacagatggagtgtcgatggcgagaatggtcagaggagccgctggttggtattctgcatctgcagaggagcgagagactgtttgctgtttcttgaatttccaggagattagagactttccaaggaaaatgcagtaacctgagatagaccttcgtgtgtccaagcatgatccccaatctgcatctgcaaatgctcgaaactacagtggtgtgggagcaattttgtagaagaacaaaccttgtccaggggttcctttgagatattggatgacacggttggctgctatgaggtgaggggacgaggtgcttgtaggtactggcttagtttattgacagcaaacgatatgtcaggccaagcgatggtgaggtagagaagcttcccaatgaggctttgatattgagttgggttgtcaagtagaggacctgtctcattgtcaatattgatattgggttccatgggggtggagacaggttttgagccaaaatggacgttgagtgacagatata

SEQ ID NO: 11076 - DNA, 736 bp, Cannabis sativa
gattcggcttcacttcttaatccattcgaggaagaagataggtcagctttcgattcgttaaaatggacaatacacgtcgactttggatgcaagatctctacattcattgtctcttatttcttgatgtttttggattggaaggatgaaccgaaagagatgaggggaagggcgaacatgctcgaagaaacgattcgttgcgaaagcttggatgaagatggaggcattttgatcaccagtaagctcctttctttgattacgtactttaaggaagaagatatattcatgggcaagaaagggaagagtgttgacaatgtttgtttcgatcaaagagatcatgttttctttggttcattcttcaacactgttcactttctggtgattgttacaagttttcctttcttttctgtgaagttgggtaatgaggatttaatggagcttaaagaatttcttatagatcattttgttgagaagatgaaggatgtgtgtattatgatcaagaatgatatcgctgagttaatggagggtgatcgagtttacagagatcaaattatggagaggaggaggacattcatggagtttttacgccacaagaatagggaattgtggaaatgattattagctagcttttctctataattaattttactatattaattcttcttcttctttttttcaagtgtttctgatgatcatctactagacttgttagatagatcaatagtcgaaagcttcaagt

SEQ ID NO: 11077 - DNA, 760 bp, Cannabis sativa
attcactattgaaaaagatttaatgatatttccacactaaataggtttttttttaataaattatggaattttattaatagcaagttcaaagaaataataacttataatttaattgagacattttcttagttggatacacaatcagaattagaaaaataaatcaaataatcattcgcctaatttctaaatcgtttgacaaaaaaaaaaatagatgaaaaagattacagcatcacaattaaccttaaaaacacttatattttatttcatctaccgttcaaaagacacaacagtaaaaactattgcagcaaattcaacctcgtagcttgagcactcaaattgtgtaaggtacgtaactgcaccactaacaacctcttcagttgcaaaaaacttgttattcccaattagtaacagtgatgtaatggcaaaaaaagaaccacaacaaaataaaattaaaactttgtattttaatattatcaatttattatttaattcattaaatacaaaataataatatggtactaaactagttattttgcaactacaaaggcaaaatagaaaaaccaacaaagaataaaaatgcattacaattaaagagcaatattttctcatctgattacatatatgtattacaattaaagaaaaagaaaaggcaacccaccatggctctatcatattcctttcctaccacattttctaaaatctcaacagactgatcagaactaatatcacattaatcatcaaaagctaattttaattatgc

SEQ ID NO: 11078 - DNA, 501 bp, Cannabis sativa
actttggtgttactttccttaacattaaacattgattcctcatttcttattttgcagaaaacaaacaattaaaaagatcttttggttttgattcaactttccaattctggactattacatttgaaatcaacttgaatctatactatactccaaatctgaataagggtgtaacatgtgttaatttaacaaaggtataaataaatatatatatatatattatatgaacttactattacttagtgttatcttattcatttacaaattcttttctgtgtaaattttaggtttcgacgttatgtttttaagttgtagcttctgaatttgctgcacccactcttatatggtaagttcaaagtgtaatctaatgatgtaatatttattttaattttcctattttttttaactcgatggaaacattagtagaagattaataattgggataaatgtgccaataataatataaaaaatctcgatgtactattacacaaaatgagatgtaaa

SEQ ID NO: 11079 - DNA, 704 bp, Cannabis sativa
tgttacaaatatttaaagtatttttatttaaaatagttaaatagaagagataataatatgaatgtggcaaatactattttagactttatattttgtagaagttagtatttggattttttattttattaatcccgtgtttttcaaaataacacaaaataaaatttaataataacttaatttagaagtgttttaattaaattaattatatatttttgtatctatttacaataggttagttataattttatattataaaaataatgaaaaataactttagtattttattttatacaatattaaaatataataaaataaataaagttctatgtaaaaagcttaggtaaaacttatttatcatctttgtctcttggaaacaatgatggtaaatcgagcaatggataaaattggatacagatatcatcaaaattaatgttgatgcagttttgtttcacaaaaaaaattcatatggctttgagattttggcaagacataattcaggaaagcttttaaacttaaaagtcgtgtatcatgaaagtttacatgaaactgaggttattaaagctatgaacattaagaaggcactattaaaaggaaatagagattaaaactgattgtataattacaatacaagacattcatagtgatcaacgaatttggtttgattatttataattgtaaatctttacattttcattacaaaatat

SEQ ID NO: 11080 - DNA, 697 bp, Cannabis sativa
aacgtagttacatattttttgagtcctttataatatgtttagccaagagaatttgaaaaaatcgtagtttttatggcactaaaaatggcttaaacagaatctgaatgtagttggctgtacaacgtggaaaatgtcattttcaactttggctgtggcatttattgtcattcaaagtcaaaaatagaggctgatatgtataacttatactatatattaatccacttctagaatcgtattactctacctacactaaatggagctacaccagccaattctggtttcgtatatggatgaggatgacattatagataatcataaggatagtgtcagtaagtagtgttcataacttcagtagattgatagccatacatcacaatgttagaaatattgttgcagcccaaggtgattcgtaggcccattacacatgcctctctgcctcgatgttggaaaagctcatcataggctaataattaagcatttaatttttgtaaatatcttcattgtttttgtgcattgtaaccaattgttgagctgcacctttcacgtgtactgtttcgagaatattctttgtgtaccctagcactatttatacaatgcatttgattcaagataatctgagctaaaagcatttatttcattctcttttctctattttgcgtatttttaacttagtatcaaagcttgttttgacatgtgt

SEQ ID NO: 11081 - DNA, 656 bp, Cannabis sativa
gacgccatcaacgtagaagatgaaaccacacactaagaagacactgggattcctaaatctcccatctctttcacccttctgcccatattatacaagctttaactattaagtaaaataaataaaagtaaataaactacttaaatataagtttttaaattgatataatgtaatttaaattacaactacctaaataacttaacaatatgagttaggaattttttttttactaaatgtaagcataaaaaaaattaaatttcctatcactcaatatttaaaatgctattaatggtcatcccgcaaaaaccttcggcatcagagcgacaaactagcgatttgtgccatcacttgacctccgactgaagttgctaccacctccaatcatcgaaggcaagagatgggaccaagagtttccaccggatctgatatggccgtcctttgtacaatcaaccatatcgtttgataatatcggacacagtgggaatgcatttgcaagaaaacattaaattatctgtatgtggcgaatgtgctagaaaaaataatgttttaaaggaaaaaaacattgattaaaatattacaaaatagcaagaaaaaaaataataaaataatgaaatgaagaatacttaataaatcaatacagagattcttatggtgaccaa

SEQ ID NO: 11082 - DNA, 625 bp, Cannabis sativa
ttgcggttttgaattattaatatgtcattcaaaccgcataatactaatttttatatttatttagattcaatatgtgaaggcttaacctaagccaattaattactgttgaaacttaaaatttttttttcatatttattttcaagccttatattttttatttagtgttgctcaagttttgttgtatttgtgatagtttaattatttagtgataatccaaactgcataaatcgtaccgtattacaccattttttacggtacagtttttgcaatttttttaatttcgcagtgcagatggagcttgggaaattaaaaaaaccacttgtgcatgttagtatgaaaaaataatcaaacacagcaccgggaacaccctagtatttaccatttacagtgcaactgcaaacaaagaaaacttaattttagtcacaaacatcagtcagtgttcttagtcttgtccaaattagtttccgcccgcgctgggagggtacgagtcgatttcaaatactccgtttctcattctcactcacaggctcagctaaaaaagaaaagataagaaaaggtcttccatgttagggcactgatatcaataccaagtttctctttctcaccgagtctttccccacatgac

SEQ ID NO: 11083 - DNA, 660 bp, Cannabis sativa
tttatgtgaagcttatggagttcttgagtattcttatgattcaaagatccctccacaatgcaagattgatgtggggacggttactagactgaaagctccacatccatatggacaacctccctcgtcagaagcaagtgccaccacaacaacaaggagccccaatcaatcctcttgggtgcaaagaagcagttcatgatgaagagctgccacaacacagtgccaaccctcttgacccagccaggcagtacacgcatgatcagttcaactatcttatccagtaaaacatgcacatgcaaagttacatggcacgaaggagcatttttaatgaggggcaagttcaacagatgaactcccttatcacgcgaatgaatatcgggattgaggacacaaatccaccccaattccacccttatgaccatccaccgtcaccaaaccccttctgatgggggttcaagtaagtcctttctttggtttgcatgacacattaaggacaagtttaacagatgaactcccttatcacgcaaatgaatatcgggattgaggaccccaattacttggcaaatccaccccgattctagccttatgaccagccaccgccaccaaaccccttctgatgggggtttcaggtaagtcattctttctttggtttgcatgacacat

SEQ ID NO: 11084 - DNA, 648 bp, Cannabis sativa
tacactggttttgattgctttcaatagaatgaaaagggtagtgggagttggactttgatgctggtggtggaagcggtacaacccatttttaagtgtcccttgaagcaacaccttctttgttgccttgtctttcacaaaacaagaattggagtgaaattcaatgaacataaacattattatcaatagttaatttagatacactaactaaattcttgacgatttttggaacaagcaataactcttttaaaactaaatcactagcagagttagtttgtaatttgctacttccaatatgagaaatagtcacttgactaccatctccaataattaggtgatccttaccaccatactccaccttctagttgcattgctagatgaggaagtgacatggttattggctccactatcaacataccattgatcacaatccacaatttcaggtgaggctataaaggcattaatgtgacctcctccaccttgctagccttactgggtttttggatcatgacccatgtaggattcatcatatctgttataactgcagcagagtgaccatacatgccacccacttggcaggttggttttgagttgcttgatcttcttctccctcgaccttgatattctcctctgttatctgatgaactacca

SEQ ID NO: 11085 - DNA, 513 bp, Cannabis sativa
tttgtctctcggtccctgaatctccaattcatctgtttgccgctgtaagttcgccttggctctgtggttctccggccccttacccgtgagaattaatcacatacctggggacaacattgctgagctcttaagcaatctttgttcctctttggatccccctctgaggaccaaaatgctaatcctctctggtgtgactgtggattgcatttggaagaacaaaaatatcttgtgcgcaacactggctctcgttttagtgtggacgttgtaaggatggaaatcttcaacaaattccaggaaatgtctgcggagtcggacactgaacagagggttcccctgcagaccaactccttatccttccctcgtcttaccactgatagatgcatattagtggatggatcatataaggatgggaaattcggttgtgctatgattgccctttccaaaagttctgatgattggtggataagcacttcaaacggcctctgtacatcggctcttgatgctgaattgcag

SEQ ID NO: 11086 - DNA, 1022 bp, Cannabis sativa
gaaaaaaaagaagaagaaaaaaatctaagactgacagaacgttagagttaaaggtctgatgataatgtgttatgacttgagactaaaaatagtagctttatttattatacctaaagctttttatctcggtttttaaccaaaaaactgagatatataaaaggttcgtcctaagcaaattaaaaggttttggttaaacccttttatcctgatttttagcaaaaaataaggataaaagagtttaattaaaacttgtttggctcccgctattgttattatatcctactttaaaagagaaaaatagatttttaactaatcatccaaataaggcccttgatatatacatatgtaatttagagtttgtttggctggtcaataaaaattcaatcttgaactcattttttactattgattttttttaatgttcaaaacaggacccttgtctaaaaaatattatatgttgtttttgaggtgctaagtctaaaagtgggataaaagattgcaacatatcttttatcccactttttatttttgttaagaataaaaagtgaaataaaagtatcatttcttgtagtgttagcactcaggttgacatttcggactagggttttaattttcaaatacgtcttagtgcacattgttcaaatttgtacttatatatgagtaagacttgtcacaacatgctaggcaccaaaatcagaatcataacacttcctatttgaggcacttcggcacccgttgcccaggtcaacctggtgatgcacccagcgcccctgtcaacctggggcgcttccaaccgcttttgtgaagatgtttctcaagtattttctttgtcttcattcaaaatgaggaaacaagtattctcaagaaaaaaaaaaaagatcaacttagaggccaaacaagtgactattagcgcctaagttaacatatttccaacaactattcaaaaaatgagtgtgttcgggaagcaaatggagccatcaagtgacttagaattaaggctaattaaaatttataaatacaat

SEQ ID NO: 11087 - DNA, 571 bp, Cannabis sativa
ttattgggtagattttaaattttactactattattatattttctctatcttttattaatttttatatctgtgtttagttatattttattaggttttaatttttaaattatttttactttatatattttattatttgttttaaaaatttattcaattcttaactactgactgtcatttagtttttaattaggttaataaatttttttttataaattatcgtattttttaaaaatattcttatattttatttattatctagattcattttatgtgaaaatagtttatagtttatgtttttttaatttgtgccattttttggctagtttaggccattttatttggtatttttgtactatattatttggttagtctgcagtttgttgttagctcgtttgtgcatggattcaacttcaaagagtgttattgtagatttttacagataagttttaaatcttgcttataattatattttattaattttggaggaatttctttctatcattttataacattgttttcttatcatttatttgtgaggcaattgagtttttgttacattttttaaaatagt

SEQ ID NO: 11088 - DNA, 723 bp, Cannabis sativa
tgtccttacccactagattttgtatcctctagttttgaagtagcgtctcctactacttcgttcagtatgagtagcatgtccatttccccttgtagggtctagtggcctggtttcttgagaatattgaggagaacttactggaggagtcttgttggttctctcattgttgcaaggtcattcaacatcagtgggagagcccattggttggtgctctcgagcttgagtcctctcgggctcttgctcgaagatatcttccctctgggaggtctccacacctagtgtttgcctagtgtctgctcagtcaccaagtgcagtaatggtgttcttagaattaacgattttgtcttaagcattagttcccacgtgactagctggtcgaaggggtgtctccctcaccaactcagaaagacctctttgggaagtagttccccgattagagcaatatgcttctctaattcgttgagataggttagctctccgttgttcctgttcaatgcgttggctttcaatattcttcaagttttccacgaaccagtgttgaaactattcatgttgcttatcgagacagtctcccaactgttgttgcaagtaagccacagtctggtttagatgagcgacctgagaatcgatctcctccaggtcgtctatctccacatgtggctccccaggtgggatctggtcgtttgtgatagtatgatgagtaattatggtggccttggagga

SEQ ID NO: 11089 - DNA, 1639 bp, Cannabis sativa
attgctcagtaggggtgttcatagaatctgcactccgttgttccaaactccaactaatccagaccaaaccttttgagaccagaccaaatgaattcggtgtgaattttcttgtcaatccgaaccatttaaaattctctggttcaatcacggttttaaaaatctcggtagcagttcaaaccaaaccaatctatataattattttattatacctaatatatgttttttgaaaaaaatgttaacattttagaacaactttagatagaatattaatattaatttaatattattatgatactaattttttattattatttatacattataaactaactaaaagtagaaaaattatcgaaagaaaggaaaatttattgttaaaaaaatttgaagcaactgcaaaatacacaaattatggttttgaaccaaaccaatctgtttttgagttgatttattttgtttggtttaatcatttaattggtcttgtttgattttgaagttttaaaaaaacgttatacaggtttggcttaaaaaaaattgaaaatctagaccaaactaatccgtgaacacccgtattgctcagtttgcaacttggtttgaaaaacgtagttattgagtcagtgaatgctatccctttagctttgggaaaaacaagctactgtggagacttagaagttgtttgattgtgtttttagttttttgttttcagaattgtgttttcaaaagtgaaaaaaggaaatagtttttataattttaaaaatttaatagtatttggcttaagttttttaaaactatttttagatttttttttttactaaaaaaaattcatattctacaccataccataacatgaacccatccaactccggaccggatcctggatctagacccgaatctggaccccgacctgaccctagacccagactcagacctcaacccaaactacgacccaatttcgggatccgagtctagggtcttggtctagatccaggtctgagtctgagtcatggtcccagtcggaatttgggttcgagatccgggtccaaagtctgggtatgtaagtaaaaaatgtaaaatataatatatgttagacaaaaataattattttaaaaaattgaaacactatattttgatgttttgtattttttagttttttaaaatttaatttttaaaaaattttgccaaatgattcctattagttttaacttttttttaaagtgagaacaatttttaagttacgaaaaaaaaaaacagcccattagagagcatcattttgaacattgaaagcttagcgtcattttgaacattaaaagtttaattttcaatttgtttttagggaggccaactgtcttactcattgtttagccaaatatgctcttaattatgggagtttgtgctattgggaataagaatttctccttatttcttgtgctggcatacatgcaatgtaattgtctcttcttaccaagattgaactttcaaaaaaaaagttatattagtggtgtgtctcatttttatcaggctccactgccttgcattgtaacatcaacaatattgttgcttaattagttatgctagtgggtgagaacgccaatttaatggattagtggtgcctcattcctgaccccttaataattgtgcacat

SEQ ID NO: 11090 - DNA, 709 bp, Cannabis sativa
acaatgttcaaagacttccaagatagaaatctaggccctttgcggtatggcgttcatcaatgttcgtagttgctttgttgaattgtaatatgttgtctgtagattttatttgctttgaaggttttgtttcaaaatttgtacctaaagacgttcttttattgaataacaatacaatagtgaacatgctttgtttgttgtgctgaatctatttgcgatttcatgacaagtgtcgtagtgataactaattatgagccttatttttcttttctttaacagaatagaggattggaattgtttagtttgtggtcaaggattgtgaaagtgaggaggaatagttgggagagaagaagtggagaggttaagaagtctggaaatcaaaataaatagcattaattccttggaccgttcttagaaaagaaaaaagcaaaaaagtctcttttaataataacatgaatggagaaaatcttgcattctttaacttagcatatgaatagttttttcttgcagcgaaagctttggaacactttttttctttcaaacatatttaattacggttattttttctttcctttcatttcagttgaagcttttcgtttttgacttcgttgtgggtactcttttgaccttctagattgtatttgggaaatttgattttttatgcttacatatttttaaaatttttccgctaaactcgtaatatttaatattt

SEQ ID NO: 11091 - DNA, 1201 bp, Cannabis sativa
ataattacaattgattaaaccattaatcattgtcaacttgggttgttctttttggcaaaacacaagatattctagttttaatcattatcttcaattacttctctacaacagtcggatctacctttgaattatttcactatgttccatttctaccttcccaaatcaggtacaccaaaccagcaattgcagctgaaaatatgttcttcttaaataggcttttctttgatctttccatccacctcaagatggcttgaagatttacatcttgtaaatttcagttcagccacatcttgattatttgtagacgctgctgagagaaaggacattcaaaaaaataaacgagaagttgttttgatctaaaaggttgctttaatccatgaacagatttaagcaacttgcataccttttgatctttccatggtaacacatatctttctcattgttccatatatatggtttcatcaagatcgtaatttagaaaagcagtcttgacgtccatttgtcatatcttatattcattagttgtagttatagaaagaagaatgcgagtgaatttaagcattgtcacaagagagaaggttatgtcatagttgatcccttctcgctgtgtgtagcctttggccccaagcttatctttaaaggtctttacatttctttcagcatttctcttcttcttgaaaatctacttacacccaatgggtataaaatcttcaggtggagtttcatatacccagactttgttggtgtgcatggagtccatctctgaatacatggcatggcatattccacttgtctgagtcaggtcattcattagttctttgtaagttaatggatcgtctttgtctatgttagagacaaaaaaatgtgtttcatgttcatagcggacatgttgtctcataatcctctcactacgacaatgtatcagggttttctttttaggaaccgtggtaaccgctattggtcattcaactaatagtgcttaaattattggttcaaaaatcttattattgatttcctcaaattttctctgaatatcttaccatcatacacttcaactctaggaacaagtttcatgacaaaaaaaaaaacttaatggtaaaaaagagtaaagtcctcgaaacttaataaaaataaaacttgagttgatattatttgaatatgacaatgggttcacttttttgttgttttgtagctatagttt

SEQ ID NO: 11092 - DNA, 826 bp, Cannabis sativa
ttttcgtcaaaatttttataaagttaaaccttaatttatataaatatatatatatatatataagtataatataaattataagaaccattatgtcaatcaatgccatataaaaataaacctttaattaatttcctcatttgataaagtgaaagaaacaggaggaggaatggtaaggtcttgtaagaggtgatcacatatgtacgtaataaaaggaagaagaaaacaacagaggtttctttgcatcgtaacgcattaatgtatcatatgtgtatataaaaattatcgtagcaggtttggactggaaaagagcaatgtaacatttaaagactctactcaagttgaggacaaaataataaaacagtcaaacttcattttcacttttacttgctcataatattgtacatttgtactactgacttctgcaaaccaaacaaaataagatcatgccaattacttttctttgttttcgatatcaaaataattcctcaactccaattccagaacttgattcattaatgtacatgtttcaaaccttctattgaaattatgatttaaatttatttttatttattaggacaatttctttattttttagtggattttttatttttctacttcaaaaaacattttttttttttttaccaaattccatacagaaatgagaaactcttatagcaactaataaatcaacataaattcgtattgcaacccacatagaaactaccggagcaacccgaaccgtaaatttagaaaaaaaaaattaaacaataatatattaagtaattctcctatttcttattggttgagaaatttaggtaaatgaaag

SEQ ID NO: 11093 - DNA, 884 bp, Cannabis sativa
tactaattttatgaatataatagcattaatataccatttaaccatttaatgttatacaagtgctatgcacgtggaacaaaatatttatgaaaacatatcaccggtactcaaagctattataaaatatcgttatataatatatttaagtattaagatttactgtttatatatgcacccaaacaaataatagtacaatgtacatctgttccatattttcaacatttaaaaaagttatcattctattatttttatatgacagtgcacagttatattttagtgtcagagaataattttgttttttataaataatttcaatagcaaagtcatttatatataaatctaattatatataggagaattatattgtacatctaaaaattaaaaaatatactaatagtttaatgagtagattgcatagtattataaatgtgtatccccaattgcacttttcttcattttcttaaaataatgtgttgatatatagattatatagttgtgctacaaatgtttatttaatgagctaaaattaatcgaaattatatgcatatatttttctataataactctaaaattggtaacatttattataattcaggtagttttgaaaaaaaaaattatatatagatttttatatatactaggtagattttacgtgcaatgcacgtatacttaattatatactaaatttttatttaatttatttgttaaaaaaatattacgcattttagttatagtgatggatgtcatatgtacttaaattaattaaatgaataatgctatattgaaaagataaaaccttttgttaaattataaaataggattattgtttaaagttttaaaaaaaaattaaatacttaaacaaactattaatttatattaataaa

SEQ ID NO: 11094 - DNA, 742 bp, Cannabis sativa
acttccataactatatgaaggacgacttatggcctatcaattatggctcgtctttagattatctcaaccaaagtgaagctctaatattctatgtaggtcacttatccctttatttatacatgaaaaatttcttccctttttctttgtattaacccttctctttttctatgttttttattcaggcggctctgatggtaaaccttggcttcaaatctcaccagtagaataccactcttcttaccctcgaacttaatgaggctcttaagacatgtgaagatttatcatctaaaaaatgatctacaattggggagaaggataaattcaaaacacaagtcaacaatctccagactaaaatccaagaggaaaactcaaggatcaaagctttagaacagagcttgaaggatgttactgagaaagccaagaaagacctatcatataaagatgatgatgccaagaggagggttaaagaaatggcccaacaatctcttttaaaagtttggcaaagaaataaaggcattagccttagcttcctaaagccaaatgtggcgaagagtgtggccattttgtagaagatggaagaagaaaaaattgccatggagaagattcgataagctggatagggggttggagagattgaaaatgaatctgaacaggtggtggctgaggctaacaaggaagtttaagaagaagaagaaaaagaagaaggttgtcatcaaagtttgaataactgctaagttcttac

SEQ ID NO: 11095 - DNA, 510 bp, Cannabis sativa
tctcatataatataagaagacaacatgcccacagcttctatgacgagaccttctacacgatctcaagatagtgctcttccatctacaaatgagaatccttcatcaaaagttcatcctgatgttacttctgctccaatggccaatcctttggctgctccttgtaaaaacaccacttccaagccgcaatctcagagcgtctctgagactcttgatcaccagtctgcaagaattgaagaaccaatagcagatcaaattcaactatcccagtcttctcttgatcgtaatgccaatgaagatgtctccagtccattcttcctcaatttagacgatcaccctagcctagttcttgtctccactatctttaatggtgccaattatcaatcatggaagtgcatcatcactatggcattgactgcgaagaacaaaatcgccttcatcgatggatctcttccacgacctgatgttggtaatcatcttcttaattcttagcttcgttgcaataatatggtt

SEQ ID NO: 11096 - DNA, 592 bp, Cannabis sativa
  modified_base (311)..(312): a, c, t, g, unknown or other
aaatagttaatattaatctatatactgacttaattactttatactaaaacaaattcaattaagctataaaaataaattaaattacatatatctatatatataatatgttatatcatttataatagacttatttaacacctacaataaaactaattatatgtatgtttgatctagaaaattatagcctgaaaagtattagatctcgatttcaaaatataattaataatttttttttgttcaataatttattgcatcattgcacatagaataaaactaagtatacgtgctttgcacgtaactttcttctagtnnatatatatatatatatatttagtgcatattaaatttttttaacataaagcttaccaaaatttaaaaaatgggcacactttatattaatacctataatactcttctcctttatcttctcttttaacttcaccattcatactctccattttcatctatattgatggtagtctgatggcagtccgatgttacttatttttttttatataaaaaaaatggtagcatcaggccatcatcagatcatattttacatttatagatgttaaatgctattcattaagct

SEQ ID NO: 11097 - DNA, 880 bp, Cannabis sativa
cccaaaaaatgaaaatatttctataattgggtgtttttctaataaaaatttcattgtaaaactgagaaagctttagtgttgctgactcttgctgaaaaatgccagagaaaaatgaagatatgttaatttcactgttgaatcttgctgcttgattagcatgaaagtttatgcttattgaggttccattattattcagttcatatcaatagtagaattagtggctcatccagcaacaaaaaattgcaaaaatcacatgaatttgtgtgcttattccttgtgattcttgcatttacaagaactaatttggtattaattaaaatgcaagaaggtgttgggaaaagaggaactactgactatagttctgcattttgttttgtattagaccaaagagcatcttatccctcataaggtgatttgtgcattagtgtaatcatgtcaataaatgatactaaaactaattgcttgcaatgttggagcagatatcctcatacttgtatcatgtttactcttattcatttttcaataaactagtgaatttgcttctttttcatcttagttttctgcttctttttatctacaaactgcttcggtgaatgtacgcctataacctgtccaacattgtgtaaccaactgctctaaaacaagcagaacacaccattttgagtaaacattttgttcctcaaaccaagtgctctagctttgacactcagtttgatcatacagtccaaattcacaacagaaatacagcaattttctgcagcagatcatgctgagtcctacttaaccaagctcgccaatccgcacaaagggcaggccacatagctgctccaaaccaagcacacagttttctttgaataaatgcaatcaaagaatagatgtg

SEQ ID NO: 11098 - DNA, 513 bp, Cannabis sativa
aacctgccacttcgaacttcatgaccatggtgcgccaattgacctgcatattaccgagagtctccaaccatttaattcccagaatcacatcggctcccccaagttctaagggaaggaaatcagtcacaactctaatagcccccaaatcaagttccacttgagcacatataccttctgttcggacctttccacccgtacccaacaacacaccatagcacgtggtggctgtaatgggaagaccagttgctgtcaccacctccatggacacgaaattatgtgttgctccgctgtcaataaggactgtgaccggttgttgtgcaatattcccagctaacttcatcgcgtgtgccgaagtgatgccaatcaaagagttcaaggaaaaagtagctaacgtttcatctgaagctacggtttctccggagtcaggtgatggtggtggtttatcctctgtctgttctgcctcatcgtcatcggaagtgagtatgattcggagcaacttttgatcgcaatcat

SEQ ID NO: 11099 - DNA, 517 bp, Cannabis sativa
tgaatttatcttccaattgtattactcatagttggattggatccatgggcggttgttgcctgcctcattctaatttaactgattacgaagatctggagcattacgattcaaatgctcacacggtttaggttgtctacgatttaactactcgtggagatcaaggtcgcaatgcctttggtcataattacttacataccttgttctcgaataaattttggattggtagctttgagagttgctaatactcttctagtcatatcgataataaccccgatccaccttcatctcacattttcatgtgagatgaaaatgtgtccttgatctactttgcccgtgggtccttgatcttgcaccacttggatctgtactcgatcctgtctcttgtggctcatctctcattgaccttctcctttggaagagatttgacataagacccgtacttaggcaagtgtgtgtactgtctttgtcattgcgatgaggcctttgtggatgtcttggaggttaacttgtcccaggc

SEQ ID NO: 11100 - DNA, 1351 bp, Cannabis sativa
ctagctaaccttgagaaacatgtcaatggcacgatagattccatcatgagatggtctggagaagctggagaccatttcagcaagacttacaaactttgacagaggtaagttaggatcgcgagcaatttcagcaagataaccatcaataagtttcgctactgaaaccttggaagcttctgagctatatcttgggcttctaatctccaaaaactcattttctataagaggatcaatcacagcagtatgatcacgagtcgaaaaatcttcaaccaggctttgcactatatcaacatcgtaaatggttgtctcatcagatggtgatcgaattaaaagatccgccactgtagcctcttcaagatgctggctgattcttctcatgagatcatgtctttcagcttccccacattctaatgaaatggttgcccttaataacttgagcaaaaaactgcaggggacactgcctttctctgtgggcaacagccttattatggtctccactgctaatcggcacttcaagacatcaccaccttgaatcacacccttgctaaaaccgggaagtcttcttagagcataagcatgtaatgcttctccaattatgtcattagatatctttcctttcgacttaattgtcgttatgacccgcttgtacaaatcaagttgaagctcacaaagatcttctacccaccagtcccttggaaccgtcggttgttttctagcaccattccatagagggtcaatctcagatgggagcttctttctgttataggtataagaccactccaccctggaagtttcaatgcaggcctttgaagcaacagaatcaagacaatggctgataactttaagttcctcagaccacgggaaaagagactttgtagtctgaagaacaataatggagtctttccagcttctaaatatgctggagttgagaaatacttcaatcttgtatatgagatttcctttctcaacagtttcgtacatctcaaggtactctgctgcacatcgagctgcaaccacattataggcatttagtgttactgtcataccatagcagaattttgtgcagatttcaaaagcagcaggaccgcccggaatatcatgaatgttaatctcatcactgttttcttcatttgtgtttgaaaccagtttctgcaagcgggaactcttcgacaacaggggaaactacagaaatcacaggatataagaatacaggagagctcactaatcaaattacgtcacatactatcctaaaactcttttcattgatatcacaacacacaaacaaattaaagcaggttttctatgtatacttctaagagcatatatgatttggtaaagtaatagagtagta

SEQ ID NO: 11101 - DNA, 777 bp, Cannabis sativa
caacatccaaaactggatagttgcacttcataaccactatagcactggggatcaaattcaatttactttttgtacaaattctacatctttcacctacaggtgagtacacacttgatctacacatgatgataaagagactaggtcatgaaacaataatatacacaaatcatgatcacatggttctcatcagtattcagtataaccaaaaccagacaaataaacataacgaaagaacaaattccttttttttttttttttttttattttagaaaattcaacaacataacagatgtaatttgaatgaacctaaaaagtcataacctacataaataattatataaaaatatatctggcactgagtttcctaaaaagtcataacctgcataaataattgtataaaaatatatttgacaccaaattgaattggtgtcaaaaactttttccatctaaccacaacaccaaaaattacactagaaaaaatattccttattattatattattttttttagaaaaataaaatataatttctaatattatatattaatttactaaaatcattacaattattatatcttattaatgatatttagtgtgtttaattttaattttaatgtgtgtttaaatttataatattgtaatattgtgtaatttaaaaaaaatatacaaaaatttaataattttttacttaaattataattaaaaaataatttatgtcatttatattttatttatacacaatatattaaattctaatcttataaacataaataatacta

SEQ ID NO: 11102 - DNA, 545 bp, Cannabis sativa
cgtccgacccatttccactgttacctggtataaaaatgtgacattatgaaattttatacataacatgcatatcacacatgaaattcaataaatttttagaatcgagaaataataatcataacacctatttcataaaaatgggtctataaaacaaaaaatacacatataactacataatacaattaattagtattaagtgtcttactaatttcatgtctaagtatgatagtcattacattattaaaactagtgcaaagcacggatgcattccttagttacacataattgattatataataatataactccatattaatacgtgattatgttaattagtgttgataatctatttctcattttaagatattacagttgggaattcaaatgctaaaagcatttcatgaaagaaattccaatgaaatgtattataagcatttttttaagtcaatcttattgatgtgatattatcgtttcatgggatagtatatattctagatcttcaaatctccaaataattttatatctagtttggatttttctttgtt

SEQ ID NO: 11103 - DNA, 524 bp, Cannabis sativa
taagttttcaattctctcatttaattacattgtacaagaaaattatgtgtgttttcttattttttccctctatttgtttagccaatagaacttaatcgttcaattatcatcaagttattaataacagtaaaattaatacatatattctaagtaattaattagattgaagatcattgaggtaaaaaaaagatataatattgatgatattttttttctaaaaacaatatttaatatatgctattaatttattaatataattatgtttatttgaaaaaatataaaattgtagaatatttaaaatttaagtaattattacaaaagtaacacatttttacaatttatatatacatttaaagatgcacaaacaatttcaaactattctaatcattttaattaactatttatttaatcaggtaaagataaataaatattttattatagaaaaaaatagtcttactcatcatcgcctccattttgtaaggtacaaacttattgaaataatttgttaaatttaattctcttac

SEQ ID NO: 11104 - DNA, 2173 bp, Cannabis sativa
tcaccttgtcaggtagcataacacctgtgcggtaccttgacttctctatgtcaaggtcagcctttcaaccatctcagtaataatgggctcatttttcacgcgaccgtgtgcctcgtgcacactttcgtctctcgaacaactcctgtcgagtcatgctcacaagcatccatgagtgcatccatgcatcgaggctctctagccaagatactcacattgtctataggttcccactatgctaagataaatccaaacaccgtcgctcacctaatcacttgtgaccaaggtagcatgtgtggcaatatcccaacactaaactgacgtgccaacacttctaatcatgccccattcgatactgtccaaacagtctccctccttgcccaaggactcccatacgtccatgatccaattctcaaagtaccatgcctccacacgtgttggcaggccctcgagataagccaccaaactagtagcataagttagacctctgtctctttctccaacatggtgcatccatcccatgcgcgtatgcaaactagtctacgaatgactacccatgtcatctcgtattgagactcgtggctaaggcacaccacaacgtctcttagaaatttaggccacgtcctgtgtaagcggcataccagcaagccaatgaaaacgtacccactaacctctggctgcattcttagacgcactattggatcaacctgatagtgtccatgagtattccatctcacagagacatatgagtccccatgtggtcctcatatgcccgccctactagtcccactgactagtagtatctcacttagcaccaaggtgctagggggtggtggacagctgacactaaatactccccccttaaagaacattctaagcttttagcctcctaccaggaacatatataattttttctctgtagacatatggtcatcaccatataccaaatcacagaggttctcaaatttgattgcaccattatattcgtagacccaaataaatgataaatactaagtctcgtcccgatccggacaatattgaagatatttacgaaaatttcactgtcgtacaaactaagcatctgtatgccaccaacatgcacaccaacatgcaccaccacttggccaacttgtacgacatcaactagcttgtaatgcatgcgtgcacacgacgcttgaaactcgatttctggcagcaaacttcctggtgcaacgactgataatgttttggtgataactgtttcaatattactcggagttggacgattcaagatgttttagaaagctaaaagagagatctagaacttttattcacaatatttttccccaaagttaacaaatcatagttaaaaattggcttgaagcttatttagacttgacttttgatcacaaacgaagcgtgttgagcatccaaaactaatttttttttaccacttgtatcctagaactcaaaattccatgataatttatcatattcatatcatttaacatgtttattctcattatgaattttaccatttaaacttgaaataaatagaaaacaaacataattctgcacaaaattaatataatcaattgaaatacgcctctaaaatactttataaaatgcacctaaaactagcctacccaaacttaacctatactcgccctcactaaactgaactaaagataaaaaaatactagcaagctccaagccttacttgaatttacactacactaccactactcacaagattcaattgttataagacaagattttcaatttgattgttcccaatactcaactttaacattcaaactcgaaaaggaaaatataacttgcaaatgacaaaaactattagaacttaatatacatgattgaaatcaatctatcttgtccacaacccgattatcaataagggtgcaagccttatccactaatgtcaacaacatgtgctttaaaatcaaaatgactaaattgggttataacgttaggcttagacaagggtagatgaaattttttatttaggcttacttataccataagtttttccaaacaaatcaccttacaatttttacatatgatcctgatatctcttttttctctaaatatataagagaacgttttctttgataaccttgcaacaactttttttatgacacaacattgccaaattttttcttttcttttctttttt

SEQ ID NO: 11105 - DNA, 854 bp, Cannabis sativa
  modified_base (432)..(437): a, c, t, g, unknown or other
ttgataaaatgcagcctatttttttgtagggatagcctcatttaaaactctccacaacataactgaaattcttgggtgaattccagctttccaaatccatttccatatgataatacccaactctgaaaaggttggatgtttgaaatgataatacgcaactctaaaatgatattattatgctttctataactttcttttttttcttatttaatcaagttctcttctttttaaatttaataaattaaataaacaaatgtaataggatgactctcttattattaatttccattggtgaatagtaaacatgtcataagtttaattttttacggtaataatatataataagttatatttctgaaactttcgtaaatatctggcgttaagtgtatcattatccacatgtcatattcttattggtatatttaaattaannnnnnaataaaaaataaaaatttaatgacatgaaccaattaaggactaccatgtgggcattgacttgacacctaacggtctggtacctatggaagttctaaagatatagcttatataatattactgtcaaaaattaaacttacgtatttatctgcaactgagagttaaatttaagtatttatgtcgtaaattactcatttaaaatatgaatgacaccttcttaaaacgggccttcccgatgttaggctatttttagtctattgtttggatcattttttagagttaattttcttcttcatgttactttttggatagttttgctgcttttgcacttgttttctttggtttcaggttcttggagttttaaaatgtaaaatttatcaactatcaaaaggacaagacagaatggagaatggtgaaaa

SEQ ID NO: 11106 - DNA, 870 bp, Cannabis sativa
aaatgggtttgggatttcttggttgggctgagagagaggaagagagaaggatggtttgaaatgtgaggggtagtttaggaaaattagtaaagtggtcatatatgaccaactttaatgactatacatttaggggaaaaattataaggtattttaagcatagaatttcaaatttccctatataaatagataataaataagtttgaagaggttttagaataatcacttgaacacaatttgaatagaaatttatagtctatatatttgaatacactaaataatataaatgcatgaaggagagagcaacaaaggacagtatcatttcaataccagaaaaaatattaaaataataattaacttcaaattgtacatataaaatctaccaaataattaaataaagagttaaattggatataaatgagaagttgtaataatgaatttaatcaacaatgcatcaagaaaaaaaaaaatacactaaaatattatattttaccttttaagcacatatatccaattaatgatgatgtaaagatcctaaaagaaaaatatatacccaaaacactaaaacaaattgagtgaagaaaagaaagaggtgagattaatgactaaaattgaaatagaataatagttagggttaattaattagcatatttatacttaatattttctaaaaaaaaataaaatagaataatgaatatctgataaccatatgtccatgaaatagtatttttaccacagtcaaatttatcaaggacaatatctcacaaaaacgataagaaggaatttttaattttttttttcttttgggaaaaaaatacaatttttggaaactgtgaaaaagagttggacagttgcagcaaaagacccagatac

SEQ ID NO: 11107 - DNA, 526 bp, Cannabis sativa
ttgattttgcacataaaagtattaccacgtgagcttttaacaaagtgtgcattagaggacacttcatgtacaccatacatacagcctatagctatttttaattttattaattaaggagttgagcttgaataatcgtaattgagttgattgataattaattatctagaactaaaatacatcaaattacgtttagggctgtcggactttgggcctaagtatttgtttttgggcaccttctcgaaaaggatcatcttgtctttcttcaaacaattttaaaattaagcctttacaaatttgtttttggttatttttttaaaaaaaaatcatactaatatagatattgttcattcttttctactcattcgtttttatttttaatcaaagtgtgattttagttttagttgtatatccaacaaaatcaaagtatacataaaaaaaaaaaaaatgcttttcaaagagaatggaatgtatttttatattatatatggacaaaatccattaggggtccatgagagtattaatagta

SEQ ID NO: 11108 - DNA, 584 bp, Cannabis sativa
gaaagttttgttgctattttgcctattgaagtcacccctgcttcaactgttacctcgagccacattcttatagcacaggttctcactgaaaactatattcataaacctactttctataatcaaatgtctggccattggaagggaatatttcttgccacaatctctgattgtggagatggttaatttgttcaaaatttctttcggttgtgcatgagataaatttcatgttttgaacaaggaactttggtactttcagagccctattgtagtcttttgctttcctaatactctgcagaatgtcacagcgaaaaacttgatgactactcctttttgggttcaaatttatcgtttgcccttccttagcaagtcaaaaatgcttgccactgccttggataacatcattaaagaatttattgatgtccatgaagactcttttgatgaaggatgggggccttccttaaggatttgtgttagactccctgtggacaaacctctactcagaggtggaatgatcagttttccaaggattaaagatgactttttgattgattttagatatgaacgactgccagaattttactttg

SEQ ID NO: 11109 - DNA, 579 bp, Cannabis sativa
aggacgtaaaaacggagccaagctttaaagctttaagacaaatccttatcattataatcaaatagataaactcgccatcatctttgttcccaccttgtttgcttttctttcttttcttttcttctctactccaaaatctgtacttttatttggctaagactctaaaatctgtacttgtttcttcaatattctccagtttgtacttgtttatatgagtgtatatttcccaagagaatagtaattggtttttgtaaatatgaaattctgcaagaaataccaagagtatatggaaggccaacagagaaagcttcctgctgttggcttcaagaagctcaaaaagattttaaagaagtgtagaagagattttcactctcaaaataacgttaatcgaacccttgaccttcaaccctgcccccaccaatgttcaggttaatatctattaatatttattgtagatttcttgattttttatttttgggttatcaattttattttttaaattctgggttttaattgatttgtttaatagttgactcatgaagattctcttctctttctctgctgattactgacccataa

SEQ ID NO: 11110 - DNA, 1111 bp, Cannabis sativa
taagtgaaaaggaggtttgatttcactgctactccttttttttttatctattgtccttaattcattgtacttgtttaacatgctttccatgtactctggaattgatgtaagtttgcctcatatttcatgttactgataaattaaaagcaaaatttaaaggtttcatcgatgatgaaaagattgagtggagaaagtatgaccctaacccaactcctgccaagaagcaagttcaaacaagaaggaggaaagcaaaggtagtggagggtaaggggaagaaggtggaggtggaagaggaagaggttgccattgaaattgaagaagagtcagtgtacggtcaatgctccttcaaccgtttaatttttatttgcaaaaacctaaacttagagtaaaatgatgtgatcctcaatgctggatttggatcattcaatagagaggatggcccatacattaacacccaactagtgagttggttaatcaaagatgttgacccaatcactagcatactggatttgtatagtaaaaagatccacttgtctgccgccatgtttggagatgttatgggtgtggaggatggaggtgatcctgtaatcctcgagggtgatagcgacactcggtatctggaagagatattgaacgttgtcgactacaccgtgtcgttgacagcattggagaaatctttgttagaatgcgttgaggtagacaacctatttttgattaagttttgtttggtggtgatagggactcctagtgccaaaaacgggctgcgatgtggtgtcgaggtacctacattccctattgattactagggacattcaccacaagaattggaaaactactgggttcaggtatctgatgaactccgtttttagattccaaaataagcatacgaagaatgtgtctggctgcaccatattcatgcaggtacattgattttgttctctttaatttatgtgaatgtgtttattaacttgatattttaattttttgatttattagttgaatctattactaatacattgtttgtttgccactgttactttacttgactcacgtctagttgaactttggatatgttgaacgaacagtactccctgttgatttttggggtagt

SEQ ID NO: 11111 - DNA, 602 bp, Cannabis sativa
aaaaaaaaaaaaaaaaaaaaaaaaaaaaaaaagagggaatcagttccaacaagtctgagacatataaattaaatagaatcagttccataacaaaatgagtaaaaacatacaacacacaataacttagaaactggttataattaaaaaaaaaaaaaccataatataagatgtagtggggtttgaatctcaaattcttttaaattatcaattatactaacaatggaataaacaaaggaagcaagttctaacctcatgtgatattgcttgaagtataagccatgcattactaagtaagaacttcaaggataggattttgctatatggaacaacccatgcttcacctccaaagtctcataacctaaaaccaaactcttttaaaaattcatacatatcaaaaggacaccctacaaataagattataaatattgagcataatacatagactgttgacaatttaagaatagtaataattttgaaaacatataaaataacacaaggtttgcacaattcgggttcagatctccaaaccaaaaatttaattatcaaatcaacattagcatttagtaataaagacatctaaaattaacaccaactagctctca

SEQ ID NO: 11112 - DNA, 559 bp, Cannabis sativa
tatctacttaaagtttatggaaaggtcaaaccttcgctctgctgcatcttctgtttcaaaacgcatcttaaacctcatgccaacagaaaatggatgatcaaggcttctcaagaatttacggacaggtatgataaatgctgacgagcttgccctacaacggacaatatagggcattctttgtcacttaatcatcataaagttaaaagtaacagggactccagtgcaacacattaacttgtagaaggaagaattaaaatatacatggcaaaccaagactactaatattaattaaaataaaaaaaaataaaaaagaagtaaaattgaacaaaacatggaaaaagaaatttaagaaatctatctgcaaaaacattttctgccttaaatggaagaaatgaaaaacattacttgcaatcttaagcatcatatgtgagctacttttctagatttatccttgcaagagtgcacaatgggccaaggagaagatcattggggaacaaagttatgaagggaaaaagcaaaacaaacattaggttacagcaagatatgtaataaattaatt

SEQ ID NO: 11113 - DNA, 625 bp, Cannabis sativa
caaactggtacccggacccagacccaaaccgagacccaaaaatgggcccgaacctaggacctaagaactagactcggacttgggacttaaaactcgaacccatactaggattgggacctgaactccgactcgaacccaaaccgagacttggactgatactgggactcgagaccagaactcgaacaagaacacaaacttggacccgaacagggacctagacttgaacatagatggggtacccagacccgggaattgggcccccaaactgggatcaaaacttgggcctcaaaacttgtatcgggatacaggacccgaccccagacccaaacctcaaccaaagacccacctcgggaccttggatcctgaactcgatgcttgggcctgaccagtagtcgttgtctagatctgggacttagaccttaactagaaaccaaactggaactaaaaccaggacccggacacagacccacactcaggaaccaaaacagaaacttgaacttgaaccggatcgggatcttggatcccgccgacacctagacacggacctgaacccgtaactggacccaacttcaaaccctaactaagacagaaaccgaggcctatgtgggaaattattttaccagga

SEQ ID NO: 11114 - DNA, 517 bp, Cannabis sativa
tatcaaaattgggcaacactaatgaacctaatttcaggctgcgatagtagtactaggatatgtgatttttttagaagttctcgtgttacatactaaaacatttttatgaaagaaaaagaaagtatatcattcaagaaaatatatgtgtcactctactaattcaactcgcaaaaatgtgcattcttccttgggattacacttctactatgacacaacctttctccatgtgccaaactacgactcatgtccctcctgtcacgatcaacagtaccatgatcgactacaattttaagggtcgggtctcacctacaagacttgatgcacctattattaagtctatatcttgtattttcttcattagtgggctattttacacataaaaaccctaatcaggttcgaatttgttcgattcataatgcatgacagcctataaaaagagtcttaccataatgtaaagggttctgagactcaaaatttaaataggatagttttgagagaaaagttgtaaaaactccat

SEQ ID NO: 11115 - DNA, 520 bp, Cannabis sativa
caagctgtggagggttaggaatgacaattaccataacaagacttcgatgccatatgaaatgatccaaaagatggtgatgaggagctaccgggagcacatcaatattatgactctggatattgttcaggaagggactaacaggggtcctgctgcaatccattggggccttccgagaccaggaagaatgaagtgttttgttgactacgcatctgataatgatacaggtgcagttgctggtgtcatatatgattgggagggctcggtcaagagatttggtgctaagaaggtaactgctgtctcttcttttcaaggggagctggaggcgattgcctttggtgtggaactggctcgggcttacgcagaagtgggggtggatttccattcagataattggcaactggtgaattctttgagcacaggtcgaagtctttggtggaatgcaagcttctctttcaataaaatccttagggagttagatggttttgattgctctgtatcttggatttctcgtagttttaat

SEQ ID NO: 11116 - DNA, 707 bp, Cannabis sativa
cttggttatcattcttgttctgcacactcttgtctttttgaaatgcaaaagccatgttggagttgggatcattagcattaccaagatttcctttctggttttcttcttgagaaaccagatggaaaacacggttgatttcaggaaggggttccattagcaatatgctgcttctaacttgggaataagaatcagttagacccataagaaaggaaattatgtattccatattgtgaaattcctggatctttttcattccaccacatgtacagccattgcaagtacaagtgggtttgtagttagacaattcttcccaaatggatttcaacttagtgaaatacattcccacagattgagcatcttgcctaagattcattaggcctttcttaagattgtatatatgcggaccgttcctttgatgaaatctaatttttagatcagtccaaatagtggctgcagattcatcataaaggatgctagaagatatctcttttgacacagaatttaagatccaagagattactatattattattacgaatccaggcattgtacaatatgtgatcagtgataggaggttttggaatagagccatcaagaaaaccaattttgttctttacagaaatagagagctgcatagctctactccaagaaacatagttatcctgaccagttaagggctgagacacaaggacattacctggattgtct

SEQ ID NO: 11117 - DNA, 538 bp, Cannabis sativa
tcaggactgaaataaacaacaaatataaatagatggaattgagtaagaaaaatggttaattctcgctctagctaacatactctttttattttccttttcattagaactctatcatctgatttaagcatcgacgacttatttgtaagaaatctcttagtactttgatcaattctagctgcgaagaaccaaagaacctccataagatggagaatagagaattgtagcttgtgtattattaccaagtctctttggtttaattttttgacctcaactatttttaagttaaaattttaggttttttattattattttttttttattttttaaatatatacttatgtaggtatagtacacaaatttattaattaaattatgtgagtgttttataaaaataatttttatgaaattgtttattagtaaaataattgtacaaaagaaaattattaaaataatctttttatgatcacagaaacgactgtgaattacactgagacagaaaaataaaaggaggcaacaagggaataggtaaatgctcagc

SEQ ID NO: 11118 - DNA, 730 bp, Cannabis sativa
aaaaaaaaaaaaaaacaattggaactgatgctttgggagtttctaatgctttaaatgcttcatttccagatttatcatatttacagatgtaattttttatgtaagttattttttattcttcttttctggatttattgtttctcgtgctaagagaaatattaatcaaacttctcatagactagtaaaatacgctatgtagttggatgaaaatatttgttggataaagaaattccttatttaagtttatctttttttttttttttgataattcctatttaagtttatctgttgttgttgtaaatgacttttaatttaaaataacagtgaatcttctcaaaaaaaaaattatatacaaaaaattaaagataaaataatgatacaaatactttctaattatacactacaattaaattaaatgtgattcccactcaaaatatacagtaaacattatacattttctctgagttttttattcaatttgtgcggaaatataatattttgtcaaaagattttatgagaaaaaattaaaaaaaaaaaataaaaaataagaaaaatagtgtaacgtaaatgattaccttaagaaggtaactagttaccaaaaattatttttccatagtttttaaatctttttatttaattttaaatttttctcgtaaaatattttttttgaaaaagaaaccatcattttgtaaattttgcccaaaaatataaaaacatataaaaaaaaaaa

SEQ ID NO: 11119 - DNA, 589 bp, Cannabis sativa
gttatgcaaaatgccctccctgtggctactgcactttgttgaagaaaagttataaattctgccacttgttccttgtgtaataatgcatgggagtcaattgatcatgccatgtttacttgttcaaaagctaagaaggtgtggagggaaactaattttcaatttgaccacaatcatgctcaaaatatgcacaatggtgattatctcatccatttatcttcaattcattccaaaccagaatttgaattgattatatgtaccatgtgggctatatggcatgagcgtaacaaggtgattcacgggggtgtgtcaaaatcaagcctttccattgcaacatttgcaagcacacacttggagaaatatgctagactcagatccaaaaacaagcctaaatcttcctgcaccagcaactatactgccactgttcaaaatcagcctcaacctgaccgtgttatggatcaaggcgccagtacttcatcagctgctgttactacaggttttcaccattctgctcgtgtgtttacagcttctccatggacgccacctacaggtaatggcctcaaattgaacgttgatgtagctgtcaatgcag

SEQ ID NO: 11120 - DNA, 572 bp, Cannabis sativa
tccatgcttattgggctcaaatttcgatcttaccaaagaagttgttgaaggatattgaagcagtttgcagatcatttttatagaaaggcacacatgaaagctcgagtccaggattggttgcttgggataatatttgtcaaacaaaaaatgaaggtggtctccggtttagaaacattagaaattggaatatagctgccatgggaaggtatgtttgggacattgcaagtaagaaagattgtttatttgtgaagtggattcataatgtgtatctgaaaaatgttagttggtgggattatgaaccaccttcagattgttgctggtgatggaggaaaattgtaggtgtgaaaaataaactgaagcaaaggacagatgctactggtttcgtgcagcagaggtacaaaattcagcatacctatcagctcctttttgacaacagggaaaggctctcttggtccaagaatgtttgggatagattaatcattcctaagcataaatttatcctatggcttgtgttctggggaagattaaacactaaagagaggataggaaaatacaacacaaccattgatttg

SEQ ID NO: 11121 - DNA, 514 bp, Cannabis sativa
tatgtatagatcagttgccacacttcattatattattatattactataatatataccatttttatgtatatatacaaacttagaaaggaaaatcaatacataactatacataaaatgtgattagcttattatacacacacatatatattttttgtatatatatttataactatacatgataatgcatacaagaaaatcatcatcatggtcaagtttgattgtgttgaaatattacttagttttgtttttctcattattatatcattgtttggcaacaatgtcacttgaagatcctactaaggtattattgatgagtacaagtacaaagaagattattaataggtgcaatgtatacaaagggaaatgggtttttgacaattcatatccactttatgattctaaaaaatgtccatttataagaaaagagtttgattgtcaaaagtatggaagacttgataagttgtatctcaagtataggtggaaaccccatggttgtcacttgccaaggtaatta

SEQ ID NO: 11122 - DNA, 776 bp, Cannabis sativa
atttatattgtatgtagagaaggatgaataccaaaaagataatatatcaaaaaatattatatgaaatacataagacattattatcaccatttatagagaacgatttagattgtgagttctaaaaataaaaagttactagtattttattatttataagtagtgatttagggtgtgagcgggttatcaaaattgaaaacactatatgaatatcctactaataaatgatttaacaatttatttatttatacaaaatgagaaactctaaaaaaaagtattgagatataaattcttcttttgttaaatttaataattaataatcaatacatataaaggaaaatataatagaagtccatactttttttttttaaaaaaaaaaaaaaaactatcacaatctaactttattcatgtcatctgttcaaatgataatagaattaaattgagttttactaacaaaaataacacaaaagagtgaagaataaaataaacaaaataaaagagtatgaattactgtaaattctatttgtacatctattgtaccttacttgcagaaatacatgacgtttgtctgagcatattatttttgttgaggaagattctactacaataaaaatatagataattctccattttatttttagaagggaatatactaaaagtcaataaaactcaagaaaatcaatataaaagttatactaaaatttacggatgcattaataaatagaatacaactaaaaaataattaagaaaaggaattaattaataccataaacaaaatt

SEQ ID NO: 11123 - DNA, 532 bp, Cannabis sativa
ttcaaatttacattaatttttggcacacccttggagcatatttttgctaagtgagagctatatttgaattttgcattacttattaatttgcatctccaatgaagatgctctaatgtaagttttttttagttcttttttttgtttttattttattcatattgtttataattaatgttttttttttttttaattttgccaaatttgtatcaacttttgacatactattagagtacaatttttactaaatgagttatattttcactttgcatcacttattaatttgtatttttattgaagatgctctaagtttgtttttgtcttatttatattatttataattatttatttttctagtgtttatttagtttgtttctctattttatagtacacatgtatcatatatagataaatatttttaaaatatgtgcatttaataatttaattattctctataaatttgaattaaatatatttattttgttaaaataaattaagtaatttagttaattagacaattatataattaattttt

SEQ ID NO: 11124 - DNA, 891 bp, Cannabis sativa
ccttttcgtttgaccttttgattgcgagctattctatctccctcaccacctatttctgcacgaagtttgaaataagtttgttttagccatgttagaaggttttggacatagttttacttataaggcgtaaaacgtattttaaccaattgaaagtctaagaacatatttttaccaatcaaaaggcttaaaacatatttttactcattcattagaaggctttttgtcattataaagcttttcataatgggtgataattgtgtaggctaatccatagggctcgtttggaatgtcatattaggtcgtattgtattgtattatattaaattggattacatattatgtttttatataacactatgttaaactttagtttatactaaaacattatatatttaagtatccataaaagttaatatcacaaatagttttaaataaaaatactatacagtagtaatactgcataccaaatgaatcctgagagaatttgctaatacatagtgtgtcttttttttcagctaaaagtacaaattggtttttaagttttgatagacaacattatcctaatggtaatgtgagcatctgttgtgccagcacatgaaaattatgcccgaggcacactgcttttctagattatttttttccttttctgtcttcttttatttatttattattatttttaatccctgtgtcttggttaccctgggtagtatagtagtatcattaaaatttggataggtttcaagaaagtgctcggtaaatattatgatttatcctgaaatcttttatcttttccaaattaattcatatattttatattctaggcattttcttgagaggtacatgtttcctgttttttatagtttcaaacgatcgagtcttctgagagtcttc

SEQ ID NO: 11125 - DNA, 596 bp, Cannabis sativa
tgcttggtcagaactttgatctccttaaacaaagtacacttctcatcaactagagccttcttcgcttcacccaccgtctttttagcttcagacaacttgacctttaaagaagagacctcggacttcattgcctcactagcaaaaagcaaggcactatgctcctgagataaggcatccttctcactcttcaatttctcatgtctcaacttcatcttgatcaaattagcctcaagaaaagcaaccttctcaataaggtttttcttctcgaattccaaaattaggcaagtaaggtcccaatttttcttctctgaatcaaggctgtcaactttgcccttcaaaaattcattgtcaacctctaaagcattgacttttgagatggtggctttctttgcagcaacgactgtttcataactcttcttatactgggagtagcccttcgccagattctctttctccttatccatctacggagcaaatttcatggcatgagcgcatctcaaagccgtctatagcaaaaaatactaagcagttagaatgtgataggcaaaacatttatacaaccaaaggaatgctaaaccctgttgggttttatgccc

SEQ ID NO: 11126 - DNA, 774 bp, Cannabis sativa
tataaatttccatctctaaaccgaaccgatccgaacccatcttaaacacttctgagtctccacaaccaaaccttctcacaccgaagcctgagacatggacgacgaaggaaggagttgaatcagagctctctaggatgaatctttcgctgtcttcgtcggcttcttcatccgcttccttgacatcttcatcttcttcttcttcttcctcgtcttcttcgaccggttcttggctctctggcatcgttcgtggccggtcagaacggcctggtaccgttaagatggctagcaactctgctggctctggttctggagacttttctggtccggtcgtgcggaagaatcagtaccgaggagttttgttcaagtatggctccaagcctatgcaggttcgtaaatctttgagtgattggttgttcattgtcttcatttgagtcttaattcgtctgaatgattagttgtggagctcgatcttgttgtatttgactgtgttttgaattgtttcgtttgtaaattcatactttcaaaatcttcaaattatttggttcatttacagctttgcgatgtttcacgagtgttgacattgtttatatgtggcacgggtttagttttagtagacagatgagtgtgaaccatgaacatgctcttatcaaaattctgaatcatagagtgttattaatcagttataaacttcaatctagaattcaattgtatgaggcatttcggtaggttggttcaatacatgttttattaacgttcacgggcttacaacttaaa

SEQ ID NO: 11127 - DNA, 581 bp, Cannabis sativa
taaaattttgccttctacgaatgaatgtagaagcgtgaaaaactttgtattgccatctccgaactgaagccaattctcacaagattttttcttccatattctatccatcctcccctccatctccatgatctccaactgaatctctgcttcaatttcaaccaaagaatctgttattggtttgttctgtacatcagccagccttcgatgtaattcttttaacttgcgatcacaaaatccaaagacctccgtattccatttcttaagatctcgtttagtgtatcttaatttcctttgaagaagacacccagcagtgttgtgtcgcacccccatccacgagttcccaattaccttctcacaatcaggtctagaagtcaaaagttccaaaaaatggaagggataccaaagcttaggcccctcaccccacgcattaaggaggataggggcatgatctgacccaatgattgggaatttttccacacaagcctttgggaattcagtgcaccacaacgcactcgtaaccaccctatcaagcctcttcttgaactttttactagcatatcttgagttttgccaagtagtca

SEQ ID NO: 11128 - DNA, 593 bp, Cannabis sativa
ttataatacaagactacaagcacccaaaggtttatactaaatttatgagaaagtaaccatgtgttactttggaaagaaaattaaagatacaataaactccttttgtgtctatttctcagtcaaagatatggaagccaatgctgaacaaggcttaccgctttaactatatattaagtgggtttaattgctattcaacataggcctcttcacatataattattctaacaaagatttgtttgtttattttttttcaactcaaatgtgtgaaagtagtacaaaacaatgggcctacgattataaggaacattcaaaaggtaagtctaaatactttgtgtgcttatattaaatgaatatatctacaaagagtgggcaaacactagcaattacttttttggtaatctagaaatttcgtaggattatagtgaatatgcaaagaacataacaatatacatgttaaatattatatttgtatgtaggacaggaaaattatctagttaaagtggtcaataaatctcaattgttgaaatgagattcgactgataatgtactaattttttatgaatgagagtattgacaattgaactggaagagaa

SEQ ID NO: 11129 - DNA, 647 bp, Cannabis sativa
cataaccagggaaaatccacgaagaaaataacacttgtcaacaagatggctatgtttgtgacggtgagagtaagaaggcctaggtttcttgcttctaggttaattcaaaggctaaacaacagtagccatgagaggaactctagatccaagtgttctttgttgttcttcttgaacaaccatggaaaaaaaaattgaaatgaaaagtaaaggattgatgagaagaatttgagctctcaatgagttataaaattcatttaatccagtgaggaattgaagcacctgatccatgttgtagaattcttgtagacgttgaagagcaccacaagtgcaattttgatgtaggttggaactccttaaattttccacaaagagatttgagtttggtgaagtaaaagttgatggattgatctccttattgaatactatgaagctctgccttcaactggaaaatttgaggtccattctcttaattgaaccaatcgatcagatcattccacatttcagatgcaaaattgaagaatatgatactttgtgcaatctctggagaaacagagtgcaaaagccaccacatcaccatgttgttacatctggtccaaaacagagtgtaagattgaagggaattagttttagaagactgccatcaagaa

SEQ ID NO: 11130 - DNA, 571 bp, Cannabis sativa
cgtacaatgacaagtaatactaattataagaagaagtctctaacaactacttttttttttgttgataaaaaagagttttattgaaagaaagcaaactagtgagtagtgaccacaaaagtagaccacatcccttaaacatttttgagattggatcttcgcacttggcaaggcgatccgcagcgtaattaaccgaatgattaatcaaaataaacacaaccgattggaaatcaaaaattttaaccaaacattcagtaaaggtaagataggatccccattgcactgggatgttcctcatttaaaatcatcaactagttgcatgcttaattttagatataaggggactaaatttatacttaaagttcacttgtcttagaataattttttatatgatctactaaacttacttataatataatatgatatctacttatagtataggacactttaaaatgtttttcaacatttctcatcattttaagggaaaaacacctcattcattcattcaatataaatgaagtagtaaattatatagacttgggtattattatttgatatgttataaaaatttcta

SEQ ID NO: 11131 - DNA, 703 bp, Cannabis sativa
gacttgtaaataaggatggcaaaatgtcttattgtatcgtgtttatattatattttatttgactcgcttttataattagtgtcatgcgtgttgattcgtgtttaatttctcaatcctaactcgacttgtaaaaaattgtgttgtgttcatgttgacccacttttacctgttttactattactgaagttaaagttgtagtgcaaataataaatttaaagtttcattaaaaaacttatatacatctatataataaaaattagatattttaaaaattttattttttatttttttttaaagaaaaatgaattttaaattttttaactcaacattgaattgttaaacatatatttttacacataatattattagtaataattttgaattttattttatttaaaaaatacgtgttaaatttgtgtaagcgagtcgtgtcgtgttaaactgctaattttcccaactataacttgtaaaatttgtattgtattagtatgtcttgtcaaaatccgttatgccacacccctaattgtagaattaacacttttttaatccaaaaacaaaacttctattaacataattgagaggctcttgattctctgtaatatttttaagtttaatgcttcggctgaacataattttcagatccaatttctattgcactcaaaatattaattaatacatcgttgattttttttttaaaaaaaaa

SEQ ID NO: 11132 - DNA, 539 bp, Cannabis sativa
attatttttttttttgaaaaagctgcataaatatattaaacaatagaaaagtttaaatttcacggttattacataaaatgttatcaggtatagatgagggattaaccataccagtaacattataagcgagagcccacttagtcacgttatggatcgcaaaattacacattttagaaataaaagaaaaattacaggtgcaaaacaaattaaagagttgtttacattgtagtacatagtaataccccaaagggaacatgtttcctttaaagcgttgataatcgcttttgagtgtcactctctgttaacacaaaatgatgtttctagtagactgctgattccatagtaacatacacgccgcagcttccctaatgagagaatctgagaaattgagcatgttggtagctatccacaaaaacaactcctggtggtccctagccaaagccaccacccatattatatcacaaccaatttcaacattacagttcattttgaaccaatcctccgggagagagaccaaataggagatagaatcggtgtag

SEQ ID NO: 11133 - DNA, 837 bp, Cannabis sativa
cctcgaacatcgaaggctgcccacgactcaaaacattcagcagccagtcaccaaaattactggcagagaccatgccgagggacacaccagatcgattccaacttgactgagcaaactagcaggaaaccagtacatgcagaatcgattcttcttccctggagcagaacactaattgcagttgaaaaggtatgtgcttggagtgaagctgaagtctggtaagaagacagccactgatggctttccaagcaaagtgtaggaccttcgtggggactttagttttccacaaagagtgccataacttcgattccatagctatacaccaattgcctttagaggactgcaaccaacgacagctgctcttaatagagtagtttcccaagtttttgtgaagccagtaccacttatcatccaagttagtcgaattgagaggaatacttaggatatggtctctatctctatcctcaaataaatccttgacgatatcctcaccccattggttgtcatcacctatcattagttgattaacattttccccagtaagacttggatgtgagctaatgacacaagagtcaagggtgtcaggaagccaaggggaattcaaaatacgaacaggcctaccagtgccaatgtgtatacgagagcctactaaaatatggctttgtgtttcaaagatgcttctccatataaaacaaggattattaccaatcacagctgaaaggaatatcccatgaggataatacctactcttataaacctgactaacaagagatgtgtcattgagaagcaaacgctaaacttgtttgcccaagaagcgcagattatagtcatgtaaattct

SEQ ID NO: 11134 - DNA, 611 bp, Cannabis sativa
attaaacctaaaaatactcatttcataagtcactcctcctctctcccttcttctattcttctcccagtctctctcgctctctttttctcacgcacacaaaaaccctagcaacccacggttgccaaccaccacgcctccaatcaaagaccactaatccaccaacaactactaactcaagaccgatgtaaggcccgatactgagtccgataatctatccattttttcaagttttttgtgttttatttaataaaactgatgtagggctcgatataaggtcaaatagtctctttaatttttcaagtttgtgtgttaggcccaataggaacgatgtaggcctcgatatagggctcgatagttggtccaatttttcaagtttatgtgttaggcctgataggatcgataaagagtctaatagtctctgcaatttttcaagtttgtgttagcccgataggaccaatctagggtatgatatattgtttgattgtctatcaaattatcatgttttgtgttaggcccgataggaccgacgtagggcctaatattgagtctgatagaggccaattttatattttgtaagttaggctctatatactgcctgatagtggtctgat

SEQ ID NO: 11135 - DNA, 565 bp, Cannabis sativa
aggtgcagaacatttggttcacgggtcatccaatgaaaaggaagtggacaccattactgaatctcgtggaaaaggagttatgacaaaccctgcgatctcttttactccctctgcacttaacaagacatcttttgtccaaccattgcccaaccgtaagccattatatcccaaaaataaggaggaacactctgatttatctagtgtcttcactcctctctctgctatggttatgccttccaatacttttgcaacctatcctccaactcaaccatcgctgcaactcagtcatactaattccaaacaaatttcttaacaaattcctgccatcaattctcactcttcatctacagcaatgactcctgaacgttactctgctgggaaggaaaatgtgtgtccaaaccatataataaaaagacaatttgaaggttcatcattgaggcaatttctgaaaagatgcagaggtactaattcaacaactttctcttcaaatctgtctactgaagaggaacacaaccaggatgtttccactgatttaatggattcaaatggtgcacaagacatttca

SEQ ID NO: 11136 - DNA, 829 bp, Cannabis sativa
caaggttatttccaagatcgttgcaaacagattgaagcctatcctcccttctctgatttgccctactcaagcggcttttgtctcgggtagaatatctaggataacaacgtgatagtgcaagagatcatccactcatttaataggaaaaaaggcaaggagggatattttgcaataaagattgatcttgttaaagcatatgacaggttaaactgggaatccatagatcaagcccttgattggtatggatttccccagaagtttcgtaattgggtcacccagtgcatctccaccacctctcttaatgtgtgccttattggaggaatggtggacaagattatgccctcgtgtggactacgtcaaggggatcctctttctccctacctcttcatctgtgctgttgaagtattatctagactcttagaagatggtcttgcaaaaggtgtctttaagggtattaagttaagtaggggaggtccggttctaacacacttattctttgcgaatgatttgattctggtaggacgggccaatgtgaatgaagctagaggttactggaattgcttggagaagttttgctcctagtctggtcaaaaagtgaacaagctcaaaacgtcaatagtttttagcaagaatacttccaatgggatgagaagaggcattaaggaggccttgggtattggctcatcggagggtatcatcaagtatctgggtctgcctctttttagatcaaaacaaaaggatgcggattttaacttcatccttgaagggcttacaacaaaattgcatggatgaaaagcgaagacgctatccaaagcagggcgggccactc

SEQ ID NO: 11137 - DNA, 562 bp, Cannabis sativa
catgtataattgcttagcactgtttagttttgttagtggaataatagtttattgtttgtctctatggcttgagtgctgaaatagtgtgtttgtttcataaaatgaataattattgtttcaaagtttccattgaaatgactacatgtggttttctagactaaacatggttagggtgttgacggaaatttcataagatactttgttggcatttaataaagagacaacaatgacatggaaaataaagagacagcacacaacttggatggggattatcatgtccaagctgagtttggaaaccccatattgcatgatcaatatgctgttgacttcgccaatcaaaccatgagcaaaatatagctgacccaatactcctaaaccactgaaagttgtagtctttggttagttggggctggtggtcatggtcattgcttttgtaatggaaggttttttttttatattagttgaaaacagaatagtttcttggacacatacccttttcatagcaacttttcttttgtatggttttgtctgtttatcatggaacactgagtgcatacctttt

SEQ ID NO: 11138 - DNA, 715 bp, Cannabis sativa
  modified_base (564)..(587): a, c, t, g, unknown or other
aatgatctttgaattcaccttttctgaaatgaggtgtctatctatctcaacatgtttagttgtgccatggtgactgaatttttagcaatgctaattgcagcttgactatcactgatttcattcataagccttttgatccacatcccttcacaaatacttaaggccaaagctcgatattctgactctagactactccttaagactacatactgctttttgctgcgccaagtaactaaattaccctatacatatgatcaataaccacttgttgatcgtctgtcagtcagctctccagcccaacaagaatctgtgtaaacttcaaagtctcgattgttgtattttctgaagtgcaaacccagacctggtgtcattttcagataccttagaatatgatacaccacttccaaatattcctcacaaggattgtgcatttgttgactaacaacactgacatgaaaggcgacatctggtcttgtatgagagagatagattagttttcctactaatctttgatagctccccctctcttcgattagctttcaagtttggatccatgggagtgtnnnnnnnnnnnnnnnnnnnnnnnncagtttcctttagaagatctaggaaatactttcactgagatataacaattccttctttcgattgagctacttccatactaagaaagtatttgagggttcttaggtctttgatttcaaaagctgaggca

SEQ ID NO: 11139 - DNA, 628 bp, Cannabis sativa
agagtaatatggtaaatggtagtcgataaatagatataaattaaatacatatcactctttttacataataattaaaaaactaaaattaatataaattattataaaaaagaaaaaatagtttattctattattcataacgtaacactactacaaaattaattttttttcgataattttaaataattggataaagtatttccatcaatctctatcaccgtcgcatattcgattgtcccgaaacggacgaaatatgtgacggttaaaaactgttagcataaacttttcatgacagtgtaaaacaatcgcgtatattgtgcattatagggcacggtttaaaaccgtcacctatactacatgacacattttaaattttagtataggcgatgattttataccgtgcactatagtattaaaggcgacagttttaaaccatacttaatttatagtattattatcccaagtgttggtcgaatgacgtggtaggttcctttaaatgacacatatctccaccacaagacctgagcagataaaagagacttatgaatcaactgcccaggatgttttcaagctggcagaaatatgagacaagctaaatgcaatttgtcgtacagcttcaagacgtgcagac

SEQ ID NO: 11140 - DNA, 524 bp, Cannabis sativa
ttgggaagtccaagatcagcttcttgcctcttggcttctctcttccatgactgagagcctcttaactcgaatgcttggttgcaattctgcacaacaaatctggaaagctttggagcaatatttcactctgaaagttttgtccaagattctggaattcagaaccaagctccagaaattaaagaagggcacaatgaatctcaatgactatcttcttaaggtgaagcaacatgtggatcttcttgcctctgttggtgaagttctctctgaccgtgaccatattgctgctatattcaaaggcctccttagcgactatgacaccttcattatctctaccaacacaccttcatgaccctctgcttatcctccaagtcagtactttcccaatggtttcaatttttctaactcttcttccttctccaattctagaggaaatgttagaaatcaaattcctcctcgaggatctaatgtctctacacaaggcagaggaagaggtggacgatttcctgttgctccaaatcgtgttc

SEQ ID NO: 11141 - DNA, 539 bp, Cannabis sativa
gagctgagttgctatccccttgttgaatccaagcagccttggccttctgctgaagaaaggagaaataattcttaatagcagcattatacttctctcgcgcatttgattctacttcatgtaagtcagcattcaaagggtcatgttggagcttatcttgcaggtcatttagatcagcttttgattgttcaaacaatgcctggacatcagaaaatccttctctattgatctctgtaagtgtaacctttaactccttcaacttgcttatcaactggtacatcctagttcctctcctttccttgtgccaaacttccgaaaccttattaaaataattaggatgagaagaccacatcctaaaatatttaaaagcttttttcccgcttctccatcttggatgtaaagataaaatggctggagtgtgataaaaaatcccttcatttaggagcattgcctcaacatttggatattgatccagccactcttgattagctaaaattcgatcaatctttgaacaaattctatctcttccttgctgtttatta

SEQ ID NO: 11142 - DNA, 883 bp, Cannabis sativa
accagccctatggcacaagtcttgcttttggatccttaactaaaaacgaaatttatgaaaaattaagagtacatttttcttaaaaaagatagtttggtaaactctgttgtaatatcaggagagttttttaatttaattttttttaagatcgtatacgttgtaattatttagattcatttgtaaatttttaaaaaaatttgaatagtttacaaaattaaaaataaaattcaaacaattatttaccttatgtacaagaaaaaatagttaagtgtgcgataaaattcactgctttattaattcttcataactctaatatatttggagttgtattcttaaatttacagaacgctccataaccaataatatagacacgttattcattgttataaccataacgaccattcaatcctcatatagatgaacaacaactgaggggttcaattacacccatcattgtattttatccttaaaatgtttggctcattgtaaatgatatttctcataaattttaattagagaaatgagcgctcaatatttagctaccttagaccaaattctaaggagaatatcgtttcatcgtagggtaagttattaacgaacgaatcaataaactcagataatataattagttagaatactaaccacttagaattgatattgaattgatttatggtcaactaaatatatatgtatatgatatgacttatattaagataataacagtacatttacttatctatatctaaaacaatatcggtccagtccaacgtaacaaatacatatgatcttatgatcttatctattttgctaatattctaaaaagaatataatacttgacaagtgtaagtagatgatataatagactagcaagtcagcataaacc

SEQ ID NO: 11143 - DNA, 645 bp, Cannabis sativa
tatataacatctacttcctttccttccttatataatagatcaatcatgcctccctagtttttttttcctcttttttctaatgactatttcgtacgcctgttgggaccacttgagaaaaaattatagaggcctaattaattaagctaaattaataatgagagagtaaaaattactctttactcaatctcgtgataatttttttttttttttttttgagagagagaaccataataatatcagccttaaaataaaagtagaagaagaaaaaaacaataccaccatacataaggttcattcatgaacaaagttaattaataggcaacattatattagcagataataataattataagataacgtaataaatcagtacaaataaaagtgatctatccaaccacaattttcttgttgtgtcgaatgttaaaaaaattgataataaatttaagaagaatttgtatatagaatagaataataatgtataataattaagtatgtgtatttagctgattcatattaattacttcaattcgatactcctgaaaagataattatatttataaatataagttgaacattttaatatatgcttgaatgttaaattattaatatttaatgtcttcaaaaaaaatatattaatatttaata

SEQ ID NO: 11144 - DNA, 595 bp, Cannabis sativa
taatcctcctaggtctttaagtgaaaatgtgttgttcagccttgcaacaaacttttccaacttttgtgttttactccccgtgataatgatatcatcaacgtaaatcaataccattatcacatagtcatgttgcttcagcaagaaaaaggatgagtcagcccttgaattttcaaaattccatttcagcagtgttgtttttagttgctcataccaggcccttggtgcttgtttcaacccgtagatggacttttttagcttgcacacatagttaggtttgtcggggtcttcaaagccttgtggttggaccaggtagacatcttcatcaagtgtgccatttaagaaggcattatttatatcaagttgtcttatgtcccaattgtttgctactgcaatcgttagtactatcctgattgttgatgctttgattaccagactaaaagtctctccaaaatctactcctggtctttgatgaaaacccttcgcaacaaggcgagctttaagtcgttcaatcgatccatctacatttaatttaattttatagacccacttgttaccaacaacgttgtaataaggtgaaggaggtaccaaataccag

SEQ ID NO: 11145 - DNA, 642 bp, Cannabis sativa
taacaatttttcatattatttatttatttaatcacgtgtaggactcgaatcaataataatatgacacttaaaggatacttgaaaccttaaggtgttctttacatttgagacttactatagttttttggttccaaaatattgtaaggttaggcgagaatcctagtttcaaaataaataaataaaaattaagtaatagcgcgctacgttatgcattcaccatcgcagtcgtgcccgaaaaattaaagatacagccccttataaaatctacacattgtattgcctaaaaacatcaaaactattaaatatcagttattcttactgcatcaaattagtatgatattcagacaagtatctcaattcaatatatgcctttacatacttgaattatgtaaaactctagtagaaaatttaactcggaacactacacaatcctcattcatttacatacttgaaatcatgatgcctcgcctaaaaaacaagctgcgaaaagctaaggcggcctcggaaactactcatcattagatgaacaagtgtttgaattctccattggatagttgacaaagctgattgtagttttgcgtgtctgtcaacagaacagaaaaacgaaaacaaaatcgccttttgagaatctaaacaaagtag

SEQ ID NO: 11146 - DNA, 675 bp, Cannabis sativa
aacaccatcccatccgcagcaactggtaccgtttgatccccacgttgatgtctttggatagacaaggacagagagaccatttgtatcaactctaggatggcaatgtattttaaagctttggttgaagtggatcaaagcattcctctcttcatcatggcaaaaaggttgcacagaattaacaaaaggatgatgatttgagagtagtaggagaggatgaaacagcaaaacaagtttgaaaagcatcgcaactaatgatggcataacttagtataagtgatatatatatatatatatatatatattggaacgtagagatatgttatcaacatttaaaggcagaaatgtaatgttttctccatttgttcaatttgatgtgtacattagtggcatagctcaaatacttgactattatttaataatatgtctctattatctaaaatattaatgcatgtcttattcaatttgatgtgtacattagtggcagagctcaagtgtttgaatattattaaatatgtccaaaactatggaaaagtgaccaaacgattatatacccgtgcatggaaaattggacaacttgaaatataatttgtgattacctttttcaaaactatttcataattatgagaagatgaccaaaatcaaacccagatctctaatttttttttttttttttaa

SEQ ID NO: 11147 - DNA, 813 bp, Cannabis sativa
tagcctcctaatttttccatgtattaaataataactttttagcctcttaaaaatttgtaaaattgaacagaaatttgatagaaatttttaaatccagtaattttcgaaaatgtgatttaatacatgttaaaattacgaatcaaaatcttaattaatttatgtataattattagacattatataatggaagaggtattcgcgatgtaagtggtgcgaatttagactattttttcaaactaaatcgcatatgcagtttttgtaatttcttaaaccgcaactacaccgtaagactttaaaattgcaaaaaccacactccaacaatatccatatgaacttcccgacgatttaaaattatcgcctatgcttaggtataggtgacagttataaaccgtgccatatagtacatgtgacgatttttaattttaaaatgtatttttcagaaatgattttttactatcgttacattggaaaaataggagaaataactagattttctgccatttttcccttggcattaatttttaaaatttttataattctatataataacaataattacactaatgttgattatctaaatttctttacaaatttatatagtaacaataaataaattaacgctaataagcatctaaatttatttacaaatctatatactaacaataaattgaaatatatacactaatcaacatggtagtcgttgtcgctttgctcccgctttcacgttattaatccaccgatcatgcatgacctttatctggtcatctgtgtacgatatggagagcttatcctgtacaataaaagtatatatta

SEQ ID NO: 11148 - DNA, 556 bp, Cannabis sativa
ttcaactccctgactgccactggatctgaccgaatttccttgatttctcatgttttgtctagcatccattctattggactaacctgcaaaatcataagttagcctagtcagactgcgatcaaggttaaaatttaattacccctcacttaggaatttaaaacatgcgtctattcagtaattggactactaacatgcttcccaaaaatattttcttatttcatactaataaatcaaactactaaagcattcaaaagcttactgaaccgtgagtcgagcttatctataatgatgattgtacatattgtgacgatcttcgaaagacaacctagtggatctataccaaattgtaacaccctactagattaggcacgttatcgtgatttgaaactactgtgcactcatttactaattaaatatttattgaaaaacatgaataattaaaaaaaaaatatttaaacttgatcttaaatatataagtataaagcatattctgggatcccgtttataaagtgacattagttttcaaaataccacagttacaaaagttgtcgcctag

SEQ ID NO: 11149 - DNA, 770 bp, Cannabis sativa
gctttgatcaatgaaatcaggacattgagtcatgaatacctcttcagttagctctctatttaagaaagtattattgaaatctaattccattacttgccaaccattagataaggaaatagttaggatgactcaaattgttgttggtttgactacaagactaaaagtctatgtaaagtcataaccatactgttgtagaaatcatttggcaacaagccttactttttattgagcaatgctatcaacatgatttttcttttcccggtagacctgtttgtaacttatggcactccaaccaggaggtagaggaacaaggatccatgttattttaagagcagtgatctcaacttacatagctttattccacttagggatccttgaaagttgctgctatagtcagtggcacctttgaaagcatgagcactttaggtttataggctccaactttggctcttgtcaccataggatgattattgataggtgcttgaggaacaaatggagctttaggagtatctaaaacttgagtagaagcgaatgtagatgaattatttgatggcacaacaaaggtggacgcagaagcttcatcagatgaggaacttggggatgcttcaacaattgttgtagatggttaattgggatgattagctaaagcaaaactagatgatgatgagttttcaacacccaaagttggcatgttgtgttattcttggaaaatacaagttggaataatagcaaaagggccaacaaaaacagtatcagtggtgacattagta

SEQ ID NO: 11150 - DNA, 621 bp, Cannabis sativa
aagagtggctatcgaatggcttgttctttatccacggagcaacatcaatcgaattatcaagtgcttgtagaatggtggaagacattgcggaagctcaaaattccaccaaagaataagcattttgtatggaaacttgcttataattagatcccaaaaaattctgttttggccaagcgtggtgtgcatacgagtcagacttatgctcgctgctttaataatattgatgaaactatttttcacgctttatgggattgcaaagctagcaaagagttcttgttagctagtggtttgaggaaggaggttaagcaattgcaggcaaggatgttttgtcttttttgatgagattggctcggacatgggagaaaagcaggtatgaattttttcttgtaattacatggatcatttggaatgtaaggaatgcagtagtacatgtgtgtaacgtcctaatgattaggcacactacagtgactttttaattacagtacatacctttgctaattaaagtattttcttgaaaattgtgataaatttaaattttttatttaactttaaacttttttaaatatatacatgcatccttacaaaaagtcaggatctcgctttaaaaacttatattcatat

SEQ ID NO: 11151 - DNA, 532 bp, Cannabis sativa
gttagacttggaagcgatgtgattcattttgattgtgctattgttgactttctctcttataaggtgacagtcgatttgcacatgttttgtgcgctcgtggtagatagggttttctgagatgtgaatggctgcattgttgttatagaacagtgttgatggaagctttgtttggatgccaaagtcatgaagaatggaatggagccaagttagttcacaagcggcattaaccatctctgtactgcttcagcagaggagcgagagacaatttgttgtttttttagattttcaggagatgagagattggccaaggaagacacaataacttgagatagatcaccttgtatccaagcatgctccccattctgcatatgcaaaggcttggagatgtattggctttagtgtggaggcatagaagaagagtctctgtccaggtgtgccttttaggtactttagtatgcagttggctgcttggaggtgtgattctcttggagtttgaagatattgactgagtttattgacaaagaacgcaatg

SEQ ID NO: 11152 - DNA, 673 bp, Cannabis sativa
ctatgactcaggtctaataaactctataaagttttcgatcttttcatgtgttgaacattgatgtccacgtcaccaagaaaagtttccgggaacgttttcccccaagtcaactttacacttgtgtggagttgacttgatgacgtgaaccgtatccatttcacttgaaattttactagatagatgtcaattttgacaatcttaggcaattatttctgttcttcaagaattttcaatcaaattagaacttttgattcccttacttagtccttgggaattattaaatattaatcatcaaagaaaaagaggaaaaacttatttgttttacttatttttttatctttttctttaaaaatttgaaatttcttcatgtgtgtcatggcattaggattaattagatttgaatcctaatcctagttgatgatgccattcaaaaattagagagagaaagaagaagagaaaatatttttgatcttttgtttttcatttatctttttcttttgaatttctaattttaccttaatcttagtaacatcaggaattgatgttaccttttaaattcaaaatcctattctaatttctataagaattttgaagtttcgcttaatgaagaagggaaaggatatatttatatcttttacttaacatttacctctttctttgtagctttaaattt

SEQ ID NO: 11153 - DNA, 529 bp, Cannabis sativa
cacagaggctaaagatatagctgctattgaggtaactaaagaacctatatagttgagagaatttatagtgaatctggttacaattctgaatatatatatgtgctatgtgacaatcaaagtgctttgtacttaatgaagaatcctatattctatgagaggtctaaatatatagacattaaacttcattttataagatttgtcattgaaataaatgaagttgaagttaagatggtgggaacaaaggacaatacaacatacatgttaatcaagtatgttccttatagcaagtttcggcaggtctaaacttgctcaacatacttagttgttggtttgccaaacataactatctcaaggtgcaaatctcaagcatgttaccaatgtggatgattgttaaagattggtaaaaatgttctttgaacaactcgtctgttaagtagatttcataactgaatccttgaaaagttaaaaaggttaagttagttgcttatctcacatgtatatataaggcttcattccatctcacttaatg

SEQ ID NO: 11154 - DNA, 614 bp, Cannabis sativa
aaacctaaatcaactattttttttacttatctaaagccaagttagttagtcttgttttcaatttgttgtttttttgtcattttgatttgttatttgattaagttaatataacataatgaataaaaacaagtataacaaaataatttaaaatggttataattaaataacaaagaaaaaattaattcttaaaacaatgaaatatagattaaaaataaaactagttaaaaatattgatgtgtaaatcaaaacaaaatcattttcataataaaaagaattaaaataaataacacacaataatttaaaatataaaataaagaaatcagttatatttatcaacaagttaaaaatttgagaataaaaaattagtcccgtaaaacaaccaaaataaaaacttagcggttcccgaaataactaaattaaaaactagttccttaaattaattaaatcaaaaatcgatttttgaaataaataattcaagaatcgttttttaaaatagatataaattaaaatagaaacgttttcataaatatggcatatcctcatgatattagattctatactccttttatattgtcttctcttaattttattctcttttctaaagtctatcattt

SEQ ID NO: 11155 - DNA, 516 bp, Cannabis sativa
cgacacttggggagtagaacggccaatcttaatgcgatggattaaaccttaagcctccgccttaagaattagcttcgataacacctcttgacaaagtaaaaacaggaagggagaaagtgggtcaccttgtcgaaggcctcgttgtggtatgaactttttcagagggcacccattcaataggactgagtaagatacactggttacacatgacattactagcttacgagacttgtcgctgaaaccattagcactaaggaccttgtcaaggaaactccattccattttatcgtgagctttgtgcatgtctagcttcaaggccataagacccccaaagccttttttgtgacgtatcttgtgaatgatttcttgagttaagattgaggattcagcaatccacctcccaggaatgaacgcagactggaacggggacaccagatcgttcatgagcggtctcagtctgtttgataatatctttgcaattatcttgtaagaaaaatataatcggatacaaatttg

SEQ ID NO: 11156 - DNA, 703 bp, Cannabis sativa
  modified_base (270)..(279): a, c, t, g, unknown or other
aatgagtgagttgtttaccatagacctaattcgccgatggcaaagtgagtggtcctattacccccttgatcatgtggagaactgagatgagtattgaattgtgaggtaatagtgagacttcgaactgtattgttcttagtaagatcgacagacagaggaactcagagagaggttcaacaacagttttcaaagaaaagaggcaagaacggatacctgcagaaatgggatgatacctaactaagatcagaaatatattattattattattannnnnnnnnntattattattattattataagtaaaaataaaggaaaaatctatttttattttatttttaaagtaatatcatagtccaacccaaatatttagcataaatgtatttaaatattcctaatcaaaatatgtaaccaaaaaaaaaagtagaaaccactatcaaaccaaaaaaattaaacatcaatttttatgctagcatcaaatccgaagataaaatccacattgacaaatatattcataactcttaatttaggactttgaatgatgaaatggctgaattaaacataccctaaaatagaaccaaggctttaaatatcttcataaagcgaaataatcccaatctaaccagaggcaaagtcttccttacaactttggaatagctactaaactgtggacatcttcttatctaccatattttcctggttttat

SEQ ID NO: 11157 - DNA, 1462 bp, Cannabis sativa
tcacccgcatgaagcaaaaactatgttgaacgttgtttccagtagatctcctgttgagctaaaatctcaaaataattacactgttcggcagagaaatcatgatcgtgagaatcgccattatccactttcagctttgccattttcttcttactctgtttcaaccttttcttgaaatttccgagaagctcaaaaccccattcagataaaagaatgctgcaacattttaacttttcagcaagggataaatgactattcacggcccaacaatctttcacaagctcaaaacacaaaggctcacgagaccaagcattttcatatctaaataaacgcacaaggctagtaaaggtcacagattcaagctcaagaaacaacggagtatgatcagatgaagagtaatcacagtttgacaatttcgcatcaggaaataaagaaaaccaatcatgattcacaaatgccttgtctaacctgatttcaatgtgagctgaggtcccacgtcctctctcccaagtgaaccgataccctttccagtcaagttctccaagctggcagtcatggagcgcaaggttgaaaccattgatcagagaatcgaggtagggtcggcctcccttcacatcatcctgagttgtgatattattaaaatcgccaagaatacaccaaggaagaggtgattcatcagcaattgagcggaccagattccatgctgtgtgtcgaagagagcgttagggttcaccataaaaaccagttaagcgccatggaattttgccagggagggatatctcaagatcaatatggttgttggagaaattcaataaccgagcttcatcagaaaatttccaaaagaaagtaagaccaccttttcttccttgggcttcaacagttaaagaactttcaaagcccaacttacacttcacccggtccaccacatcctttctacacaaagtttcacaaagaaataaaaaattgggcttcttttcaacacaaatgtcttgtaggaattgaatggcccatgggttcccaagcccatggcaattccaaccaatagtactcatatcgattggtgggcctgggaaccagggcccatcgaactgccgttttttgggagaccaacaacatcttgattagaaaaatcattaggctcattttcaatatccacttccttaaaaatagaattattattggctgaaaaagaattattttcaattctttttcttttttagtcaaccaaatctatttgcatatcagaaataaaggtggcatcattatcatgcaaaattaatgtggggttaacaatagaaggtaccatgtgtgtaacagcttttctagaatcaaggaatttattcgaatggacaaacaaccttgaatgttgctgatttttatgcgtgtaagatccctttatttcagccgtgactgcaacaacccaattggagaatggagccgtggctgtggccgcaccattggctga

SEQ ID NO: 11158 - DNA, 1259 bp, Cannabis sativa
aattttttatttctacacaaattttaatcttaagttttactttttctgggtattaatttttcattggcagtcattttagattttatttcaaaactcaatgtttcttactaactttgaagtaacgatttgttggatctactctttttttctttttctgcaatttgacaaaggtggtgggatgaaaaggttcatagatggttgatcatggtccaatagtgggcattttttttttaaattttttttgggcttgaaatgttatttttttttgggtttgttgagttcaaaatgttcaaatgctaatgtcattttgtttcttctaaatagcaaaaatttgctatgggtgtttggtaaaaaaagtgtgtattgtaaaatgtgtgtaattaatgaaaaataataatatttttttaatcatttttaatttatgttgctttaaaaaaattgattttattttattaattgttcattgtaaaatttgttcataccattgttttacaaaaaaaaattatatattattaatgtattaataatataaaatcagattcaataaaaaaattaattacactaattgtaaattaaaaatatatatagtgacgctcattatgggtagctaatatttttagagtttgacttggagggactctaaaaggctatagtgacacttattaagaaaccctaaaaggctttagtgacacgctgtgatgggtcactaaatattacttttccagtcagctacattagtgacacgcagtgaagtgtcactataaagttttagaatcattcaacgtgtgtcactgaaactcatttttgtagtagtggtagcttgccctccaattattagttcataattagagttggtcaaaatatcgttttaaccttctaattatcacttgattccttaggtaccattattcaatgtgatagttaatctataacttattatagatttggatccaactgttagcacttctagaattaatactctaaggaaacaaatatttgatctgttaggaaagtttggatttcactattgtataacatgtttacaggcactcatgttattaagctcccaaagtagaagttgtaagaatcatcttcctagagaaacattaatgagtgaatcaaagaacttagtgaacacaaataggagttcatgtatattcaagattcaggatgatttactaatgatcattattgtggtatgataaactctttacatactaaacaataagttaatgaagatgtttattacatatcggtcc

SEQ ID NO: 11159 - DNA, 842 bp, Cannabis sativa
tgttgttgttgtggttgccaatagtgttgttatagtcttgaatctttgttattttttaaatatagttataataactgttgctatgaatatttctgattgggttgctgataatttttttatttttttaagtttatggtcatggatgcttgtaatgttgtttttagcattgccaaacaaagttactctatttaatgtttatgtatttttggcatagagttgttgttcggcatatgtttgttgaggatatgtatagttagagaaaagttgtcgactttatttgtttataagcttaatattgagttgttgtaattggttttgtaaattttaaaaaaataatacttattggtttaatttcatttcagaacaggagatgaaaagtattattgtacttcaacatggaggacaatgagatcagcatttttacaaattaaacaaagctatctatggcttaaaataggtcccctgagcatagttttacacccttatatctactctagtttagtgggggttcatcaattacacatttgatgcaagcctattttttaataagaaagatggtaagcttctccagttaattgtctatgtggatgatatcctgataacaggggaaagtcaagatcaaatttaaagtatcaacactgctcttcacaaatttttttctctaaagatgctttgctctattcactattttcttgggtttgaggttcttcgacattcaaatactatatacttgaatccaagcaagcacattcatgatttattggtcaggaaaaatatgcttgatgccaaacctcaaccagcaccaatgtgtgctaatgcaaagttatctctgtcttcatgaa

SEQ ID NO: 11160 - DNA, 525 bp, Cannabis sativa
caacatcatattaacccgggtctcgctcaatgaacccaatggtggtggcggaccatctagaaacgccactgctttgcccttatcagcgctgagccttggcccgagagacagtgctgcctccgctgctttccgctgtggcgtgaacatcccgaaacgtttgtttctgcgataaatacatatttgaaacaaataacaaagagcagagcaactataaaacacaaacacaaggctaaacaaaaaattcttaggtgaggaaacacttgatatcaacaacaacaacaaaaagaaaaatcccagtgaggaaatccataagctcccttcaaaatacaattgatacattgaaggaagtggaggtcggagactatgaacaatatcaaataaacccataaataaaatcaataaatcaaccaaggtttggaaaaaaatagtcaccaggttatataaagcatcaaagctagttcttcttatcaatcttccaaaataaacaaggtacgaaataacccctaaaaccaacacatacataaa

SEQ ID NO: 11161 - DNA, 515 bp, Cannabis sativa
cgtcgccaccaccacgacccaaattcgtctcactccttcacatagaccacgaatccacaaacaaccatcgccaccatcatcaagttcagtcaaaggtaagtttttttatgaaaaaaattaattttttcatggatttggatgccgaattttgcatgtttttgattttgtggattttgtgctctttctgggtttgggttaaagttttggatatgtttgagtggtgtgtgtgttttatagtgttatcgatgcgatatctacaggatatcgacgaaaaatcaaataggtagttgagtgcttgaggttaactgtttttcaattttttagtgtttatcgataggttgtcaatgtgatatcgactaaattaaaaatgggtagttgattgtttagggttaattattttttcaatttttggtgtttatcgataggatgttgatatgatatcgactaaattaaaaatgggtattttgtttgaggcttactgggttttgatcggtatcatgtcgatatggtatcta

SEQ ID NO: 11162 - DNA, 521 bp, Cannabis sativa
attaaaactcaagctagaatgtttgctacttatttgaagtaaaaaagtaagattacctggctccgattttgggatgataattttcatgggagcaaaacatgatcacctcgtttatcaatcaagaggagaggctagttgacatgtatgaaccaatcatgtttctcactattaattttttttaagtgaacagattacaaaaataacactaacttcttaaactatatattatctattacaactctgaaataaattaacatatgattcacattaagtaataatcaaaatgtcacataagaacaaattacaatgatccaaaaagaacactaaaaaaattatattaactaaattggaataatcaattaacattcattaaatccctaagtttataatttctaaacttatatttttttgcatggcatgactcatattttttaaaaatatatataaatatgagccagaccaatatgatacagacaaatttgaagccttaaataatatatttagggagaaaatcattaatt

SEQ ID NO: 11163 - DNA, 524 bp, Cannabis sativa
tatttatatgtgataaaaggattaagaagttataatttgatagtgaaaaaagctttacaggggtaaaaaataataattattttaatatatttatatttcttgtaagaactaattattctaatagagtaatttgcggtaatagtattgaagttataattctagaacttttgttaggtatttagctattaattgttaagtaaattgtcacgtgacaatcttttattggtccaagttgttaatttttttttttaaaaaaatagttcaaataatactaataagaaatgacacgtagataatcatttaactgttactgagttttagaagtataacttaagtattattactactaaaaattaaacttaaatatttatttgcaatagaaaattaaacttaagtatttatactgtaaattattctattctaatataatttcaagttgtattatttagtaacagaagtacatttgaaaccctagtgtgttaaatgtgacattatccttaaaggaaagagaatttggagatgga

SEQ ID NO: 11164 - DNA, 654 bp, Cannabis sativa
gtcggaactagttattacccaacttcccttggtttatctcccgggtattggagaaattaccccttttggtaataattcaaaattggtctccattcaagacctgcaggaggcggctaaacaatatgcagctgcccagaccaaaaagaaattaggcagcaatggtgatcaggggtcattcagcatgcaagggccagcattggtgatggggacaaatgggaataattcctctttggaggaaacaaatgcatacaacataggaactagccaaaccgatatcccattttggaagtcatctgggaagacgacaaccgatactggaaagcaaagaaatcccgccaatcaaagtatagcaggtcaagagccgatggaaccaaataacctgtttcgtaactcgatccttggaagccaagcccaattcattgattggccttccaaagagtgttgggcccagcccaaagcccgagagctactcatgggatccttaactgtggataaatttcatagagagcctacccttttcaaccctattattgacatataggactttagggtgcaggagcacttgcatgggccgagaaagaggaagacctctgatggactcttatttcgccccaatacaaagcccatctcaacaccaagttcttctacccagtg

SEQ ID NO: 11165 - DNA, 1270 bp, Cannabis sativa
tttgttatgccttcagatctaacagccaccctcgagtgcgagaggaacaaaaaaaaaatcaatggtggtggccggtcctcttcgcaccagtcgtcctcgaccccacaaccacctcgtcgaatcgtcggtggtcctcgactacagaagaccccagtcctacagtcacatgccttccctcgactaagattttggtgttttatcttttttctagttatgagttttaagtttttaatgtgagagataactatattgaaattttatttttaaaaaatattgtatcaaaatttgatattgttttaatgggttggtttttggtggccgattgtaaacattggggggctggaatgggggtggttagggctggctgggttgactgggaatgttggcagttgggatgtggttggggtcgtggtggtggtgctccggtcaaactttgctggttgaaaaagatgaataagaaataaaaagaaaatatacaataaaataaaattttaattttaaaatatatattttttgttttttattttattttaatttttttttaattaaaattattatttggaccaataaaaaattgacacgtggcactttatttgggtttaacggttcagttaaaaaagggaccaacggactcacaaaaaatatcaccttgggaactattaccgccaatttttgaggttggggactaatcggcatcaactctaaatttttggagacttttactgcaattatccctttaatttaatataataacttttaaaaaatatcactaactaatcgcaatataatttgtcgaaaagtactagacactactagtaactaatagcaatgctcattatataatatgatagttaaattttttatatatattttgaaggggactaaaatttaattcggcctatttattcctgttgttaaagatcttattttaaattcatggttaaaaaaaataaaaactcaacatatttagaggcaacctaaacttgtgtgatgccgttatttagttgaaaatattttgaattattttcagcaagtctaatatttaacattgacacaagattaatacactctcactcaccttcgtcgaaggtactattaaaaaaagttaaaatgttgttaattaaatatcagttttaaattcattaaattttgacattgggaaacgcgattgctaaattcgaaaacacatcctcgacgcccattctcgtaccgtaaattaaaattaataattaataaatgaaataaaaataaagtaaagagattctttttc

SEQ ID NO: 11166 - DNA, 630 bp, Cannabis sativa
aagaccagaacaactccttctctgttaggctatatgcaattcaaatgtaaagccaaaggtggatgaactattatagttttggcctcacatttgatttgtctacactcattgaatcttacaaataccaagctcggacatgtcataactgccatataactaacattatgttatgacagttatgacatcaactcttattgtccaagttttataaaagagatcctctcctatcgagctcattatccaaaaattatgtgctactgagagagaatcagataaaaaaggagagaaactagaattgagaatgagagaaatgtgtgcctctgtgtaattgaagcatagcttcactcaagatattatgaactgttcttgacagttcttgttgtaatcttctggtatttcattctctatctataaagattaatgcccaaaggactgtttctggctgtggagtaggtagactaacaaactgttattctagttcaaatcacgtaaaatctatctccattttactatttttgtgtttgttcatttcatttaattgctatagcatttcctcgtcattcttgtgctcatttctatactatgttttgtgtttatcattgtgttcttggacgagttttcttcaacata

SEQ ID NO: 11167 - DNA, 862 bp, Cannabis sativa
catcaagcatatacaccagaacaacgaccatgccgactcttttagacgcgaagtggaaggcctttcaaggattcgacaccccaacctcgtttccctctttggtttctgtattcaagatgattgccgctatcttgtgtacgagtactgcgccggaggaaatctttctcaccaacttctaagtacgtaccgctttttatatcttatatctctatctatctattatattataacactgttattacatattacttagtaccgccccatacatatatattaagacctttacaaccatatctagtggagcattcctattatgcatcattatattatataactttctaacttaatattcagttggatcaataatagcaatattatgtaggagaatactagacacttctaatgctatttaacatttctctacctagtgtggttatgagcactcaaataacactgctctataaaattataagattgtaattttaatatattttaagatatgaattagtgaacatcaaaaaaaaaaaaagatatgaatttgtctacacatggaaaagaaaaaaaaaaaaagaataataccaattgtaatgtacacattatgtgataagttgggcctgttttaattaaattcatatgcatcttaatatattgtgttggaaaaaatgattttataaatattgttatgaaacgtggtaatcaatagataaatgttaaaagtgcactttaaggtaatataaaggatgtctgtcataatttaaaatgaaaaactgtcaaccatatatgcaatttttgtggtgtatgacagtttaagataactgcaactgtctaagaattacaatatttatatataaataaagaaccc

SEQ ID NO: 11168 - DNA, 554 bp, Cannabis sativa
ttagatggagaaggggaaacatgcgttgtaacacagtactagcccaacatcctcgaacaataaatctacctatcactttcacagaggaggacgcccgacatgtgcattttccccataatgaccccttgctcattgaagcccaaatagcaaacaagagaatttttagagtcatggttttcaagaaattgggctcaccgagggagacttgtcaccttgccccatctaattacaacttacaaggcttcaatggggacgttgtaatgccaatgagaaagattcaactaaaagtcactcttaagggagaaaacaagtggtggtggattgccccactacataaaacaccatagtgggacacctagtcttagtagattttggaacagtaactttaatacgacatttgtgcatgaagtttccctatgacgatggatgcatgggggtagtcagaggtaaccaaaaaagtgcaaggaattgttacaatgtctccattcgaacagtattcctagttcaggaagagacacctattgctcttggaatggaaactcaagtggaagctg

SEQ ID NO: 11169 - DNA, 635 bp, Cannabis sativa
agatttgagtgttgttgcactttgattatcgacctaaagtattggagaatgaggtaaaagatacctccagtttagtatagtaaagggactagacatttatcttagtagataaattgcttaatgacaaacatatcaccagtactaacattattaaactacccttttgaataagcaaatattacattattgtttgattttggttagtgagctgacttccatatcaaagtcttttgcagcaacaaattgttttcagaatagggattgtaagtctttctaattttggacgaagttggatagtaatctcttccaccaatcttcgacggacttgaataatgttaaaaaaaaaatataaatattttgcatcttcactgtgctctttgtatcaacctgttgtatttcaaaagataggacataggatttgttttaccctcatacaatctatttgaggcattcggaagttctcgacaattgtgcctcaatgacctcatcctttgaattagatgtggctctgttttgcttccgaaccaaacagttcgtgagttttgtcaatgtgactatttgatcttccagctgtcttgtatggtcatctgaaagcttgcgccctcaaattttgtcattgatgctacttcttaggt

SEQ ID NO: 11170 - DNA, 523 bp, Cannabis sativa
gaagcccaaaattgcatttttgtttctaccaattaagcaaggcaagccaaggtatgtactagactcattagctgccttaattcccattatctggcagaccaaggtacgaatagcaggcagcgtgttactactgaagaacaaagaggatttatcgaaattgacagtttgtccagatgcaagctcaaaaattctcaaaagttggatgacattggaggcttctctctcattagctctgcagtatacataactgtcatcggcgaacaacatgtgggaaataactggtgctccatttgccactttacaacctctaattcttttgctagcttcaaattgtttaatcaacgatgaaaaaccttcagcacaaatcaagaataaataggaggacaatggatcgccttgtcgaatgccccttttgggaataataggacccatctctctaccactattgagaatggtataacgaaccgaattcacacaattcagaaccaaccgaacccattgagcatcgaatcccatcttaagc

SEQ ID NO: 11171 - DNA, 804 bp, Cannabis sativa
tgctcaaggctatacgcaacaagaaggcctagactttttcgacactttttcccctgtggccaaaatggtcacctttaaattacttcttgccatctctaccataaaacaatggcacactttacaaattgacataaataatgccttcttaaacggagacctcaatgaagaggtctatatggccttgcctcctggactaaacatttctgatcatgattctgcaggtaccaaccttgtgtgtaaacttcacaaatcaatctatggactacgccaatcttctcgacaatggtacaagaaactcacggctgcattaattcaagaagggttcaaacaatcaagagcagattatacactctttactcgaggagcggatgaccattacgttgctctccttgtatatgttgacgacattgtcatcaccggacccaacattgatgttttacaccaagtacagaccacactccatcaacaattcaagctcaaggctctcggtcaactcaaatacttccttggattcgagattgcacgtgcatcttctggtcttttcctctctcaaagacagtatacacttcagcttctcgaagacaatggttaccttggatgcaaaccagcaaaggccccaatggaccctcgaacaaaattagatgatcaacaaggggaacctttagtcaatccttctgaatatagacaattaattggcaaactcctctatcttacattgtcacggcctgatattacctatgccgtaaattcattgagccaatttatgtctgcaccccgaacaccacatatgcaggctgtgtctca

SEQ ID NO: 11172 - DNA, 540 bp, Cannabis sativa
ttgtgggagacagacctgaaatttaaccaaaaacaaatatgtcagtattttgataatagtcatctccctaaaccttattatctttagaagggtgaagctctttgacatatttttaaaagcaaactaagtgtctaaccccattggtgaaaaatatgcttataatttttaagttgtataaagacaacataatgtgtatatttcttcagttgtttaaatgagagcgtatgacattttgaaataggagaagtgcccaaaggataagttcacaaaaccagaaaaaaagacattttagcagcttgtctaaaactatagactttttcctttttcattatgttaagaggaacttacactaaatggttttacttgcagcaaaacaagaaaaaagaaagaaaatggaagccctcctccaatttatcttggcttaagttatggtatcagcatgtttgaatcaaaatttaacataggagtgtatgaaaaccaaaataaaagtgaatcataagttaaagtcccttaaatcgtttccaatatgaacttacaata

SEQ ID NO: 11173 - DNA, 718 bp, Cannabis sativa
agaggtctgaatcttaaaaaaaaaacaattgcaccaattttgttctagcaatccgtacaaaatattgtacaacaacaacaaaatacaggagaaaactactctgagtcactgagtacataattctcactttttagtttctctactctaaatactattcaacccatgctaaatcctcatccaacaagtaatagcatggtgccaagctcgtttatccctcgaaactctaccacaaactatattataagtcctactaatctcttatttcaaccactttctcaacctttgcatccaaaagcacataatgcaatatattttctctacatttctttcatagtgattcatattataataacaatatcaaatttataaatttcaaaaaaaaaaaaacactaataaatttataatatcaacagcaaaattcttaatagtttagtttactacgtgttcaaaaaatttcagatatatttttaacactataagctatttaaaaatatacatgaatattcttataactataataaattccgctataaaaaaacaagttcacatttttcgaattcggaagttgagaaaaaaaattgtaataagaagttataattaataatcttcattatctaataaacacgtccgtcttcatattttactaccaaacaccaatcctagagtatgtattgatattattattacctagttatgtaaagaagatattacacagtta

SEQ ID NO: 11174 - DNA, 517 bp, Cannabis sativa
tttataggatttggggtaaaatttaaaagatgcgccttcaaaataaatttttaagtagtttttctatttattttttagagagtttatgggtgaaaaagtttagctatttttgaaccttttagttattactctaataaattaccactgcaacatatatatgatattacgagtattattttttagtttgtaactaactctatgggaacttgagtggtggggggactaagacagtagtcttttttgtctcgtcggcctgtttatgaatttatgtaaaaaaaaaataaaaattaggagattttccttggctaaaaaaccttgggcaacagctacaggttgataaaaagcactagtagtgtaacatttccttacgtgttaatatcgctcttaatttaactaagtatcgaatttcatatagtttaatgtaaaaatttttaaggagtattgttaaccaattataaggcgacacatctaaaagatattatcccataacaacactcttaaactaactaacatgatt

SEQ ID NO: 11175 - DNA, 519 bp, Cannabis sativa
tagctcaagatgtgctatctaggctgttacttaaagcagaaaaggagaatttgatccatggaattaaaattgctagaacggccccgtcgatttcgcatttgatgttcgccgatgatacaatcttattctctagggcaaatgaaagggaagctaaggaatggatgaattgtttggagacatatgaggcttggtcgggtcaagtgtgtagcaaatcaaagtctagtgtgttgttttctaaatccgtcccaagtgctagaaaatcgaaaattctggaggttcttcaggtggaagaagcgaatggagaggaaagacacctgggaaatcctttcgttttcaagagaaggaaaagagacgactattctagacttaaaacttctatggaaagacgtttggaagggtggagattgaaactcttatcttacgctgggagactcactttaataaagtctgttgctgcttctattccagtgtataatatggctacatctaaggtccctatctctatctgccgtgagttgg

SEQ ID NO: 11176 - DNA, 638 bp, Cannabis sativa
ttttttcttttgaaaaacaaatattagattattttttatctctgaatgttaaacggtacgaagatggggatcacacttcccgccctattctcactctgacgggatccgtttagaattttattttatatttctaataatatttttataatttgtaatttatgtttacatttattagtatattattatttttttttttatgatttttaagttgtgttttggataataattagtttattaaataataaataatgtgtaatattttaatttttatgtagattaatatttttataaacttaaatttttcttataaactttattttttattggaaaattctccgctccatccttgctcccattaggggattttcgccccatccccaatggagaataaacagagatagggatttaaatctttaacgggaatgggaacagtgagtactccccgccaatttctcgctgtgtgtacatctctaaatttactatcaaaaagttgatttatggggttaaaggatattagtagtattatcgctaatatcctttatttgaaaaggacacatttatttcatatttaaacgatatgttgtttcaataaaaaacaacatttatagcttagttttatgtaaaaacgacactttttt

SEQ ID NO: 11177 - DNA, 588 bp, Cannabis sativa
tttttttcttaatttttttcccagccgatggaacaaccccaaccctgtaaaaatgggagattaaactaattagatagaaaaattaagcttaaaaactaaaatttatctatttataggtctacactcatatattatatatatatatatattatatatatattatattttattattattattattaatattctagtgacttgtcaatttaccaattttttaaatcaaaattttggtaagatcaataaaatggcttagaaagtgagagcacaaaaggattcaattttccaatgttaagcacaaagctctattcacaaaaatccaaaatttagtaatgtgattatttgattttttttgggaaacaatgtaattattatgttttttttttttgatgaaaatgtaattattatgttaaaactatgaattgcattaagtatttattttggcaaaattataataatatatttacggtttgggtcggcctaagcattgggtagcttgagctattgcacaaagtttcttatattaaaatattttgtagagattttcatactatatattgactttttttttaccgtggagcggaatttt

SEQ ID NO: 11178 - DNA, 635 bp, Cannabis sativa
agtgtctgagcatgctgatggcctcttccttgtcacttttgggtgtgagggtgataaaggtagaattcttaagggacaaccatggcactttgctcaaagtgtcacggtttttgctgctcctgatagtgctttccctattcttccagagcagcttcactatgtccctttatgggttcaggtttatgggattcctttcatgtgtaagtcgcgggaacttgctaagtttatagcttctgagataggtgatttggttgaacttgatcaatctactgtaagggagggtactgggtcgtatcttaggattcgtgtgttacttgatgttaatctgcctattaggcgtggtttcaatgttcggtttatcaaactggggagggagattattaagtggattgactttaaatatgaagattacctgatttttgctatttttgtggaaagcttgaccatactcggaagtattgtcatgcttatcttcagaaatgtgatgaaagtcctacccttcctccttgtccttttacgatcttcttcgtggtaaggaaaaaccagttgagaaagcccacccctttcagtatccgcaccctccttctatctctgtggttcagcagcctcagggggggtttctctcttcctcctgt

SEQ ID NO: 11179 - DNA, 939 bp, Cannabis sativa
atattgtccttcgttaaagtgatgctaaatttatcaacaaaccgaaattggatttagtgaaagtaatgtttgacaaacgtaaaatggtgaaacaggtcaaatttcttgtgggccagaagtcattgtttaaatatttggtgagttttctgcttgaccctgctttttgttaagatgattatggaacatgcttatagtaagcatggtaggctttaatcataaatactaataaataagtaaacataaaaaagttggaatgggaatgtttgtataacgtgtagtggattttttggtcaaggcagaggttgcttttgtttaaatacaataaataatcttaaacatcttcttacaccttttccaatagctccacttcctctaattgaaaaaagggaaaggcaaccagcaaaaagccccacccaccaccatatctgttctaaattgtaattagaaaaatatataagaaaggttgatctgtgaaaacaagactcataaaaagataatccatattctttattaattaacattacacgaaaagggtcacaaaagtgtaacaggttagcgttttctcttagcttctaagccaaaagaagctgatggttacgtgcctggcatgcgaagttataattgttctggttaagccaatggcgggctttcattttcaggcatagtgcttttagaattgagggtgtggaatgtctctttatctctttatgctcacattaatttttcaatttctttgctttgagaagaaacttcttttgagtcttcagtcatagtgcttttagaattgagggtgttgaatgtctctttatctctttatgcttttttcaatttctttgctttgagaagaaactacgtttgagtcttccctggtagtgaattcttttaggtaaataactctcacttttatcgttattgagtaaaacatttcctattttcttc

SEQ ID NO: 11180 - DNA, 1133 bp, Cannabis sativa
aagaaactgaactaaacacacatatactctctctcttggtgaacagccggatctcactactgaaaaaaatcatacccattcacctcaataatgggtaggtgttcaatttttttaaaaaaatatttagattagtatgtagtttatttccgatcgataaatctgtgttgtaattgtttgtattggtgttgttttgctcgtctttttatcgaaatggcaagatctagttttctcaccaaactagaatttttaattgattatttatgctttttcgattatatatcgatatcttctcgataattacggtaaaaaaataagggttgacaatttttgacactatttcgatagtatatcgatactatttcgatccaggataaaatatatagcaaaattaatcacactaggcaaaatcatcaacaaactatcgatatactattgataaaccatcaataatcaattaaaataccaaataaaaaaaatacatcagcttgcgatcgataaactatcgatatactatcgataaaccatcaataatatatcaatattattgatagtatatcgatgtactatattatcgatggtttatcgataatagattgacattattttttacttggtattttgattgattattgatggcttatcgatagtatatcgatggtttgttgatgattctaccttgtgtgattaattttgttatatttttctatgttttgtcttaataggtcaaaattatattatcaatataccatcaaaaaattattaaaaattgtcatccctttaccttcttaccctaattatcgagaagatatcgatatataatcgaaaaagcattgataatttgttaaaaaaaaacctaatttagtgagaaaatcaaatctcgccatttcaataaaaaaaatcagcaaaacaaatgcaaataacaaaaaccacacagatctatcgaaaaataaattacatactaatttaaatatttaagaaattctttagacaataccaacccattattaagatgaatatgtattatttttttctatgtgaggtccggtcgtatactgagatagatcgagaggaagggagcagagagattgaaaaagagtgagctgagagagagagagagagagagagagagagag

SEQ ID NO: 11181 - DNA, 695 bp, Cannabis sativa
cctgccacattataaacctatgttttggaagcaacattttgctctaaatagcttgtttgtaagggaacaccacctgctgtagttgatcattatagagcatagaagtaaagaatttacctttcctcccactagccaacaatttatccttgccaaacttcattctcaaatggcaaaggtttcttcaataccaactagtatccatcttgagctcatagtctcaaaaatcttctcccttaacgtaaattgtattcacccatttcacccaaacaatatcatgtttttccataagacctaaatgaattttcctagaatggctttactctaattagacccatccttaaagccgagcccaccataaactttaggaagacaaatggtgtcccaagaggcaagatgaatcttacttctatctcctctaaatccccacaagaaacccctaaacaacttctcaacctccttaataatactttgaggaaggatgaaaatgctcatccaataattccttagccccaagagaatggattgaatcagttaagttcgccccgcaaaagaaaggttcgagttgcccaagttagcaaacgagcttcaatgtttttaaggatgatatcacaatcctatcttttccatttggttggcctgaaaggaaccccaagatatcttagaggaaatgtgccttcagagaattgaagaatgtc

SEQ ID NO: 11182 - DNA, 1144 bp, Cannabis sativa
  modified_base (749)..(750): a, c, t, g, unknown or other
agttgcagtgatttttttatttctttatattttcacacaattatatattgtagtgtgttctatttgttcgtgcttaatttggaagcaaaaatatgattatgtaaattgaattactaatttgatatgaggatgtttctagacaaggttaccgttaattatatttcaaatgtttttgaccttttcttttaatatcataaattggaattatgtattaatgatatcagttttagaattgactttattatagaaataaatttggattatcatagaaattttgcaagatttggcattaaaagtttttgaatatgtcttttatagttgaattctatatcaagtaatgcacttatttgggtctttattatattttacacaaaaaaaaatcggtttcaaaccgcaatttacattagtcgattttaaggataattctggattggtcgtcggttttcagattgaaccaatccaaacagaaaaccgaaatttggatttttatttgtaaaaaaaccgacctaaccgaccgatgctcagccctagtaccaaacgagcactcactacaaagaaaagtcacttttgccagcacatttttgtgcttgcaaaagtttggtattgtgctggtaaaatagaatttacttctgatgtgttgccaaaagaggttggcaagttaaagttggtattataacttttcccagcacaaaatgaaaagtgttggcaaaaatgactttttccagcgcgtaaatgcgctggtaaaagtnngattttagccactgcaaatgtgcactggtaagactttgacctttttgccatcgcagtttgcgaaatgcgctggtaaaagcttttaccagcgcagtagagaactatgctggtaaaagtgacatttcttgtagtaacttaacttcttaacttaaattcttgaatgttaatttttgggtatatatttcaataatttttgtggttagcgggtgagcggagcaacgagcccttaacatgctagtaaactcttgacaagatcaacgagtaaaatctttgatgaagatagaaattgtcttggaaactcctctcttgaaaaacacctctttataatgatcgaatacttgtttaatatgtattaattgtgaatggaagggcctataaataggagccaaggctt

SEQ ID NO: 11183 - DNA, 612 bp, Cannabis sativa
tatatatatatacagagagagaaagttgcaattttgatctttaaaaataaaaaaaaatgcatggtagcagtggtggtggtggtagtggtaattcctcatcttcttcttcaccaagaacttattcagtggatcttgtgaaagatcgaaatggaatcgaacaagttcttctcaagaatcctcgaggggcttctgttcgtgtaagccattaatcatttttgtttttaattaaatcaaattagtcataacattaatgcaaagaaattttcataggtgagtttgcatggtggtcaagttcgttcgtggatgaatgagcgtggacatgaaatgttgttcactagtagtaaggtaattaattgaaagaaatttgatcttgttttgaattgaatcttttatagaaacaggggaaaatttcagcttagataatttatgttctgaaactatttgatgtatgttcttaatggcattgaagaattgatttcaactattgtatttgaaggcaatctttaagcccccaaaaccggttagaggaggaatcccaatttgctttccacaggtatataatatatgtttatgtatatatataatgtatgtattgtagatgattattgttta

SEQ ID NO: 11184 - DNA, 524 bp, Cannabis sativa
ccaacattatacagaggttgaaaacaaccatgttcatccaccatgtaagttagaatacaggtgttgtgacttgagttcccctacatgtgtctgtcaaaataaatcctttcaatattatgacaaattttgtgcattagtaagagtatactcaattacctgattgtaatatgtcggcatccacgtcaaaagaataaaggtaccccagttatggcaaaagtgggagataataagagcccaaactggtgctttagataaaattaacttccatggaatgactgttacaggttcctttgatacgttaccccccaaaataaattttttctcttcttcactaagttctggatcatctttcggtgagctatatgcctggtaaaataacatatacagttagacacagaaataacttaaagtaaactttagcttccacaaggaaatctaaagagcatcttagctacaacttatatcttctacataaatcatgctcaatattacagtcagatgattgcccaacaagatagcagctg

SEQ ID NO: 11185 - DNA, 576 bp, Cannabis sativa
aatatactaaaggagagtgccttatgtggtagatgttaatattcaggaatttcagaaagtttcaaaagtaaattttatattttgaagattgtggtttttattgattagaacatgaattttgttgaaattcactttgcaatcaaaatttaagaaaacaaaacctagagtgcaataatatatattgtagggtttctttcttcaatctcacagttatcaaacttgtacatgcaagaattatgtgaacctaaatcaccaccgaatattgttaaaaataattggaagtgaaagtggaatgatatcatgttgcattgaaactagatcagaataaattttcaagtaacattattccagaagaaattctaaaatatatatacaaataaatagtagtttgtttctttttctattttttaatctatcaaaagacaaatattatgaataccgatcaaatttgtcaagaataaactcacggtctgtgttgttaaattttttgttgatgagattatttctgtaacttagtaagactcaaccttacaagtctcattttatcattttataagagaaaaatgatgttattat

SEQ ID NO: 11186 - DNA, 972 bp, Cannabis sativa
  modified_base (250)..(258): a, c, t, g, unknown or other
tcttcagctgctgctcttgtccgcgctataaatatccaaaatttaatatgcgatggcgtcatcgatagtaattatggtacgcatatgatccctttatatatataatcatttgaaaaagtcaaaagtgaaaataattaatttactaatttttttcggttaaataagtaggatttttgtcctaaaaccaaatattattctttgaacttttaaggtgttaaaaatgttagctattgagattgttggatttaannnnnnnnntctaatttcattcaattttattatctcagtgattgtttatgtactaaatcatgctccccagactttaatatctaccaaatcatgcctatcgaacttagacatgtactaaattatgctctgaattgtcatccatgttagacttttttactaaaattagaaaaaaaaaaagtccctaaatccaacaatctctatagttcaggggcatttttaacgatcttaaaaatttagggagcatgatttagtacgtgtcaaagttcaagccagcctcaagggacaaaaatcctaattaaccttttctaaactatgattcttagtgtacttaattcttaaagtttaaattttagttttaaaatcttctaaactacttattaaactacttgtttatatttatacttttataagtggcacatttttatattaatacacctagtaacaaaatttataatatttatctcaaaaaaaaaaaaaacaaaatttataatattatttaattttttaatattttatttttagttttataattttatttaattttaaaataataatattaagtttattaatataaatgtatcaggtatacaaaagtgtatctataagcaatttatggtgacaattaaccggataacaccttaaatttattaacagtttaatagtttacaagattttatggccaaattaaatttgaacttgaagtattaagtactgttaattctc

SEQ ID NO: 11187 - DNA, 1125 bp, Cannabis sativa
tacgttttgtttttaaatatcatctagacttttattgcaatgccatataaatgtatatatagataaaattatatgtaatattttactaaagtttagtagagctcacgtgaaaaaaaaaataataaagcagtactttgtccattccaataatattaaatctaaagattagaaggagtggacattacccccaaatcaacactatcttaagccacaataaaccaagcacactccaataaaaaaaaaaaagaccaaacacaggttgagtttcattttcctattcccatcctaattataaaccctcataccaaacacccctttaatgtattatagtggaaatgttttctaaatataataaatataagatttaattgcggcataacttctaatattttcactttacttatccttaacccccaaaatttaaattttagcagtaaaatttttaaaactatgaaatcgttagcaatttacagtttctatctatttttggtattaagtttcatgttagactatacatgtgtacatctatatggacatgcggatcacatgatcacaattttattggtacacgtaaaaaattatttaaaaaaaaaaaaattaaaattaaaaaattgtaaataaaaaaaattaaaaaaactaaaaataattaaacttaaaaataaatttagtttgaagggtgtaaattgaaaatgataaaaaccctaatctctttctctttcttcctcacttgacaccctctctctcttctctttgcatttgtgcggcggccattagcacaacggaactattgtgctccgatcacccacgccccgagaggaccacacatcactgtccttataggcccagaaaatccccttgccttgtttatgactcttcatctctatctcgacggtgcgcatgcatgacccttgtcaatgtcggtggtccaaacggaccaaagaatgagttttcttaatccccaaagcctagaaccccgaccttcccttgctctacaactttctctttctctatcattcctctcggtgcaacaccgacgaaagccacgataatcgtccatggtcgtcaatggtccaagcgaaccataaagtcgcgatgtcagattctcgaaactcaaaccccaaagtc

SEQ ID NO: 11188 - DNA, 714 bp, Cannabis sativa
aaaaaaactctttcgagcaacgggctgactctgtgcatcctgttcacgagaaaatatctggacactggcaggaactccctgaatataagattgaactaataaattatatttgtgtctcttcttttcaaactaaatggagatatcaatagcgaacaaattctgtctgtacaacttgttaagtaagaaatccttctacaaaatacataaatgataaaccatttattgtgtctagtggacgtggattcccatagaatctcacagttgacagtttcacaaaatacaaacttactattttatctttatagtttaaagtatttacttgccaaaattaaacgtgaactgatttcatgacaagttataactatttaaaaatagttttgacctgctctattactaactttttagcacccagatttaaaattataagtcttacttctgagtttgctgccacattgctcagcaaactatcagcaggtaacagtaacaaacagaaaccaaagtacatgaagaaatagttgtaaccaataatcatttgttaaaacgagaagaaaaattgatctaaaaactcccattttgaaactagcatgtaagccctcatagcgagaatttaaaataataattagccaatcttcaagtttgtgagatgaggatgacaccttggcttcaggaacaaatgcagcaacataggatggaggtgcccaagaaagctcagct

SEQ ID NO: 11189 - DNA, 549 bp, Cannabis sativa
agttaattttaagttcttgatattttttttaatctttaatttatttttaaataattttatatgaaatttcaaaaaataattaaaaaattaatgatgtggaccaataagatactaccacatgtgtaatgttctgtcacttaacgtcgaggtatttacggaatttccaaaattctaacaaaaagtatttttaccgttaaaatttttacttatgtattaatcagcaactttaaaataaatttaagtatttatactgcaaattactctaaaaaaatttaaaactaattacaaaacattacatctatataaaattgagcaacatgcaaataacaattaataattagtaggtacttcaaaaaaaaaaatgatagtactttttgtggctatggggggctggttgtagtgctagtgccgctccactagtatttgttgtgttgttgtgtgtgtgtgaattttgtatttatttaataataaataaaattttaagtacgttgatctgatttaaaggaatagtgaaaaagttacaaatgcactcactcaattcttatcctt

SEQ ID NO: 11190 - DNA, 515 bp, Cannabis sativa
aaaaaagataacctacattatttattgtataaattgatgtaggaattcttgaattccaagagtgccctacaccaactcaatatccttgcaaaatgatagggttaagattgatcgagacaattaaaaccaatttgattaaaatcaatgaaactacaggtcgtttatcccccacgacaaattgtttaaaccaaaaagatttgtcgttctcccatagcaaacaatagatcccaagtgagctaaccctagcttagatccaaccctagaaccttcgagatttgaaaccaaatctcttatcccctttcttcctttgaaagaaccctaggaatcaaatctcccttctcgatcaaaccagatcaatattaccataagctaaccacaaaaattttagatcaaaaccatacaaacacaagagcatgcatcaaaataaaagagatgaaagaaaaataaacacatggtttataaaggtttgccctaaatcaaggggtacatcttctttgagctcgccttgaagaacg

SEQ ID NO: 11191 - DNA, 511 bp, Cannabis sativa
ttttttttgaaggagctacaaccagtcgaaaacaaagaggaaatagctgtctgaaagagaaaacaagtttctcaactaatagtcctcgtcaagccgcagagcttcccttgcaagagtgtgagcttcgaagttgatcgatcttgggatgaacttgagggaagccatagggagaagagacatggacatgcgaatcaactatacaaggctagaaagagtcgaattgtccttccacttactattaactttaagaacaagatgttcacagtcagatgctatgaagatgggacgaaaatgtaattcaatggtccaccgaattccagcgagcagggcttgagcctcagcaaacaaagggggaggattgccagagatggaaagagagtagcgggcaataatatgggtggggtgtttaaggagcaccgcaccaatacctgttcgagatcctttagagtcgagagctgaatcaacacacacacaaataccgttgggatcatttagcagggccggaatatct

SEQ ID NO: 11192 - DNA, 799 bp, Cannabis sativa
acttaaagtgtgttttgaatgatagaaaatttgtacgccttttagagaggcgttcgcctcagagtcatatatgattcctctttttttcttcttttttttttttttacactgcttcgttcactttgacaattttaattgacaagtatagtgagaaagttaaacagacgtggagagcgatgattgccacgttcaaagtgaaaacttaacttttcattgataaggaatatatgtgattgccagaatacacgtgctatgttcggagaccaaccttggtatcctctttaatttagtacaatgtacaaaaggaaaacttgccatttctaggaacacttttccatgtaatggaacttcactttgcggaacatcatagctatttaatttttacaagttgtagaacagaggctttacttgaatgtatcagcttacgagcattacgggtatcgtctaataggccccgtagggatctaacgaccttcccaaagaacatctgcttgtatccatttttaagactctcttaccctcctccacaaggatgtacttctttgcgctctcatagaagtaatctatgccattcaattctcttttcaacatattcccccatagtcaaattccagggcgtactacagtagctatagcaaacttgagttaattttcagacacttttactactttggtgacttcaacattgcagcgctagatatagctttacaagctttcttgtcccctttcatcacattggttatacttgttatgggcatagcataatcacatgcatcctgatgcaattgaaggaattatt

SEQ ID NO: 11193 - DNA, 1593 bp, Cannabis sativa
gaaaacagttttgcagaaacaaacgagaaccaacaaaatctaaaaaataattgctgaaaattaaatcacttgacacaagagattgtacgtggtatcagtgttctttcaaacactcctagttcacagggccacacccagagaaagaaattaattagtaaagtatcaacaattacaaagacaattgacttaaataagtttagactccctctaaattattgccgcaatcctttgtaatgcacttcatgaatctaatttcacaaccaccttcaaacatcgaactcccttcgtctttgaattgtgagtgcttacttccttccgaagtaaggcttgcacaagtcttctcccgaagacctttctcttgttcaatcaagatgttctaaccaaccctaagactagtataagaataaatatataaacactagaacctagatgaacaacttggttctcacaaaaagaactctctcttcacaaatgagaaaatacaaaaaatgaaagctagaagagatgattcaaatggctgctttctaagttctatttatataacaaagaaaccctagagaccacaaagtcgaatctacagctatacaaacattcctaaaagaaaattctgttttgcagcatcatagacaggttctgctgcagcaaaccagaccaaaaaaggaaacttgccaaaaacgtgtccgatcatgtatttggacttgatacctgccaaaaatagtgtatttgatttgatcttatcaagacacaatcgaactcattaagaaaaataaaaatagtcaaagtttctataaaaagctaactttctattagagaatttgttctcttacaagaagttaccaaacaaagaaaagaacaactgaatataaaatcttttcaatgatagaaaagagcaataaaaatatctaaataagctgagaaaatcagttttataaaagctaacaaatcacaccataaattaaaaatattttggcaacaaaattgccaaaaaaaaaaactttacatacttaaactaaaataattaataatattgcttttcatccttttcattaattaatgaaaaagaaaaaatcttttgtttgagagttttaaatccgaacaatctaaactcgatgtactttatagtttgtatagccaacaaaaagataatgtaataaaaaattatctcactttcttgcttcgagaacccatataatttattccaatgtgcacttgtcactgaaaaaacacaatttaaaaaataattactacagaagaaatatacttttaaatacaaattacaatttatattgtttggtcttaaaaaatattatattgtttgttgtgattacataatgcttattcagtcaaagtaaactatatataatatatataaacaaagttatgattgaaattgacacatttatgacatgtttatatattttaatatatttatatttgtttatgacttattttaaattattataaaactataaatttataacaaataagttatattattgtgtcattttcaaattagctagataaattaatctaaaaagaataactgatttaatagttaaattagacatatatccaaacaaattattttaaagg

SEQ ID NO: 11194 - DNA, 683 bp, Cannabis sativa
tcattagatgctccgtcaacatacactttccaagtgggcacatcctaagctggcgtaccggtgctggcctcagtctcattgcactctacaatgaagtgtgctaatgcttggcccttaatcgagatgcgcagaatgaactgtttgtcgaacttgatgaactccatggcccacttgaggagcctccctgaggcctcaggcttttgtaaaacttgtcaaagcaggtggtttataaatactttgatggagtgggcctaaaagtaaggcttgagctttcttgttgctattaagaggcagaaagccagtttttcaattagaggatagcaaatttcaacccttatcatgtgtttgctgacataatatatcgggtgttgaacttttcttttctcccagaccaaagctgcggccacattctcaaaaatttctaaataaatataaatcctctccatgaactggttttgaaagtactggcggcctagccatgcgttctttcaactttctgaatgcctcctcgcattcttcggtccattcaaacttttgacatttcttcaggatgttaaagaacgggatacacttgtcggtcgagcgggagatgaagcgactcaagacaactacctttttggttaagctttgcatgtccttgagtctctttggggaaggcatgctcagtacggcttgtatttttt

SEQ ID NO: 11195 - DNA, 1128 bp, Cannabis sativa
attgttataataattaccaatagtagacccttagttgggagtttaggttttccaaattagtgttttagcgtgctatttacccattacgtaaatgtgactagggcaaccatctagcatgatgctttttgttcaagtcggctaactcacatgaattcagaattgaggtaagaataacatagaacatatgatatatatgcaaatgtatgtatgtgtgatatatatgcatgcttgttgtgattcgtacactactaacactagtacaggtaggtacagggtgcatgtagtacaacacttagcggtacttagggtatagttcataccttaccaacactagtacaatggcagtactgagtgcatgtggtacagtggtacatggtcgtatcttaatcaagaatgttcttactcaactgttaagctttatggataggtgtataggcgcttagatacaagttgttattatattatttgttatatgcttttcttattgagttcgttgactcacggttaccacttccatgtgtaggtacaggaaaggcgggggctgaacatgagtgagcttcaagcttggatggtgattgtacatgtcgagacgatgcgacttggagtgttcggtctcgggacatcttgaattttattttgcagtccctgtgcgataagtttataaatgtattttttgataatgtttgtaaaagtttaaatatgggatctcggcatatgtagataagtatatataaagtttaataattaaatcaaaagttttaatttggcacgattttcaaggaaaaccctttgattagcataggtggcaccttaattagaaaatcaatgtagcgcttctaagtatcagggcgttacaattttggtattagagtcgccaggtttgtctaccgaagatcgtcaagacatgtacaatcatcatcagagaaaagctcgactcacgattcagtaagcctttacttgtttagtaatttatatgattagaaaagcatgttaggaagcataatagattataattatttattgtaaatgaattgccttaaatctataagtgcggtagtaaagttacaacttggaccgttgcctgactaagccgacttatgaatcgacaggtttatcctatagaatgga

SEQ ID NO: 11196 - DNA, 970 bp, Cannabis sativa
accaaggtcagaaatgaccatttttcgacatttctcaattgtttttagataggttttcgatagtctacatgtttctctgaattcttttacttgattgttgattgaaattttttgttatgtttttgacatgttttcaatagtttctcgatagttcactgaaattaacatactttaataggttctcggtgattttttgataggttatctaggtaatcttctcaaatttgacgacgcaagcatgggttttctattcgggtttcgataaattctcgctcatggggctactgcaactgagaaaaaatcgatttcactagtttagatggtgaggacgctggtctgggttcaaggtagatgcaagtgtgggtttggtttggggtagacaccgaactaggttgttgggtgtagacgccaatctgggttcagggtagacgcaggtgtggttttggtttggggtagacaccgaactaggtcgttgggtttagacgccggtgtgggtttggtttggggttggaacatcggtgtgaattttttcgggagttacagagagaatgagggagttagagagagaaattgagttagagattttgaaaacattaaaatgttcgaagtactttagaaatggtgttacaaaaataagcattaagtagtataacatattaagatgggagcattgctattaggtaccagtggtacctaacaccttcttgacatgtcgcgttgcgattggctaacgatactttcttaaagatattatattaaattatgtgggacctgatacttaattaaaccaatagcgatattggcacatagaagtgtgttaggcaccactggcaccctttagcatttctcaagatgagatcttttgtttagtgggtatttaaggcatatgctattatgcttattaaaatcctatcaataataatcatctctaacacgatatggacatgtaacttttttttttttgaatgga

SEQ ID NO: 11197 - DNA, 597 bp, Cannabis sativa
cataccgaattcatcttcaaactccaataaatcaggattgtcctagttcatcattacttcgatcaatacccttggaaaattcaatcgttccctttccttagtaacattatcaaccattatagggttccctaactgacgtacaatcttgaaaaaggatttttgaccccaatactttaggtcaagatcctcaagttgtatccagataggaacgaacttaacatcttattctttcttaaaatttgtgtttggatcctaaggtttcataatcacaggccgtctattgaagaaaacgtatcccccatttagaactcggtctctgttttcaatggagttgaaccttatgataaagataccataggttagcattttcaccttgtcaattttatctttccatacattgtttgcaaaaccttccaatatgtgaagtggagggtttgaacccagtacgtagcacataatggaaggtttccaatagttgatttcaccttcaatatcatccaaggtgatcttagccttactaggctttgcagattgcttcaacggctggtctaagttcctcacaatggatccaaaatctgagaataggagaaattgggg

SEQ ID NO: 11198 - DNA, 572 bp, Cannabis sativa
atacaaaatgcaaatttgattaagtctatatatcacatctcaaatgataattttgatagatcttttatctgttttgatattggtgagaattttttaatttaatttttttttttatgatatatagttatatatttagaattatctgtaaatttttaaaagataaaattcactactttaagtttatagtacatcctcaaagagtgttttggtacactcctatctattttgatatctgtaagaattttttagtttaattttttaaaattaaatatattatagttatttaggattacttttaaattttaaaaaaattccaattgacttataatatttatatattttattgtacgtacgacaattttttttttatatatgtatgatgataagtaactatttaaattttatttttagcacagtaaattatttgaaattttctaaaatttacaaatagtcttacataactacattgagtgttcgatcattaaaaaaaaataattttttttaaatacatatcaaaacactaaaaaatttaccaaaaccattctttaaaagggaactaatatatagaaatt

SEQ ID NO: 11199 - DNA, 655 bp, Cannabis sativa
cagttggagcggatttcttcgttcggcgtctggcgagtcccacggggttgttgcggcggagttgttgactgaggaagctcttcttcggccggagactggtctttgggtttgatggcgtacgaaacaggctgtattggtacagactccgtggatcgtattgggggttcgggtggggaagggtttggatcagattcggataatggttgggaggaggagcaaagaaatctgtgaaatcggagagctggtggaagaggtagattgtgggaaggggaagctaggtaatggcggcgagcttccgcgaggagcctaagggccgccatggaaaccagacgagaatgtgtgtttgggagtgggagagtgagagtcagaaccgggcaaactcgggctttggcctttgcggggtttatgaggtttaaggcaatgcaaggtttacacttacagtactaaaagaaatgtaatttctcaatttttttttttttttttgtgtgataaatttagatttttgctctcttaattttaaaatatgtcttacgaactttttatgtcgttaaaaattcatctaaattattaaaattgttagatttaaaaacttttgtctaattttactaaagaaagtcttacaaaatatagaagtactattttgtatatgttaaag

SEQ ID NO: 11200 - DNA, 1487 bp, Cannabis sativa
  modified_base (484)..(489): a, c, t, g, unknown or other
agtctaggatatgatccggagttgaatgagtgttatggtattgtgtaaaaaaagtttaaagtaattttaaaaaatttgaaccaaatatcattaaatttttaaaatgaaaaaaatactaatttttattctcattttttaaaatataattctaaaaattgaaaatgaaagtctaagagtaaatacagtcattaaactaacataaaaagaattcgatttaaattatttaattttaagaaaatgaaataaaattaggaaaatttataattttgtatacattatataattttattacactatataatacaaaataacttatttacatttaattatacattctatattaaataaataaacataatttaaattttttatacaatctatataaaggaattaatttttcgtaagtcttatataaataaacaataaacatacatattttttcttacaaaaaaataaaataaacatacatattttgtttataaannnnnntaaatatattaaattaataatttataaatattatcaatataaaatataaatataatatttataaataattacacatttggttatagtttcgtttcttaaacaaaataaacgtaaatgttttatttttgaacttgtttatgaacttttaataaacaaattatattggttctattgaaacattatcataataaatatattagattaataatagtattataaacattaataataataaaatatttaataaacatgtatatattgtttataaaacacaaataatttttttttaatatgtttgtatatatataattttaaattaaattttagtaaacatattattttattaatatatcaaaatataaatattaacttatgtatttttatatttagttttatgcgttttttttcttcaaaaaattaattgaaaataactaacatgttaaaatcgtaaatagttatgtttatttctattatataatgtaaatatgatgattatttataaatatttataaaattgtatagaattgtgtaattatgtttttttttggtacattttttataatatagttattttacttgtatgtaattgaaaattgccgataaaattatacactccacaggtgtgcacctttttttccagctccaaccaacttgcttttcgtttaaagatgagtcgtagaatacaagacatcaagaaaaaactagatgcgattgctagtgacaaaaaattccttttggaaaaaggactagtagaggctccaactgctagaagagcgagagaaacttactcaagtgtacgccaggaagatgtaattgggagggatgaagatagatctgtaattatgcataagcttttgttggagaattgtgaagagaaggtttcaatcatggccattgtaggaattggtggcttaggaaaaaccactcttgctaaaagtgtttttaatgatgagaaagtcaaaaaacatttcgagcaaaagatttgggtgtgtgtgtct

SEQ ID NO: 11201 - DNA, 938 bp, Cannabis sativa
tatgctgtatggaaccaacatcaactaaaaagtgaaagaggataggatgaatcattatcaactatcccctgtatttttaaagtttggaacggtacactccagactcttcttcttctccctctcgacatgcatagtctgaacagaccttcaccttcgttcccaatgagttcacactcatcccctctgcgttcccattctgtggaatctttctcaagccccagatctatcgatctaggtggctccgactcgtcttccatagacacccagaatagctcgactcgcccaagccgcctcagccgcatcgaactgccccgtcccaaccactccagttgcttcagccataactccggccagtctcccagaagcccgaaccgtacaagcattaatcaacctcttacagctattaactccttcattcatcttttcctattccctgtcaaatcccatcagagaaatgggtatttttttaggttattttagatacaaatttagcttgcccattaaattacctctgcatactcgattcctgtaagggattttgggtaaaggaaatgtttttataataattttcagaaatgtcataattccttttgcccaaatttttcaacttttagcatttatactaatctgcaagtgtgatctgcctagtacaattcgtaatcctattgcgcagcaactctgttcgaaagtaaatgctcccaagtgatagttaccaaatcggttcacaaccttttcacaaggttttttctatataagggcagaccattcttttggtcttgcacttacagctttatttctcctaagctttattctctgcaaaagagtcttactattagccgtatttacttagatatacatcttattcactgtagcagcccaaagtcactcattcctcacatacacttgagtcttgttttgcatttagtcctaagtgtctc

SEQ ID NO: 11202 - DNA, 532 bp, Cannabis sativa
ttagttacactgatttttgatgaacctgtagagcttcataaggaaaaaaaaaaaggtttttttttacaaaagcagacctcgtttactcatgaaatcaggaattaaaacacccttaaatttgttgatagtaaaatcaaataatcaaagagaaacccagaaatttatttatgtttcataagttgtctaaataattctcatgctccttctaaccaaatgtggttcaatatgtagccaaaacagctaccttaaacatttcccggttttattaatgtgtaagctttgtctcattcccagaaactaatgcaactttaagggacaatactcttcacactgaattctcgaaaacttggaacctctgttttaatgaaaaactgcaatgcataagtgatctgcagaccattcaaatcaaagacaccatctgggcatccaggtggaagagcctagaaaggctttcttataaccatatcacatatataagcttcgtggcaggacactcctgtgtcgatttattaatgtaactatacattctcat

SEQ ID NO: 11203 - DNA, 579 bp, Cannabis sativa
tacataataatatatggtgatgaatctaaattttttattttatgggactaataatcgttataaaaacatatttatacctatattaaacaaaaattttaagtactttaataaattgagttaatttgacaatgacttaattattataaaatataattttcggacttttttactattttagttttaattatctaataataaaataaaattaaaaattaactttttatgtataatttgtttttgaggctatagctccatagtcatatactgagtctatcttcgaggatatattgtattgtaattagttagtagttttttatagagtattgctattaggcaccagtggtgcctagtaccttctcggcatgtcacgttacgattggttagcgatactccctaaaagctactatattaaattatatgggactcaatacttagttggaccaatagcgatattgacacgtaggagggtgttaggcaccactggtgccctttaccatttctctttttcatattatttatcaaattaaagagaaatactaaaagacactgattaaattgtgtgaaattcaatattaaaat

SEQ ID NO: 11204 - DNA, 512 bp, Cannabis sativa
tcaaggatatcgacttcaagatgacatctctgactcgtttcgtcctccgcgcaaatttcttactcaagaagatgaagttcttggtcaaaccaatcctcaattcattgagtgggaagttcaagattaggttctgtatttctggcttctctcttccatgtctggtggaattctcaccaggatcgttggcattgaaacttctgctcaagtcaggaaaacattagtggtatactttgtcactcaaacctctgccataaatgaatatttgttttgcatgaaaactcttgttgatcgtctaggatttattgaacacaaagtttctgtaaaagaccatattgctgccatttttaaaggcttaccattaatatatgatacatttgttatatctgtcaattcaagaaacgatcaatgctcagtttttgagattgaaaatcttttgtcatttccgagcatcgaatgatgaatcatattaaggatcttgattctatcaatcttgctactaactatggtttccg

SEQ ID NO: 11205 - DNA, 795 bp, Cannabis sativa
ccaggagctagagtgtctaacgtacagtgaccttcaaggctacacttcgatgagttttagatttgattttactaaaattataatagtgataaaggttggtcggccaggtatgaaccactgggaggctgggcggccaaggttgcattattgagaagttggtgggctagaagtgcaccactcaggggctagctggccaggtcttcttttgccactagcttgacttttcttttgattttaggccatgttgaagttcagccttacctatgatagagccaagggctctttggccactcactgggagatgtttaaagccaaggaaaagaagcttcaggccgagagggatgcatatacccagacacaaactcttctacatgatacccaagatttaaacgatggaatggagtgcttgcttggtattaggaactaagaagttaccaaccttactattgaggcctcctggtttgagatggagcttgggaacaaggaccaagcattgcaactggctcttgatggtcaacaagcaatcaagtatgagtatgttcgcttatcctatgaggtcttatacgaggcttatcttcataactccaaggttcagctctcctaaatgggatcttcttttattagaagaacaattactctatggagggagttctacgagattaggatgcaaacaaatcaagttttccagatcgttatccatcctgaggagtcgtcatcgggccatcttcatgaggctatctccgacctgcctatagaggtgtctggccagccagcaagcctgcagaggctatggcc

SEQ ID NO: 11206 - DNA, 555 bp, Cannabis sativa
tctttggctaaggtattgcacccatgggatacatccaattgccccttactgttggagagaatccaacaaccagaactctgatggtgcagttcttcgtaatcgacgttctttcggccttcaatgccatgataggtcgaccaaccctgtacgacttaaaggtggtgacatccatctaccatctttgcttgaaattcccaacaaagcatggggtagaatgttttccaagaactctctcgagcatcttctctgctttcagaaaagattaagatttatctatttccgaggaccaaaaagaacttctgaatggccataaaggggacaaagcacccaggttgcatattgtcaacctgggctgtttccaatcaagttctaaaaaaagtgtaccacaaacctgagtccctggaagcagaaccaacgcccatgtttactcggtgctgggcctaacgcccaagttgacaatcaacctagtgctctggtttcgatcattcaagtgtcaaatctaatttgaccattaaattcaaaatggtaaaaaaaaggaaaatttacatctgcacc

SEQ ID NO: 11207 - DNA, 752 bp, Cannabis sativa
acaacccgattatgccttcttgaagacatttggatgttcctgcttcccatatttgaggccctacaatactcataaaatgacagtgagatttgaaaagtgtatctttattggctattccatgcaacataaagggtatctatgcgaaagtagctctggccgtgtatatatcactcgaaatgttgtctttaatgaggaggagtttccagcccttaaaccatcaacaccaactcagttactgtcctcaaattctcaattgtttcccactacagcattttctactgatttttttatcttcaccaactaatgacatacctaacattgtctctgaggctcctcaaatggactcttctcataggccatgcagctctaataccattactacacctgttgcaatcgtggcaaaccagcagcctgctatgccccagctgtcattgctgcagcacccaactttacacctactgctacagctgctggctctacagatgtgccatccaattccccacctgctacacacccctctcaccataattttcccttgtcagataccacacaactaacccaaacagttcaccaaccctctatcactacaccacataccacacacataactccaactgttcctcctcctcccaccaaccaacaccccatgataaccagatcaaaagcaggtgttcacaaacctaaagcatacctttctacaaaatattccttacctgaatcgctattaccaaccgagcccaagactttgaaac

SEQ ID NO: 11208 - DNA, 640 bp, Cannabis sativa
tattttgcaaagagaatgatggctggcagcatagcaataatcgtattaaaaagaaaaaaagatttcattataattaaatcatttttatcatataattatatttgtatatttgtgatgtatataattagtgtgaggaagttttttttatgacaagtggtgaattatcgttcatatatataggaagttttttataggtaggtgtattttttttttttagggaatacaatgttattataaattaaaatataagtgatttacaataacaaagtaaaaagaagggggtaaatactccaaccaagaataggcgtcatccaattctagagcataatgagctaaatattgtgcagccatgttggccgatcgtttgacatttataatggtaactttaggaaaaaagaatagaaaacttaaaatatctataattaaatcatgaaatgaggatataactggagtaagtataataaagagcatttgcaaccattagagcatctgttttcaattgtgaaagtgaaagttgcagtaggtccaattaagattgtgaaaaataatttttgcttccatttcatgtgatgccaaattacctactaaaggtttagataatgcagcaataacacttcctgttgcatctctaacgatggca

SEQ ID NO: 11209 - DNA, 698 bp, Cannabis sativa
ggtaaagaaagagcataaaaaagaaaagttctttggaaataaaaaagacaaagcttaggaaaaaagatgataagatgaaatcatctttagagattatatctaataagtttcctttatcaaaaagaataccgtgaaggattgtttttctggtagagatgtggagaatctaaattaaataataccaacgacaataaacattaacatacgacattatcttcaaaatgccttagttggagacattactatacgacaacccagtataggctatagccttgcattattaaatgagaaaagtaattttctattttcaaagaaagacccctcatccaacatataaaaatacaacaaatacaaaaccattttaaagaagaagacacgcaatgaataactagatgttattgaaatcatataagaagtctggatagagtacatttatgaaaaaatgtttatagatggaaaataataccctttttgtatttttatgttgatataattttataatacttaaatttttctttttttgaatggaatactaaaatgttatataaatagaaactgttacaatttttaatgtcctatacagtatataggaaccaaataaaaagcacaagagacttaaagcaacggatcaaacattcaaaagtaaaaaagcacattcaacaataaattcagttaatcgagaaataacttgtgttgta

SEQ ID NO: 11210 - DNA, 553 bp, Cannabis sativa
ttttttatatgaccatgtagattataatagcaaaatttttagtagattttgaaaaattattaataatctattatgtggaaactagattttacaatagtcacttgtatggctattataatggataagttgaggaatatctcttttaataaaaaatattttcatattatattttattataatttatccatttttatgagtgagttgcttaatatattcttgccttccacttaagtgtagcacatgatttatattaatttaagaggtataatagggacattatttataaaagtaagtatattttaaagaatacggaaatgaaagtaaaaataaaaacaaacaaactaaagtgggtctacatgataattttcactattataactaactggttataagtatacgaatttaagttgattacatactttatattctatatgatataacatgtactagaaattaatacaattttttttttttatataaatataatttaaagtaaataaaaaaatgtttcaatacaaaaattaattttattattataccaaaattaatatta

SEQ ID NO: 11211 - DNA, 548 bp, Cannabis sativa
tggaattacgtttttctaaaaaaaagtcatagcaatgtttgcgttgcagtatcatttttattaaaattttctaaaaaaattcaacaataaatttttgaatattttcttattatcatgcatgttaaaaaaaaatcaaacttattttcatctcacacttagtattttagacatgttacttgatttttaattactatactaacattcgctaatcaaagaaattttattttaaaagtatatttgaaataaactttgtaataattaaaaaatttctcaaaaataacttcttttaatatatacaaagtcatgatctcgttatttacttacaaaagaatcaaaagatacatataatataataattccaaaagtatcgacctaagcaagaaaacaaaataactatgctagttgatcttgtaagatccaagttgttttttgtggcaaattatgtgtttctggtcatttatatgctggctagtctcatatggttcatttagcttaatatagtttgttattattttcacttgactggtcagctttagttggcataaaaa

SEQ ID NO: 11212 - DNA, 570 bp, Cannabis sativa
ttattttatttaaaattttaacaagaaaaaattcgtttagtagttgagtgcattttctcaaaaaaaaaaaaaaaggtttaatgagaaatgagtttctcataatcctcagcctccctctcgattaagataaatgtaaatttattttagatgaaaagtattctctgttcttcatcttcaccactttttgcttctgaattaaaatatatgggaaagtaatttttatatgaaaaaaaaattattgtaaatattataattaaataatttaactgttaaaaaaattataataaggatttgtatataaaaaaaattatttataaatattaattgctaaaagagtcttgttaaatatataaattaaaaattagttatttaaaaaaataattaatcttattctaaaaaagatttatctattgataacgtggtatcacacggaaaaaaaaaatataaacatggtaattacaataaaaatataatcattaactagttattgaaaaaaggaatagctagtatcatgtacttctgaaacgttaataaacagccattttcgcaggtactttgtagagttaatta

SEQ ID NO: 11213 - DNA, 807 bp, Cannabis sativa
tttatggtttacggatttgtttttcgccttttgttttttttttcgattttcaatttaagttattgcatgtgtgttatttttttcctttgatgatttttagttgtgtttagggttttctatggtttttttattgtttttttttttgttcaataaattttagtatatacatttcaaatattaatttgtttttgtgattgctatgtttttggttatttagggtttacagtttgcatatataatttttattttattgtaatttttttagtctatttgttgatttaatttttgttttgatggatttatgggttacggtttttatttgaaatgtatataatctttttgcaaaacgtcacctttgagtggaaatatagttgattaaagttatgattaatttgatttcttgaaatttgatcatatccaacgaaaccaattttttaaaaaatagcatgaactgtaatggccatgagttttgaatgtgatgatcatgataatcaatatttggatcaagatccacgagttttcctttttttttctcagagttatataattttgctgttatttatttttgtttattttttgggaattttgttggaatgtttctttttatttgagaatggaaatgggttaaatctgtgttggtgtattcactttataagtttgattttcccattttgaaatgtttggactattttgtttttgtgttttagttttggtagaatgtgtatatgttttagtttattatgaatagtcagaaaagtgctttttattgttatttctgtttacagtttagtttacagtatctttatg

SEQ ID NO: 11214 - DNA, 623 bp, Cannabis sativa
attatgtatggtgattcttgacttgtgatcaattgatcatcattttcatattggtggtgttttatattagaaaccaaaataatattgaatcaaactaaagaacttttctgggtgatacgggtagaaatctttagatattataagattcatctgttcttgacagcatttgatgatcatttgtgatatgctgttgtgaaatttagacttgatatcataggcctgatgttcccaatattaaactttggtaaccgctttaacatgttctatgacattatgagttaatcttctcacctagaatgatctttcattttcattagtagaaggctggaagccagtccacaaataacaatcttcatttgcttatttaaacttcttgggttgcagcaagttgacgtgagctatgtttaatacttatatttgaaatatcatttactttgctttgccgtttggaaaaaaagaaaatagtttgattggtattaggtttgaagccagttttatggtggaccactcacatggtagttttccaaaagtcgatcgactattagtaccatgaggaacaagttgcagttcgactattagtcacttgtacatggaatgttagctttgatgaagtaatgctattc

SEQ ID NO: 11215 - DNA, 1108 bp, Cannabis sativa
aaatggaggtctctcaccagaaaatgatttattttttttagaaattatagaagattttttttttctaattttttaatgcaaaaataaaataaaattgagattttttttttatttttaaattacaacaaaaaaaaaaaaaatcgtataaaaacccactcaaaagataaatttgaaaaaaaaaaaataaaaaaaaaacagtatataatataaattccccaataaaatatatgtaaatgaaaaaaaaaatcaataaaatagaaaataagttataattacaacatctttgtaagtctttttattttaatgattaataaatatacgattattatttgtcactaactaataatttattgattttatagtataaaattctctaatatgactctaaatgaactttaagatacaaagaactcaagacaagattctatgaaaatttatttatattttctagtcttgtacactaatttacaagtccatacttaaatttttttaaaatattaaaagaatttcactgatacctaaattttatatattcatttttaagatcatatatcattaaactaagaatgcaattgaaatttttgaaattagataattgagtaaaaagttatgcacgtttttgttttaaaaaataaactttttgcccctgtaactcattcggaatttcgtttggaattcgaaattttggttgtaaccaatatcacggcaaaatacaactaaaaaatcgtgctaacaactagaaactggtatttttcattctcatactttatgaactcgtttttcactcaaaataatgtattagctgagcatttatttcatatactaaacaaattcaagtgattttaagagcttcaaagtttaaaattcaagaaaatacttttgacacactttgagctaaaatttgtatttttttttttcaagtgtacttgctaatcactctaggttcttcattgttttactacatttctagagtaagtttgtttgtaatcataaacacattttgttatctcaaatttcgcacaaggtgacgtggcatctatctgaggtgacacgtggagaaaatttcgtaacttggacggatagcacacttcacagacactgttcaagg

SEQ ID NO: 11216 - DNA, 564 bp, Cannabis sativa
tagattgaatagcaactaggcagtctaattctacttccacatggctccactttttttctttaatccaacttaatgcttcatgtatgccaatagcttcagccacctcaggagatacaactcctcttacgcatttggctgtggcttccaacagtgtaacagtatgagttctagccacacaagagtagctatagcagttagttgaagagaatattgcaacatcgatattaatcttaatcgtatcaacatttggtaaggtccaattctcattaccatcttcaggaaataacaatcctaaagatggatcaaaagttttgtcttcagcataaagccattgattaagaaccgtacgtgccaaaactacagcatccttaacttcaacatgcttttgattccacaccagctcattcctactcttccaaagtgcccaacaaagcatagccaccaactctctactcatgcctctccatttttcaaagatcgaattcagtcatttggaaaacgttccctccacatcagttgagacccatggttctaactctatccagcaagctttagagaaagaac

SEQ ID NO: 11217 - DNA, 564 bp, Cannabis sativa
ctgttgaagatacatctgaaatttagcgcgattgtcgatttggtgctcttcaaaactaacagaaataataaaagaaacattgccaaaaaaagaatctgataaaggcttaaactaagaaaaaaataaagagaaagaggtcattactcgctaggagaagacattttggaaggatgaagctgattcgaaccctaaacgcccaaaattgagatttcctttctaccgtctaagagagagatgcggctgtgaggctgaagagaatcgcacgagagagagggctgaggtgagtattttgcgttttttagttttagggatttcactttttgttgcttcggttattaagtctcgctgttgtattttgcgtcatttttaaaagctcactaatacaatactggactattaataaatgatgcaaaatgaaacgaaaatttttaaattttctgctttttctcgttggtttagtttttagcatcatgcacctaaaagacgcaaatagcatattattagtgtcatttttaaagagacgccctaattatttaagtactattcacgtctgtcaaccctatg

SEQ ID NO: 11218 - DNA, 891 bp, Cannabis sativa
tcatatttagaaatattttaaccttagggtcctaattgtaataatttaaaaaaaatacaaagtctaaaataaatttcttaaaatataaactccaaactggtaatttattaatagagggggtcctaaaaatagtataaaccctttttttaataaaatttttacataatacaccaaaaatatataaaaaaaaaaaattacaaaaatacatcaacacgaaaaagttttcagttttactctttgaactagtttatttataaaaatattttttcaataaaaataataaacagtttttttttttgttgtgttatagtttatttatagttttattatacttgtcatgagtttgtctttctgattgtctttgattattttatagttaatttatagttgtcgtgagtttaatttttcgttattttttaattattttttttactttttactgagcaaaatatatttttttgtagttttaaaacattacaaacttatttttaaaatttaaaatttaagccataaaattataaataaaacataaaagaatggtatttttaaaaattctccttttttatccaaaaaaaaaaagaaatcaaactaacaaaataacacaacaaccaaacaccggccctaaactccaaagcacattttacaaaattaatcgtagctttataaaagagcttgatcacgttgtaaaatgagaaacaataaaaagttttagatcaaaaatagaaaatgaaatacatgaaaagtttatcacctttaactccatcatggattctaattttttttatatttaattaatttcaaaagtttatcacctttaactccatcatggattctaattttttctatatttaactaatttcaaaagtttatcatgaaagaaatggaactgaa

SEQ ID NO: 11219 - DNA, 690 bp, Cannabis sativa
aaaaaaatcctaaagcaattgcaagttccattcccgttcagctgtgataaaattggcaactggcaaggtatttggctcattgtaggcaataggcttgaactccgtatgaccaggtatccatttgtctaatccataatatatattgaaaccattcccaactttgtatcgtagcccttgagcaagaagttcacgaccccattggatgctttgccatgtgagagaaggtgaatgtcctaaccttgcttccaagaatatgttgttagggaagtacctgcatttcaacaattggctcaacaaagtgttaggcattttaaagaatctctaggcttgcttagctataacaacttggttgtaatgcacaaatgatcgaaatctcatgccaccatcaaattttgatttacataataattttacatcttttccaatgtatttttgtgccatctttgtttgaaccccaccaaaaattagccatcatactctctaattgttgatagaaggtttttgttagatagaagcaactcggtattgattgaaccaccgctttgagtaacacctctttaccaccaacggagaactgtttttcattccaatcatgcattaatttccaaacacgttctttgatgttactgaataactcttttttgtctcggcctgaataagaaggcaatccaagataacgttcatggcatt

SEQ ID NO: 11220 - DNA, 922 bp, Cannabis sativa
tcaggccttcctagccctagctctgcacctggaaaagaggatcttttacagcagaaaatcccacaagaagaaggatcgacgggaatttaatgtctgataggatggtggagaggatttaagccaaagattataacctgcagcaataaattgaactcgagaaaagaggaattagcagccaaaatttaatgcttaataatagatcttctttgtctctcaaatcaacactaaaagacaagatagactgctgaggagagaggataatggtatcaacaataaatgtgcaggaaagaaagagaagagagagattaaaaaggagaaaaggatagtatattaaacagactggaagatgaacaccagaggaagagggaggaacccctaggaagtttccagagcaagctagagctctcattgtctttagtttttatatacattaattagtgtatgtatatacatattaagtaaataattaaaaaaaaattgaaaagtattagatttaattttgttgataattaaaaaataaatttaaaaatatataattaaaaaaaaattattaaaatcgcgcttcgcgcggatctattccctaatatatatataagaggctcacactctattagtactcataattcataccattaattattttatcatatgatataatataatattaatacactaaaaataagtatacataaacttttctttctatacatttttatacataaataataaatgtataaaatataattaaattcattaaccttatttatttgtcctattcataattttatataaattttatttaaatatataattgaaccaataattatctatatatatctataatgctattgttaagcctgatgatgtgacaacctctatgaatttttttatatttttcttgttctctccttttttttttttt

SEQ ID NO: 11221 - DNA, 926 bp, Cannabis sativa
taacagttagatttctacgaatattgtgttcttaataagtcttgtagagtcaagtttgggactagaaaaaggaataccaagagaatattggactacgtttatagtgatctgtggggatcctcaagaataatcacacgtcgggagcaggtattttctttcgatagttgataatttttcaagaaaattacaggtggttatcttgaagagttagacggaagtacttgagaagtgtaagcactagaagataatgattgagaatcaaactggaaatattcgtggtgagggtcatgatttcgtgaacgtaattggatggtggtccttactgtttcctttaactctcaatgaaagcactaaaatatttcccgaaattttaaaaaatggaataaaataataagaactgaagaaacaataattgaaagagaaagtataataagagacaaacaattttttgcatagttgaggcgttaactagccttagtctacgtgtcagttttattcagtaatgtgtttacttgtaaatattctcaaaggtatacaagatgtatctttgtatgtttgcctgagcaaaagtacatgtgagaattcaacccttaatccatgagattagttgggtatttatagtagttagagaattacattaggatttctcattttccctctactaaagagcttacaactgaataatgtctttgggcttactcatgaagtccaacccatgaagaatacaattgttgactaggctaattgggcttgagttgatcaggtcaaaaccgcatcccattataatgggagaatattctgaaataactaccctacgcttgttatgggaagtttcccatttaatcgcgatataatattctagcccaatctgacagctgaaatttccttatttataggggaatataaatagggaaactggaagagtc

SEQ ID NO: 11222 - DNA, 564 bp, Cannabis sativa
tgacgcgctctctctcattccatgtctgttgcctcctctttattctttagacatatcattccctccccggtttttcccatttgacaattgaaaatggagactgtggaacacgctatccttgagtgtcatcatgctaaaaaagcttggaagcactccaagtttttcaactattataatacgcataaagatagggattttcacttgtttatcgctggtgcttttgaattatatgataaatatgacttggctctactattttgtttcatttgggcaatttggaatcagcaaactaaatatatttcataataaaaagggtttctctcctatgcaactttttgatcatgctactaattatttatatgactatgctaatgtctgttgtgaacagtttaaattgtcttcacatgagaaaagcaagaaccatcagggggctcggtttcaccctggacaatggatagttcatattgatgcagccattgattttgactccaagaagcacagttatggaattgtggctacagatgttgacggtcatatcaaagcaggttttgtgggcccttgttt

SEQ ID NO: 11223 - DNA, 687 bp, Cannabis sativa
cacggtaagacctgcgttctttgcaatgatggtgttgactttcccctccatctatttttccactgtatcttcgccaaacaactatggagatctggcccgtggggtgtttgctcggatttacttcagtttgatgatcctttttcgatggtgaggtggctggtatctcccccacacctcccacctgggaatcatagctatcgtgaggctttttccctttatgcgatacatttgtgctctaaattgtgggaggcaagaaacaaggcgttccatgaaggtacccccatctctgttcccacttttcagcgggagattctggattcggtggcgagttgtaatactaaaaaccctgaggggttgaggagtcccgtgttggccttgccccataccagtaccctcccgtggtctgagtacaatctcttcacggatgcagctgttcgcaacaattggggatgcgttgctgttttggcttgggatacctcggggtctctaatcgaagctctcacggtaaagagcgtggtgagttccccccttgtggcggagttggttgcgatacagcaggcttgccgtcgtgctttgctctctggttgggagtccatctccattttctcggactgccaagcggcggtgaacggtttgttggctcgggcttgcccggagtggaaggctcggagtgtctttgattccact

SEQ ID NO: 11224 - DNA, 1083 bp, Cannabis sativa
agataatttgagagggtaggtgcacttatggggtaggatatgagaatatatgtcagatgagcagtgattaaacaataaatttttattaatatattatagacttgaatacagaacaaaacattgcaaacttgagagcataattatgattctgcttatcagtctccagaagcaatatcaaccaattatttaaaaattaaatttttaaggggagacgactacaggttcttcactctacagtctacccttccatccctacaaaataataatatgatagaattctaaagacttacgttcataaatggattttgatagaaatgactgacatcaaacattttgttatcgtcagctctattgtttattgtcctaaaatgaatctaaacagccattgcaaggtcttcaatcttcattcaatcattatgtataagagaacatattgctgatatgctataaactaaagatgtagcaacgcagggcgtaggtttcgaaatattaaagggccaagaaattaccatctgtttgaggttgcatccgacagtcaattctgcaaatgaactctctactcgagacaagaaacagtaaggagcttcctttcccaagaatactttagagtgcaatcttagcatactgtttatatcattagcaatctgaggaatcttatccaaatcgttaatctgcagaggaattttagagacaatggcacgccacccggcacgtgacttgttcacaattacctaaaaatcagataaaagatgtttagattatactgtcataaatacttatttaacttgctacagaaaattatccacacaatcatacgcaggtgaacagcactacctagtcaattatctaacatcaaaactatacatacaaaacataaatctgtctggcacttaaccaagacatcaaattaatgatcatttagtcaaaaaaaaatgatgtgagatattttagcctcagtttgattcttcaatacgatttacgtatgccacacagtgtaacattttgtagaatttcaaaatctcaaagatttgatcccattaaaattgcttcatcaacaaacttggacctttttttttttttttt

SEQ ID NO: 11225 - DNA, 699 bp, Cannabis sativa
agctgtttatctacaacatggaatcttggattcttcgatggggtaagtccatactagttcccacaggtgcacattatgttctagtgtgaattggccatgtggtccaggttttcatttaagctgttttggttgaagagaaatcttcttgcacactggcacctaatttgccattccacatatcttgattctaatactaaaactcctatttatgctgagaaacttattaaacccagtactgatgatgcccttaattgcacgagttcgcagtgcttcccgtgtctgtctgtgagtactgattcttgtttctaatgtgcttgatgcaagaagggattgaaattctacccaacaataataaaaaaaaagtgtcaaaatcctatttggagtacatatcaaaactgttaattgaacatcacatgtacagaaaatgtgtggtttgatctttctcccaatatagtccggaaacctctattcttttctgcagttggtttattctcatggactatgatgttgataatagtggaattttctttcaaacagtaactatgaagggattattatggtcatagagttgatgaactgtttgtttgccagcaccttaatgagtactaaattctcctagaatagtatggaagcctgagtcttaagaatagtctgatgagtatcgcttgttatagttcctttctaatgtgttacatatgt

SEQ ID NO: 11226 - DNA, 582 bp, Cannabis sativa
attcattaattacataaacacttttcaaagcaaaaacaaacacacttttttcagtaaataagaaaaaatggtcaatgagataagatagctataaataacacttcaattaatggtcaaattcttatatattttattattctaacataacactgcatttaaaaaattgttaaaaaaaaaaaagaaaaagaaaaggtatcttgtctgaaaacgaatccatctcattttaagtaggtttagtaagttttattgtttaaaaaaacgttaaaaaatgggctcataatttaaatattttgccaccttatgtaaaataattgcgtgaaattttagagagtgtcaattatctctaatctatcagtaaaagcatctctatttttaatacttacaatattatgaataatttttttatatgattttgtacattgtagtcatagtaagaaaacatttgtagaaataacattcaaacattcaattacatgcacacatatgtttatattatataattgaatatttttaattttatttttaaaataataaatgttataagttttctaaaaaatgccctagaaacaaaaataacactct

SEQ ID NO: 11227 - DNA, 602 bp, Cannabis sativa
cctttgctagcttgcgttcgaatcccacatttaatttgatctgtatatgtgttctgtctattgcctttttcaaatcttttgtgcagcaaaactacccagtattaaatgccctcgatatgactgatattgctcttctttacccatacaccgtgagcatttctctatttatagtcaagactaggagaagctttgcttcgtgcgacttagctacatatattttcccctctctgcaaagcattctgtcctttagattttgctatattaatacttggttatcccttgctactacgtccatcttcccctttctgagttccaaacgagtgtcctcacccatatgtattcttgtgccttctagttttagctttcaaccgtggttcgtttgttctcttgtgcttttattttctcataatacgtccatattgagtaagagttgcttttcggtcagtttcctttcgtttatttgtgttatttttggaagcgtacattgggttagtctggggctttttcttgaagctgtggttctctttcacataatctccttgcctagttactctacttccctgtccaaccttgctatcaaccactctcctaatcatctccta

SEQ ID NO: 11228 - DNA, 1066 bp, Cannabis sativa
ctcagttattgtaaaaaaacaagatgaacgattgaaataaaattagaagcagaacccagcgcactaggccatttgtcaacctggtgcttggtggttattttagagcttttgggatgtcaatttgattcttccaaggttctagaactttaagaagaggtctcctacctcatttttgaccattttgatgagaatgcttagagcattatttacatttgaatgatcaaaaccagtgcaccaggttgattgtcaacttgtgtgctcgacccagcaccagggcaacctaagcattgggctaagtttctaggcctttgggatcgtggttttctcctcgagtttgtttgtatcttgttatttctgatgacgagaaaaaaattcctagaacagatttttagaatgctgattagaaatgacccaagttgacaatacgtaaaccttttcgctgggtccagtttcaagcaacctaaaagtttcgtttggtccctaaaaatagttaaatcttaatctttactgtaaaatggagaatatgttgggaagaattcacagaaaaaatcctcaaaaatggcccaggttaacaaaatatcaacttgggcgttgggctagccccaagtaacaacctgggcgttgcgctcttgttcttgcaccgaggttgggctatttcatccttaaaagtatctactacctcatttgtgatgaagacgaagaagatgcacgagtcgtattttttatttgacccttgcaagtggcctaggttgacaaattgtcaacctgggattgtcaatctgggtgttgggtgcctaatggttgggtgttcgggtgctaaaaaatgaacgttctccgaatattattttgatgcctcaaacatatttgtgatatgtctagttcatgtcccaatgcaaagtttgacccattttcactaagacagtctcgaaaattgaatccctagttgacaatgtcaatgtgggtgctaagtgaaactctaagtgcccaggttgaattctgaggtgttggttattgtattttcagctcctgaggcctagattttgttgttccatatcttcatggtaca

SEQ ID NO: 11229 - DNA, 923 bp, Cannabis sativa
taagaatttaatttatcaaaaataccaacaaaattttaaaaatctcagctctctttatcgatctgaagcacatcggctccttgagccatgcatttccaaaacgaaccacttcctgttggatcaccgactccaaaaattaaggtgaatgatcgaaggtagaggtttctaaattggtaagttttgaagaaagaaaagattgagcccaagaagaacttacccatagcacggtggagacacacatccacccaagcttctgtacctctgcttttctcccaaatgaacgggtggccgggaagctctaggttgactaactcacagtcggaaagggtttttctagaacccatcagtaagccaattcaagtaatatctctggcttgtcctcttttcatcatggctaataatattgttaatttaacctattacaaaccaaggcaagaaatttgtgttggccaaccaccatagaagatcctaagagctacgatgaagagcacagttaggttcactgtagaacctcgccaatcgcgattgaataccatcttcgaactcaacaaccaaaaaaattaattctccacaaagtcaagtccaccaccacttaaaactaccctcaaagcccaaatacctttttagccactcaattcttgtttcattacatttggtttcacataaaaaataaaatatggtttcttttgagatacaatttttttaagggaacaatccatcgatccccaagcccacgacaattctagtttaacacattcatattgtatggtggatctgtgaaacagaatctgccctagacaaattttttataatttccatttcactcaagcccatagtgacatcagcagtatccatcgacccattatctcaaatttctaaaataggccttctccttttattttccaaaaccatcaaatttctaa

SEQ ID NO: 11230 - DNA, 744 bp, Cannabis sativa
  modified_base (575)..(575): a, c, t, g, unknown or other
attgcctttgaactgctcgcccagaactgagatgtactatttttgctgcctttgaactgtttttatattatatatatatacactattaatttatccaatcatgtatatgatatattttttttttggagaaaatagatgacaatagatgatggaagagtggatatataattttagaaatttgttttgttttgttattttttttatatataaaaaaagctgaacaataaatggcctatgttttacgatatttttaatatatataatttatttattaatatatcaatattatttttgcacacatttctatcataataatatatattttcatgaaaatcccaaatttacacttaataaaatcacatctaaaataaaataaatgaagcaaattataaacaataaaaaatcagaacaccatataaatatatttctctttgttaaaatttagccaggttactattagggttttagtcaaaatcttgttatacatatattaaatttgaccaaagagaatcacaagattatatattcttttaatttttaaaataaaattaattatatatatattaaaaataaanaaaaaaaaaaaaaaactagctcaaatccatatgtacgtatttattttaagatggaaaaaaaaatgaatgagcaaaaattaaattaattaattaatgttatgtacgtaccttcttctcataggtaatatcattattagatgattggtcttgcttggttttgagcctaagc

SEQ ID NO: 11231 - DNA, 772 bp, Cannabis sativa
ttttgttttgtatagaaggtacataaataacaataatgaaatcaagatatattttattatttcattttaataagatacaattaatcgaacaaataactagccaaagcactcacattagtgtttctaaaatagaaaatctttaactaaaaacaccttacatactttaaatactttaaagtttaaactctctttatattttaatttttttttaaaattcactactcatattctacatttatagaatactattaattgttttaaacatattttattaattatttgaagttttaattttactttttatatagggatatatataaatattaatattatatgtttgaaatgaataaaatatattaaaatttgaaaaaataaaataaaattttaataatgtattttaaagaagtggatatatggtgtaatttaagagtttgaagtaaaataaagaaaataaaattttaatgatgtattttaaagaataaagtagagaagactgctatttataaagttttaattccaaacaatagtataagagggtagagtaagttaaaaattgaagaactatattgcctttaggctagacaatgagttatgctggtttgaagaggtttcaggaatatcctaatgtgattctaatcacttttttcaaaaaaaaatatcagatttatattttaatttaataattattataaaaattgttaagcattcgtaaacctcgtgatgataatcgacatgatattttctaataattatagtaattttactaaaaaaa

SEQ ID NO: 11232 - DNA, 714 bp, Cannabis sativa
ttttttttttttggggggggggggggtttgtccttaggctttattagactgacccttttccctttgggtgattctaagaatctaattttatttgccaaatctttaacatttgtaactgttgttggctgagtggctatgggagttactctttggcaaagtgagtttcccgttgtgataagtaggtttttatttgagggagcattgctctttgagcggtctcctcctcttacttatttctttatccttttactcagatgggagggagcttattgtacttgactgtgctacaacatcttgatttgtttatattaatccttttactcatatgtaagggagcttattgtacttgactgcgctacaacattttgatttgtaaattttttcttacgtctaagagacgtccctgtcgttgcagcatttggccatgagtatctttcaagatctcttttagcttgatgacttttgtcactattgaggtcgagtgacttttgtcactcttgaggccaagtgactttgtcattctcatggccgagtgactttttcactctcttggccaagtgacttttgtcactattaaggtcgagtgactttatcactctcatggctgagtgatttttccactctcttggccgagtggcttttgtcactcttgaggccaagtgactttgtcaatctcttgaccaagtgactttgtttcttacaaggctacaagtg

SEQ ID NO: 11233 - DNA, 597 bp, Cannabis sativa
tctttgacttcctcatgattataatctctcaaaagaaagttcacctgctgctgtgttagagccccgccttctctaagtattttctgttgcactagcttcctatcttgtgcacggctgcccaatagttctttgtaatactgaatgaaagcttgaataatagcctttggttcttcaatccttactccttcagcattcacaatagtaataacttgattatgtctccttctctctcgaatactagtgtgaaaaaatgctgagttttcatcacctgctcttgcccaattcaacttagctttttgctgcaaaaaagacaaatagctcttgaaaacattagtgtactgagttctgagctccttctcctgctggtgtaggttttcattaagtggctactgctgcaataaggcttgacattcatctaacttagctttagcaaggccctcctgagcacaaatgtcagcataatggttactgttcaactcccttagagcagattttatacctttgagcttggaaacaattcaaaacatcaaagttccattaaactgttgttgccactgttgctgtatgatttcatcatatctggggtgtgattcccac

SEQ ID NO: 11234 - DNA, 511 bp, Cannabis sativa
gtcttctttgctcatgtcaacaatgtgttgtaacactcatgagcggctctttgcttacaaagaaggggatcgatgccagctgctgtcataaatgtgatagacaagtggtagatggacgagatggcttataggtcatatagggctggccttcctattatcacgttgtatggagacttagtgtcgaccattatgaaagtttccatgatggtgtttttccttggggtagtaccgaaaatctttggtaatttaatcttaccatagggaatgattctatctccgctgaaaccatacgtgagttggtcacatggctctaggttttttaaagacaaacccattctctccaatattttcttgaaaaagtatgtttgatgatgctctattttcaatcatcactctagccaccatcatgttggctatttgaacttcaacaacgagatgattgttgcgagggtagtggacgtggtctgagtcaaattcctcaaatgtaggatcacactcgaaatatagatag

SEQ ID NO: 11235 - DNA, 770 bp, Cannabis sativa
attaggtacaggcatcaatgacatataggtacctggatatggtacgagctcgtctggttagacgatgcaatacattggtgtcagattgtggcacaggctcatccgattagttgatgcatcgacattatgtatgatatcaaattatgatacaaaattacctgattaggcaatgcaatacatgattgtttttatttctatgcatatgactgattatattatccacctttaaatgttattgtttaaacattctataatagtgaaatgaataattgtttattccatgtattatcttttattacttttcttactgagtccttgtgactcataagcgctccgtggtggaagtaaaggaaaaaaaagctagatcagccatgaggtgacagtcttctccaacaatgtatgtattgaccctataggtctgtgtgccaagttgcccggagttgtttttggactgtatctaccatatattttgatttagtattttaacttgttgtcgtatttagcctttttgtaaaaattttacaacaaggattctcagaacacatttttagtgtcattatgatgtccattttaatgttttattttagttaagtttttaatattatcatagattttaataattaattactttatttgtactgttttagtttataaaatcacacacgtggtgtctctatagggcgttacaccatacttggttttctcaaagtcaatatggatgctgctatttgttcactaggcaaatctagtggcttgggtatggtgatttg

SEQ ID NO: 11236 - DNA, 905 bp, Cannabis sativa
ttatataaaggagtataatgtgctcatttggatgataaattttttatcaaaaaagcactttgctagaaaaccctaaggcttgataatttctaaagctatttcctatagagtttccttagtgcttagagataggggaaataagtttttgaacaaatgtgtaatacattattcaagtcgtagtgattttcactaatctacattcaacatttcgagtgagtatattatacatatatatttttctcctgctatatatatgtattatactacgtgtgttgtaatattctgctatattataatatatatatagtgtatataagtatgttgtaatatttatttaatcaatctcttttattgttcttgtattatttttacaattaaattatatatattttaatttatattctattataataaaatttctaacaaattggaggtttaaatttttgttataaatttagaatggataaacttgacaaaataaattgtatgtaaagaatttttgtagttcaaattattaagaagctgataaattaaaattattaatttaatttgatgttacatgattttcagttaatataacccttccctcaatagaaaaaatagaataattaaaacatatttaatatagagaataaaaaaaagtatgcatataataataaatataaaattaaagataataaatttcaatgtattaacattgtgatatttaagttaaaaataaattaaaaaaacatctattttaagcaaatatttgtgcaattttgttttgagaaaaatacaataaattaagggcaaccatataaaatcaaaatatttaaacatttatttagcctaacttggtggtttcacactttttctcataaagaggagatccaaatttaaatcttcctctccaatgtaaaaag

SEQ ID NO: 11237 - DNA, 773 bp, Cannabis sativa
aatatgtatacattaaataagccaaactaaaaagctaaatatttactattctatttatatatttaactcaatgaatagtgtagtagttaaatgtttttaatatttatttaatatattttttgttgactttaaaatatgtttataaatatataatattttattaatttatctattataaatttcatatttaaaagatgtaaaaaaaattgaataaagaagttaatatatgatatatatatatatgtgtaaaattaaattgataaaatagataaaaaaaaaaatgaaagatgtaaaatagagatgttttaccttgtgagtgctctagtctataaggtgtcaaattcaaatcacacttttatgtcaatacaaaaaaacaaaagaacataaacttaaacctaatcttgaaaacaattgacccttagaattatataacagtttactttaggctttaaatgtgaatcttaaaaaaacgtataataaagagccatacaaaacaaaagtgaaacaattaaaaaataggtatgaaatgaaagtaggtttatttatttatatcagattattgcgttatgtgcgtgcatgataagtatatgataaatatacttagttatatttttagtttttatttttgtaatatatatttttaaaattttataaattaaaaaataatacttattaaattattaaaataaatatattaatattatatattaaacaatatttctattctatataaaatgtgcctattattgagtgatgttggcacgtaaagggtc

SEQ ID NO: 11238 - DNA, 680 bp, Cannabis sativa
ttggcattatttgaattgatgaagtaagcataaatccatacaatccaataatcacatactgatctaattataatttaccgtcaaatattgaatattcaattatgatcagatcggattagatattatttttaaatatccaattgaatcagatcagatattgaatgagttgtccaaaaatctactatatccaacatccaatcgaacatattaatattttaattttgtttagatgaataattagattttatgttgttataacttatacataataaaatatatgtccatatatataaaaattagcatttaaattttattttattttatttttaaattaaataaatactggatttaaaatattagatggatttgatttgatcggatccaaaaaatactgggtttaaaataataaatctaaattacactaatagatatacatgaaatacattcaatggttagaaccgatccaatccaacatccaatgaatgttgaatcaattagatgattgaaattaattggatcgaatcggatagtaaaaaacatctaatatataattgaatcggatctgaatagatctaaaaatattgaatgtggtccaatatacacccctttatcccccataatatgtgatgctgagctttttcaatgttgtttttggcaataacatgtcaagtaaatctctt

SEQ ID NO: 11239 - DNA, 668 bp, Cannabis sativa
  modified_base (233)..(235): a, c, t, g, unknown or other
  modified_base (327)..(340): a, c, t, g, unknown or other
tttgttattattgtggatatttactgcgaaactttatttgttacaaatgtgatgttaataaaaaaaaaatgacagtaaaaatataatttttattattttttagtcataatatatatatatatattttttttttgactaaatgtgactttcagtcataacaaaatgttactggtaactaaaatatagtatttaaatacaagttgtcactaatttagtcacaataaattataatnnntgtgactaatacctttagtcacggactttttagtgacaacataggaattataatttataattagtcacaatttttatacttttagtcacaannnnnnnnnnnnnnaaaagtaaaattttttatagtgtttgttgcagtcctactttcttttgacggttaagtgttaggtcaaaaacacttgaggccatatttttttagcttatttaatacatggtctaaaaatatgtcgccacacgtttttaatttgacatttaatggccaaagggtacgactacaacaaaattataaaataaaatacttttgtcgccactttttttattagagtcatatgtgtgacaattgtaaatattaaagggatttggccgcaaatatcccttatcattgttgttctgttttcagcttgtgaaattctataggagaattggtttcaaag

SEQ ID NO: 11240 - DNA, 548 bp, Cannabis sativa
tactgatattcaagccaaagaagctcaagcaagagttcagctcgatgattgccaaaatctactgtaacagtagctgttaaatgctaaactgcaccagcaagaacaggaagctaggtccaattatgctgccatttttaagaattattttttttttttgcagcagaaagcaaaactaaattgggcaaaagcgagagatgaaaactctgcattatttcacactagtatccgagaaagaaagagacacaatcaggttctcacagttgttaatgcagaaggggaaagagtagaggaaccaagtgacattattgagcctttcattcaatattatattggtctgttatgtttcaatatgcaggggaggaggccaatatagaagtgcatacttaaagaaggaaatctgttaacgaaaattcatgcaaatttccttatgaaagagtatacccgagagggggtaaaggaggcaatttttgctattcctggtaataaagctccaagaccagatggtttttgtagctccttttaccagtaaaattggaaggttataggta

SEQ ID NO: 11241 - DNA, 623 bp, Cannabis sativa
cctgcatttcccactcgagttggctagtacacttgaatttggacttgaggtaagaaaaatataactataccatttagcatgttgaatgtgatacgattattgccatatgtatatggaggagttattactcctcaaaaactcattgttgggtaatgtgtacggaagagttattactctttaaaagccattgtatggtttttaatatggaagagttgcactctctaaaacccactgtatggtataaaggttgtcttcttgggaaataagattaatggttgcctcattacacaacgaaccgaaggttttttattaaataacgaagaataatggttactttattaagtaacagcatagtttgtcttattaggaatataatttttattatggaatgtttaaaatatgtgattacttgatattgattttcttgttgggtctttgtgactcacgggtgttatatggtgcaggtaaggggaaaggcaaaattggacaactgtgagtttgaagtcttctccaacaagtgtacctattagctcttccggctagctttgccaaagctgtcatgagtagtttaatggcacttttgatgtaaaacaattatagaactattttgtaattaaggggat

SEQ ID NO: 11242 - DNA, 529 bp, Cannabis sativa
tctgatacgctccacgagaagaaaaagtgaagtctgaggtgctcgtgggcgagcacacacctatgcaacatgaactatgatgcccaggcatgtggctctataacctgggtgacatgctcaagctttctgggactttttggggtgcaattttccaatatcgagttatcttctccacaatctaggacctttcgaaagaggattaagaacgagaatttagctaagtttttcaacaacttgaagattccctctccaggtaaacaccgctttgggagcacaagtttatcctaggcgacatacacctgggctccccgcgggtgtagactcactttggcagcgtacaattagggtacagatgaagaattatttccccgcaaaacaattcttgcgcatagggtttactcgaaagacaagatatgttttgcaagaaggaaataagacaacacaacacagttccgagagcacaggtataccctgagcgacatacacctaggctcccccctctcgaatgtgaagacaaagccaagatctt

SEQ ID NO: 11243 - DNA, 556 bp, Cannabis sativa
tgttattcttcaatccctagtggttttcatctgatattccctaaagtagaagctcttttaagagcaatcacttggtgctctgctgtggattttcctattaattgtattgtatctgattgttagcatctaatcaacaaaattaagcataaatggcgggacaaatcatccctttctgatttagttcaaaagattgttttctttttctcttattttcctaatgtttctcttcattgtgtctctacgaactataatgttttagcttatagtttagctcaaaggattttaagaactgataaaaaaattatttggaatgggtgtgtttcgaacgtatagttgtttaatccttgtaacatgaattttattgtatatccttttggagaaaataatcaagattagaggtgattgttgaccatgcgacagtggctttggatgaatttttcgctgctggtttttctggtatgcagcagtgcctggggctatgaggaagggaggatctaggtgaggtgttggaggttggttgcaaggactcaaagccgagctttgttgctggttttag

SEQ ID NO: 11244 - DNA, 805 bp, Cannabis sativa
cctactatatcgtgctcatctacagaggcaaaatactgggatatggctaacgctacttatgagattacttggctcattgctcaacagaaggatttccctatttctcatcaagtacctgttgccctatactatgacaatgtaagagccatccatatgggcaacattgttcgggagaaaattcaagatgggaaactcaagcttctccacatcgcatccatgctcaacctggctgatctctaaccaaactctcttcccttctcagtttaaagatttatcgtctaaaatgaatgtaaaaaacgttaataagttatcttgagggggtgtattagaacccaatacttgtacttattgtttggttatttagtcaattacagggtaatagttttggttatttagttatgactaacttcagctagtgaggatatgtgtgtatataaagggctttctttttcttcatctgtaacaaattacaatttgccaaaaatagaatcgattctcaattctattaattaaacaatgttcatgtaaataaaatgcaacaaagtcacaatttttttttacttgtagaaaccagagtcacatttattgtaagaaaaaactagtatatgacattaattattcaatataaaagacaaaaagtcaaccatttttttgaaaccctaatatttctattctaaagtattgatcgataggtaactgtaatgcagtaatttttttttattatgaaacaaacgttcaagtaatttatttttttctctatgtaaaatgagcttttagtcatctgaaagtttcaccattttctttc

SEQ ID NO: 11245 - DNA, 693 bp, Cannabis sativa
tggcccttctttgtaggactacttattacttctcatgatatctctagaaggtgatagtagattcgcctaccttggtatgataattatggccaaggacagctagcctcatggggaatgaaaagcccaaaaattttttacccaaagttatgcttggtctaggaggtggatcggtgggtgtgggcctcagaggttgttgtcctattgaatttagaggtactgactgttgtacttgagttggagtacattgggatggaactatttgcagctgttaaggtgatgtagttagttgttgttgttgtggtagaaattgttgttgctgttgtggtggtggaagttgttgtcgttgttgttgctggtgttgttgttgctattattgttgttgttgttgttgttgttgtgatggtgatagtgttgtagatgatggataggataaagttggagttgagagctttgcctttctatcaccttggctcgaggaagtagtcgaccctttgcatttgggtttgacaggggcattctttgcggaaaggacaagcccttctaagatgttgtcagaaccttttacactcattggaatgtcaaaaattgctcccctcttaggaggagtttccctcaaggcttgctcccgcaaaggaactggaacttcggacgcctcctagaaggtggtagaagttttctccacacctacggcag

SEQ ID NO: 11246 - DNA, 516 bp, Cannabis sativa
aaacgctcttccagaaaatatctaacatttcataatcaagataacttttggagatatttacatttgaataaactatatccttgatcgagtgagtaattaagctacttctcctaattttcttcatcatcactaaaaaacgtaacagtagtactctacttcgatgcgcatcatataacctaggggacatatcagatgtttctaaataataatccattaaatctacaaataccaattaaaaattaccaagataaagatccaatattaatctccagttcttctttggtcaataataatccatgttgttaatatttattatgtggaggaagccagtatctcttcaaatttatccatgatcatggcatgtaaaatattttcattatttcttctattctatatatgcatttaaatggtacatgttagaagtaggaaaaccatatatgtgtccaaaaaataaaattgttagggggtagccaccaataattaatcaaacacacttaaagttataaaagaagcagt

SEQ ID NO: 11247 - DNA, 1148 bp, Cannabis sativa
  modified_base (944)..(951): a, c, t, g, unknown or other
tactgtgtttcttaatgtcaattccattttatgggactgatttttttcttttattatgttaatgcattaaatttaggtggcgtttggtttggtttagtaaaggaaaatgataatgataatagtaatggtaatgataatagaaataataatgagaatgatattatggtgttttgtttatttttggaacctaatagaaatgagtggtgtattggcaaaaatatcctttaaattcttagatggattttatataaattgtgtattaattgtgattatgtaggtaaagagttgtaatccttattcatttaaatgatgtattgtaatggtgattctgattacaattatgtcaaatcaaacatgacctcaagagaagtgtttaaagttttggttaaattagaaatgcttttgtaatcttaaatgcttcttaattttgattagtatgtttccatgatttgtatgatattataggcaaagaaaagaagtgtttaaagtgagtgttttgtaaaaatatccttcatgaaatttttaattagcaaaataattctacaaaaaaaatttattagtaaaataaatttgtatgatagtaaaagcaatcaatcaattacattgtgccactataaacaactataaatttacactgtacaactatcattatggttgcatacactacaaaaaccagttacaactttttagtcatgacataaattttttgtgacgaatatgacttttagtcacaacaaaaaagttacttttgactaaaacatataatatttagatacaaattgttactaatttagttttagtcacaacaattattgtgattaaaaatacatttagtcacaacaaattgtaatttttgtggctaatacctttagttagaatccttttaatcaacgtaggaatgctaatatataattagtcgcaatttttttttacttttagtcatnnnnnnnnttgtgactaaaagtaagattttttcttataaagtaaattaagtgaaattattttataaaatttaatatttcatattgttaatttgataaatttcacgtttagagttctggctaagattgagtaatcataaacccttttgtaattttaaatgcttcttagttttgagtagtatattatcatgtttgtataatactata

SEQ ID NO: 11248 - DNA, 600 bp, Cannabis sativa
aaccacaacatcatatttggtgttacactaacactaaatataacactataatttttttcattccaaccataacactaaaatttacacaaaaaaaatatattttattattatataaataaaatataatatattttaatattaaacaatatataaacaaaaatcaactagtaaataataataataataaaaagatgcagctgctacagactacagtattactgtatatatgcagtgcactgtagcaaagactgcatatatgatgtgaagatagtgctacgttggagaagtatatctactgcaacctcaaatttgagggctcattagagttgctctaaatatgttataattttactaaaagtagtattttgtgtaaatttttattcatacaaaattgacggacaatcccacgtaatcttcaaggtggaaatttcaaactttttgatttgtttaagaatgtgattatgtgagcaaaaatatggtttttttttctcaaaaaaagttatttgatgattttttcttaaaattctttttaagttaaggttttattttctatattttttgtacacatcttagtttatgacatagtttctcttttaagtc

SEQ ID NO: 11249 - DNA, 550 bp, Cannabis sativa
gcaaccttttaggacatgagatgaaattcctcatttctcacactgaaaaaaaaaaatataatacaccaacaccacaagttaagtggttgcacacactagcatcgatgtttcgagaagaacagaacaatgggtcatcaaggaggaagagttataaggtgaaataacagtatgatggccattgatggaaagtggtgagttgcttgtatcatggcaaatattctactatcacaggcaattctacatatgaaatcaatttatgtcatgctgttcaagatctcaatgtggataccgttgggaggtgttggtgtgtcatattcttaagatgatgtagaaacttgtttgtagtattattgttaccctaccagtatatgtaaaggttatctaaaataattagggatatgccaaattcaatcaaactcaagtgccttactatgcctctttacctcccttttcctagatccataactaaaataactttgaatttgaactacataaaaaatagaataccattggatccaattatacaaaataagagaacaaacaagaaatg

SEQ ID NO: 11250 - DNA, 734 bp, Cannabis sativa
gcaaagtgattatcacgggtttggcaaacatggtagctaatagtaagcttctccccattataaatattagtttttctttcttacattcgccatttcatgattgatctaatgaattacataatgtgttatgttttcctaatctatagaaaagcttaatcagtatctccgactcactgaagatgatgacatgttttttgaatttcattctaatgtttgttatatcacggactaggcaacatgtcaacccttggtggaaggacatcttaaggatgggccctactccctcttccccagcctataaagatcttctcccaatgctaggtcttttgtgtctagattgttcaattgtattttagctaattattactagtgtagtccttctagtttttaaagtgtttcagtgtagttcttaccaacttttgtaagtggcaccaatgtttgggtcactttagtctaaatattgtgtctcaattagccagtgcgctaccctaccatattctctctaattcaggatatagatattatgtggtatttttagatgattatactaggtatgcatgaatttttcccttccacactaaatctaaaatcttatctgtgtttcaaacttttaagacacaagtcgagaaatactttggtcactacataaagttatttcaaagtgatttgggtggcgaatataagccattttctatttttctttcctcccacaacatattgtatattgcaaacaa

SEQ ID NO: 11251 - DNA, 748 bp, Cannabis sativa
gtgtaaatatattatatgattcttgtgaaagaaaattaaaataaagacattaggcaaacagaatctttacttttcagacaaaaagcattgatagtattgcaatgttttggaaacttattaattaaaaaggagaatatgtttatttggtagggaaatactaaaagaaatgtcatatcacttttaggtcatgtttggtttatagtttgagaattgttaaaatgtattatttatgtttaatacttttttcggtgtcatatgtaattaattattggatcttatgtaacttaacaaatattttttaaaaaatattggtaactaatcataaagcgttacctatacaaggtgttgaatatcactagtgaccaataacaatgctcttattataatagtaatagaattataattaccattttgcattactattacgattctcattaccattcttatctcattacattattattactactacattcaatcaaaccaaaatgtcttatataatttaatttaattattattatataatatcattaatcatttataaaaatatcacatcaacactatattagtggtgacttataacaatactttcattttgtatatgtgttttgagtaatgctagacacatctaggtaatgtatataatgtgtgtaatttaagtgtgtcacaattattattcaacagattaaaaaaaataaattagtactttatgttcttaacattgcttatcttgataccatgtattgca

SEQ ID NO: 11252 - DNA, 586 bp, Cannabis sativa
caaacaactccttttctctcaacaaaagatggtaacccaaggtagcggccatagttatccactactcgcacccctatatttccgccaaacgagctcttattgacttggggaccattttactgaaacacatctttgatttatgtaagttaacagcttgccccaacaatagagttttttttaacattccacatctctgattatgataattgcacacaacaattattattattaataatagagttttttttttcatcaaagaaaaaatgaaataaaacgaagtgcaagcaaacgtcgaagtcatggggattcgtgagactctaaattggatcaaggcgcgacaatgaacacatgtgacacttgaaattgattgtctcacggtggttcaagctttacgaagctctatcgatatgttatccatgtttgttcaagtggtgaacatttgtacgactatgcttaatgaattaaaaaatattgctatttatttgttatacgataagctaatatggtggttcacaattttgttagagcctctatattgtatcctgattgtagttttagtttgaagtttgttccaactgatttgtta

SEQ ID NO: 11253 - DNA, 617 bp, Cannabis sativa
ggtattttgggaagatatccaaaattaaaatcgtgagagtttagtcttaaagtggacaatatcatactaatgtgagagtcaaggtgagggacttaacaagtggtatcaagccaaaggttcaagagcactaaaatagtgggttgtattagtgatgtgtgggagaagccctcaatgtgatgatcttgtgattgaaaatatatatatatatagtgccttgtattaaaagtctatctgatattgtggtggtcaggcggcgtgtcttgttgataattacagtagtacaagatagagattggtgttaggacctgtgtcgaaagtcttcctaacaaatgtgatggtcaggcagtgagtttcgttggtgatagcagcaatataaagtagtttcgctggagaggaggctacgagtatgtgatttttagtttgagggaaggattgttgaggtattaacctaagttccatattggaagaataagcaaaaattgtcttggatataaatgttccacctactctattaatatgaggaaggtcccaaaaacaaaaccgcgagagcctagattcaaataaataatatcatattaatattaatgtgaaagtcaacctaaaataatcacccaaca

SEQ ID NO: 11254 - DNA, 655 bp, Cannabis sativa
caaaaaaaacatacaatttatacataaattcaggggtggaacagtaagagagtaagtgtgaaaaacaaaaataaaacaaaaaattgcagcacaaaagttaaagatagcctaaagcattacaatatatctacaatctacatatatagtagataaatatatatgggataagtttgatggatacaaattttcactaaattttttacattttttttttaccatcagatcaaattgaatgaagggctatgataaaaacatgtaataggagatagtaaagattagggttgttgttaaccgcaaaaatctaagaagcaaagtactcttacgaaaagcggatgtgtgggtgaaatagttaagatgtccaatacaagcataagaggacaaaggatggcccccgcctcttttgccctcaaatcttctttttctaacattgggctaccccttgatacatgcgcatcccctcgctcgcgcccccactcgcagcccatgctccttgctcgtagcccgcgttccctactcactgcatgtgcttgctcctcactcgtagatgcccgcgccccacttgcagcccgcacctcgctcgcatcgctcgtagcccgcacctcgctcgcagcactcgctcgtagcccgcgtccgcatcttgcacttgtatccccac

SEQ ID NO: 11255 - DNA, 518 bp, Cannabis sativa
tttttttcacttctcactaaaaaatataagtttatttggattcgaaagtaattgtgtagttattagaatgataattacggtcttgtaattacactatactttaaaattcaaggtgtgtttagatatgaaatagtaattatatataaattcttaatattttggttgacaaaatagttaatacttacacaagaaaataatattttttagtagttaattatataaaataattttttttagtaattacattcaattctttggaactgctcaatttatttcaattacatagttaattagttataatgtaattatatagtcagacaaatatgttaaattgtgtaattactactaactacacgaaaatttaattacactgtgattttccaaacacgcactttgtctccattaaaagttttacttatttatttttgtataaagattaaatcaataaacatatcattctgtagttctatctgtcgttttggtcctcgattgtcgttttttgattatctcactgtcgt

SEQ ID NO: 11256 - DNA, 688 bp, Cannabis sativa
tatttattaaaacttctataaaacttttttcctcttcttatatctcttactcttactcttttttagtgctctttttttttttttttgtctttttcttatgttatattttttattctctcttttgcgtctttcttttctcaattctttatttctctctcttttttttctttttttttttcaacgctattgtttttatctttatatatttagaattatatataataagtctctatttttatatctctttttttccaacacttttttactctagcaaaattttattttatgattttttttaaaaaatacacactaattatatttctttttctctcttttacattttttttacaatttatactcaaacaatttcatactatttttttcaattaatcacattttataaaaaaaaaaatcttaattcgtttcttttaacgtttactaaaatatgattttttttttttactttcacacattttctcatattttttttagtactctttttctctcttacaaaaaaattaagagcactcatccaatatctttctttcttttacatgattaataaaagtacttttttttttatgatttttttattgatttatagctctctttttgctattttatagttgttctataattatatttaatttatgttattgttgagtattttatagttttttgttttgtt

SEQ ID NO: 11257 - DNA, 572 bp, Cannabis sativa
ttttgttgagagaaaaggagttgtttgatgtaatcaaaaatagagtttggagtaagattcgaggttggaaggcatctctattctctgtcactggaaaagaggtgttgataaaggctattttgcaaactatcccgacatacacaatgagttgtctagctacacatatttggtgttgaatcggatttcaaagaagttgtccagctggtatacaatatggatatgagttgtagggagtatgagagattgttgttgtacattaggagtttactgcaatgtcctactgtcacaggactatcttttatgtatagagaatgttataaagtagctcatatattaaccaaatatgctttgaaatgtcaaggtagtgctatgtggattggagttatacccctgttcatcttgctattaagaaaaattttccatttccttataacatttaactgctttaatgaattctgtttccaaaaaaaattatcataataataattgtatgattttttttcggtaataataataataagaaaaagaataattaattattagagtcagtatatataatatgaagaatatga

SEQ ID NO: 11258 - DNA, 525 bp, Cannabis sativa
accgtattaacgatagagactgtcacgaacaacgggcccacgtagagaactcctgttaaaagaacactcctttcctgaaaatcaacaatgcttatgtcagaaaacagagtggtgaatatgtgaagagaaaaaggaaagggtgaaatgtaagacataaaacaattacccatccagtctcggaaaattgactgtggaaagcggcagaagtgtagccagcaaccacgaaagtcagagcgtatacaatggctagagaagttaagagcgctccgcgattgtaaggatataagactccgaataatgccagcaaaaataagatgcaaatcctataacaatgaagaaaaacataaacaataagcataagagctgatcagaacatgatcgagttcatgcaaatcgacttacatgaacatgaaacttagacccttggagaagatatataaacatgatgaaaacagagaaacatagcacaacttcaatagtgtgcaaaaccaaagataacccaaggtacagaatatcattttgaat

SEQ ID NO: 11259 - DNA, 569 bp, Cannabis sativa
tcaataaaaaaaatgatagatatacttaaatgtttttgaaaaattctacaatgcatatcataaagggatgttttggtagacttttttttttttttttttaaatttttgatgatgatatactttatagttatttaagactatttgtaaatttttaattttttttaatagtttgaaatttcaaaaataaaattcatatattttattgttcgcatgtctgttttgttataagtgtaataagtacgtaattacttaaattttattttcagcattataaattatttaaaattctttgaaaagttacatgtagtcttgaataatttcaacgtatgtgattatgaagaaaaaaattaaactaaaatattggaatagatagagatttaccataatgaccaatgaaggggtctactatagaaatttactaaaacttttggtggttctcaatttttacttttgtagctttgtttctaaatgtatgttttttttttagaataatgccaaatacatctatttgtgttcaaaaattaataaaaaatattatttttagtttatggtgtcaagttcaaccttct

SEQ ID NO: 11260 - DNA, 553 bp, Cannabis sativa
caaacttagatgtattgaaatacattttaataaatgagattcaacttaaataaaaataatttattgtaattatttgccatgtatgccaaatattcttgtgatttcagagtaattattcgtgaaattagagaattataagtttaaacctttgaacacgtcttttcagagtaatgtgctggatgatcttctccatgccgcatttaatgcgtatacaatgactttaatctcatgcagtgtgttatgctctactcatccttttacactttcttcgagtcgaactcacttacaaagaggaagagaccgaaacctctcgtcctccaggtagactttcctggagatgaccaatcctttacaattattgtgaaaatagcaacctctgaaagtaattagaggtggcacatcttatagtgttggtcccgttagtatctgatttgctcttgaattgtagagttgttcatcgaaaacggaaaactgtggtataaattcggaccgcgagaatctgaaccaattgtatcataaccggggaaatcatttttggtggtctggttaatcc

SEQ ID NO: 11261 - DNA, 626 bp, Cannabis sativa
tttaaaaaaaaattaagaaagtaaccaaaattataatattattaatattgaataaaccaaaatccttaaaagaatgaaggtgagaaaccaaaaacaccattaaattatttaaataattgaaaccaaaccacaccaaacatagtaaataaaagtgttcgttagattggcaagaatgaataagttgttatgtaattaatagagagaaacagcaaatttatagtagttcaccccttttgtcgcgatagtaatggggctacgtctactctgaatttttatttcttacgagatggtattttacagcaacagacatctaagtatcagaaactcaaactctagagagagaaaatctaaagagagaagttctcaccttaatatgagtagttttctaaatgtgaaaaatgagctaagagagctcttatttataggtgaaggagacccacaaaaataggagaaaatacaaataaagtattcttaaccgttgatgaagatctaacagtaaaaattagcttgtcatggtgatgaccaatttttggtgcccggtgggtcccgtcgtaggtaatccggagcttatttttgtaactttcttaagggtaatttgacgatgataattttagaattgcgactgg

SEQ ID NO: 11262 - DNA, 755 bp, Cannabis sativa
ccaaatactaagcattttatgaaaaaaaaaaattagaactttttttttttttgtattttatgatgattttttttaaaaaggacttaaattctaagagtactaaaaaagacaaatcaaactctaatgaagaaagaaaacaataactaaaatataatataaacaatcacactagacaaaaattaaagtgaaaaaaaaaaagaaataggctttttttcaaaaaaaaaacaaaaacttatactcgtgaaactaaacaagaagatgtcaattattttttcgtatatatatgttttttttttttcaagaaatcatttctgataaggaagatcggataaaaccgcaactttagagcatactttgaattcttagtattttcttttcacaaatatttacacaacataagacaatatttacaaaaaaagttactaacctcttgattcactaagctttcaaaaattacctctccaacaacggtgccaaaatttgtctaacagtggttgtagtttttacgaaaaagtttttacaaatgttgaatgtttttaatattttcatgaaatggtgccctattatagaatgttttttatattattattttttaaaaaatttaatattattttgacatacataaaaatttatttattttttaaattaaggaaaaaaattaattttaaaaaactaatataacattttacacagtactaataaaatatattaacaaattctaaattaagttaattgggcaacattatattgattag

SEQ ID NO: 11263 - DNA, 853 bp, Cannabis sativa
tagaaggaaaccaaagggggattaaaatttttagcatagttcagcacccattccagcaagaaaaccaatcctagtgatatccaattcttaacgtaagcttcttaccatgttgctcttttttttttaaggtttagactaggttttcgatagcgttttaggtttgtaggggctgtgaagttaaattaaggttagggtaagtttttaggattatttttatgcttgttttagtttgaatagagtagaagtaggtgctctttagtttgacttgaattaagtgatgcctaaaatttagttttcttcacttgaatatgtgatttttattcaatgatggaattgttgtgttttggagcttggaatatattgtattcatgatatagaactgttctgtgaagtttagaaacaattggttaggttgggaacaagttctgagactttgaagatctgaaatttttgagcttttgctaaagtgaaccagaattccggatggtacagggctgcaccaaccagaattatggacggtcaattttcaagaatcgctgattttcgtattttagccataactttttactcgagtgtctgttttagacattctatatatcagtttgaagcttatgaagagctctaaatatgagacataatttagagcaaaaaaatatattttattttagggtgtttttaccataagattcggtagaaaaccctaagttattttatgcggcttttggacagtgttttggaatagacccttattgatttacctttattgtgacataggacccgagatcatcgagtgtcgttccactcaggtcagctgcacacttcacattggacttgaggtaagaaaagtgttatg

SEQ ID NO: 11264 - DNA, 578 bp, Cannabis sativa
aaaaaaaaaaaaaaagaattcatgaattatttaattagtggctgtccaaaaatttaattaaacacaccatgttatatatacgatacaatactataagtaatatgcatatttacttatattaaaattattattacataattattagtttaaataataataataaaaattaaacctaatacaatttaattatatttttcaaacatataaaatttaatttacttttaaatttatttataataaaatatatctaactaattttattaaacaataaatattttaaacaaactaattaataacgtgtaatgcataaaaaagttaattaataacgtgtaatacataaaaaaaattaatgctaatttaaattaaaattaatatataaaaaaaattagagtctttgtaatttttacacttctaaatatatatatttttttatatttttactgaattttatataaaaatctttttaattttgttgtaaaaataaaaaaatcgttaaactgtacaaatatatggatagagaaagagagagatcagtttggtccatatatatattaattaaactgtttttcagcacaata

SEQ ID NO: 11265 - DNA, 519 bp, Cannabis sativa
aaaactaaaaaatcaacagaatttttaactaagaaaagagagagaaggagagatgtacaaacttggtgtgtgtgtttaatcatcataagtctcatgtgagatttttattgtgtaatgaagccattgcttcctagtgtgtttaatatgtatagtctactcttgtagtttagttcttttgatcaataaagtgaaaccaattctctcaagtttgtgttcaatttagagtaattcaatttaagttcttatgctttcattgtcaatccattttactgatttagtttaatgtcactctcttagaataatgagtttccttatttgtgcgttcttgattggggtgatttcgaatcacaataattagtgtcagagccacgataaatgaactccgagaattcaagaactcaatcaaagaatgtcattggcaaagttcgaggtggacaagttttcgggaactaatgattttaatctatggagaatcaaaatcaaagtttttctggttcatcatgaaataacatagcaatc

SEQ ID NO: 11266 - DNA, 545 bp, Cannabis sativa
acggatttttacttttagcatcgtgtgatttgtacgctttatttgctgcttgctgccttacgcttttcgtggttcgcgtattctcatattgattgcctttcataaaatgtcttagttatgtatgccttttgtgaaaggtcttaagtatcacagactttgcctttcgtaaaaggtcttaatacaattatggttttgcctttcgtgaaaggtcttttagaacatctgctctttgccttccatggaaggtttttgatcgtttatagttttgcctttcgtgaaaggtcttaggataattatggttttgcctttcgtaaaaaggtctttagaacctctgatcatgccttccatggaaggtctttgaacgattatagttttacctttcgtgaaaggttttagtactgcctttcgtaaaaggtcttaattctatttgttcttgacttaagttttttttcattctgctttttataactcatccttctttcattatttaaaggagaaagtacggctacagctacagtgatgtttggagtttctagctcataatt

SEQ ID NO: 11267 - DNA, 616 bp, Cannabis sativa
ttgtgtattagtttgtatttttcctaattaattttatttctttgatgcttgttgctgtcatactgttatgccattaatttagataaaaattgttttccattgatatgtatgactatcacatatctaagatatggttgtgatatatgagcttgcttgtcaaatggttatttattctgtaggaacgagctgtgtgataactaatgttgttattggcatttattagatttaataacccttttgtttttaagaacttcacattcttgtcattgattattaatgtttgatttgtttacttcactttagagttttacaaccaagagatagtttcaattgaatgtttcaaatttgacaacatcaaacaacccaaaatatttcctctattaatcgaaagtacaaaaagggactttttgctgcaatgatgcatttactatcaaaacttcctctccttgttgatcatgtttttactacgatgcacatgtggcagacagcttgaaggatgtagagctgaagtttcccttaatctacttggtggattgcacacaaaatgattgtagtttgatactaagatcattaaatcaggtgagtcttttggaatgcttgaatatttattgcctta

SEQ ID NO: 11268 - DNA, 1055 bp, Cannabis sativa
tggtgagctgcacgcgcgcgtggaaagtgagggggacagggcgcctgacgccggtaccagcgaacgaatcccagcttgccatgtggtgagcatgtctgctggtagagggaattgggctcttcttgggccgattttgggcctttcttccttggacttttggcttctaaaaatgccattttcatgtattttgggcttcacttttatcatctttttttttttatttcttttccactcttttcacaaatgctattttcttcttcaaacacaaacaaaattaaatccaaacaaaatattttcaacacaaaatatattacaataattttaataaaaatacttatttaaaatctaattaatttgtatttcttcaaatgaaaacattgtattttcttaactttttatttctccttttgctattatgccataaataccaattattatttataaacaaagataaaattaatcttaattaaaatattttcaatataataatatattgcattaatttcttgaaaatattataaaaaattaattttattttgtatttttacactataaaatatgtaatattttggcatttaacacatttgttaaccccaaacgacataactaggaactcataatggccatacgtagttcagaaagttgtcttcggaatgtcttctcctcggattctcaattgatgatagccaaatctcaaatcaatcttggagaatctgaagttgatcaaacagattgtcaattctaggcaaagggtacttgtttttaatagttaacttgttcagctcccggtagtcaatacacatacctagagtcccatctttcttctttacaaataatactggagctctcagggcgacacaataggttgggtgaaccctagatccaacatcccttgaagttgtatctttagttcttttagttccattggggccatacactatagggtgcctttgaaacatgttctgccccaggtaccaagtcaattatgaaatctatctctcgctgtggtggtaaacctagtaattccctaagaaacacatctaggaattccttaa

SEQ ID NO: 11269 - DNA, 611 bp, Cannabis sativa
cactactacaaaattaatttctagcaacacttttatttatctaaaagaaattaaaagacaacacttataaaagtgttgtctcctagactgttgctaaaaagttagtatataagatgacacttatataagtgttgccttatgatgataattaatgttttaaaaataatatattgtaacactacttttaaaagtgttgctaaatgttttttatgtatataataattggcaacacttttattaagaatgttaccatacttaactttttaaaagtcatgtatagcaacacttttattataagtgttgctttattaatttttctagttagacttctagcaacacttatatgactagtgttgttatatgagtattttctttttataaacaaataccataataaataattaattaaaagccacaaaatcagaagaaacaaaaaaaaatgtaggctgcattaaaagtttacaaattcaagagtaatactaattagtacaaataaaaattccaaatctctttgaagaaaatcaattacaacaatatagctcaaaatgtgcatatataaatttaaaatattgatttagcatcttttctctaaattttaaagttgtttaaat

SEQ ID NO: 11270 - DNA, 883 bp, Cannabis sativa
caatgtagttactggttccgggaacataatcgttaatctagtcatatttagagtttcagtactccttctcatatcaaaatcacgatatcgcattagtggtgcagatatacaaactcaatagtgacacaatcactacagtgtagttagtggatccgggaaacatagtgcctaatctagtgatatttagagtcgcagttttccttctcatatcgaaatcatgatatcgcattagtggtgcagatatacaaactcgatagtgatacaatcactacagtgtagttagtggttccagaaaacatagtggctaatatagtgatatttagagtctcaatactccttctcatatcaaaatcactgatcggtagtggtgcaaatatacaaactcaaaagtgagacaatcactatgtagttagtagcttctagaaacattgtcgctaatctagtgatatttagagtctcagtactccttctcatattgaaatcacgatatcgcattatggtgcagatatacaaactcaatagtgacacaatcactactgtgtagttagtggctctgggaaacaaagtgcctaatctagtgatatttagagtctcagtactccttctcatatcgaaatcacaatatcacattagtggtgcagatatacaaactcgatagtcacagaatcactacagtgttcatgaagcataatgcctaatctagtgatatttaaagtctcagtactccttctcatatcgaaattactatttggtagtggtgcagatatacaaactcgaaagtgacacaatcactacagtgtagttagtggctccgggaaacatagtgcctaatctagtgatatttagacaaactcgaaattgacacaatcactacagtgtagtt

SEQ ID NO: 11271 - DNA, 846 bp, Cannabis sativa
taacttaaatacttaaatacttaatgttttttttcaaaaatctgtgtaagtttcatactatatattgtgttaagttttcattgttgttttacgattattttttaattgttctacagttgtttttaattataaattttgacccaaaatctaatatttttgtaaaaataccaataacaatgctctgtgcatatatagtatttaaggaatctatggcgtggccttgtccacgtaatattatttacgtaggagaaatataataaggttatatgctaaccttacctaaccacttgagggtagctcaaatggccacaggagggtgcatgtgtgttggaggtcctgggttcgagtcccaggttatgtattgtttaatatataaatgtttgaatcaaaaaaatatatatatatgctaaccttacctaattttattttattctttattttaattatttatttattttttgataatagtattagaagaataattggttggtaggaaaatattaatattgataagaagtgtgattataattacaacatcatccttataaattattgaaaaagttcgaatagtctatagtgtcaaaaataagtttaaagttttttgaacatgagtgataaattgaaatataagaaactcgatactgtaaaccattcaaaaaaattcaaaaatttacaaaataatattgtaactataatgaatatcgctataaaaaaaatattttgacaacgcataaattaactaaaagattgtaataaccacttctcaacccactaaattaaataaatatatatatatatagttatttcctaaaaaatcattgttatcaaccaatacatagtcgtttt

SEQ ID NO: 11272 - DNA, 500 bp, Cannabis sativa
taatcacctcatacatgcttcccacgtgtatatactcttagcataaatctttagattttgaatcaccttccaccactatctcggatatacatccatgtcacgtaactattgctatatattagctcaacaataatattccctcctattttctgcaatccaagcttttaaattttgaaattttaatgtatgctccacgtgtctaactattggttggaataagtccaactaatcccatacatttctcaaggcatatattgacgtggtagcttgataccatatactattactacgctgttatgtatatcataatataccatgaacacatactatcacctatatattatgtttacatttctaattatatataggtttatgtaacttaatccatatttaagtgccacttacatgtatgcccaactaattaatagtgtactagaactcaattaaatattgttccataatcatttatgaaatataccgctattctattttcaccacca

SEQ ID NO: 11273 - DNA, 828 bp, Cannabis sativa
cttattctgaattcctcctcataattatttcaaaacctagtatttgtagtaaatttgtctgtctattctgattacattattagtttaatttccttgttgtacattgatcgattgatttcaaaatggtgatattgatttttttttctatacatacatgtgatgtggaatcatccatcgtttttttctttaatttaattgattaatttattcctacattggaaaagaaaatattaatctagcccatccttctcatgattctgatgtgatgattacaataatactttcactcttattttccattttatatcattcttaatttgtatatctttctatattcttagttgttttttctgacttgatttgttaattaattcatggacagatggtagagatgaataataataattataaatatgaatttattgaggaaatggatccttattatgatggtaaaacattcctaccatcagattccgatgatgattctgaagatgaagctggttggttaacggttataaatcaacttaaacttatactgatgtatgtattaattaattacaatctcatatatatatatatattaatctttatttgttatgtatacaatgtactaacttgctaagtaatatttcttatgaatatttatagggttttcaggttgatcatctccctaatagcaaagcaatctggagttggttggttgttgagtctttttataagacttatgataagcatacaattgaagcagctcatgcagccgttactgaatttaacaaactcaaggttatctttgttacttagttagtttgtttaataattttataatca

SEQ ID NO: 11274 - DNA, 664 bp, Cannabis sativa
caaggtcaggttcgaggtcaggatctagggtctgggccaggtctaagtcaaggccaagggttggggtcagggtcggagtcgggttccaaggtcggggcctggggtttgaggccgggactggggtctgagtttgggctagctcaaggtgttgggattttatgccctaaataaaacttaattttattgtaatcttatttgctttcaataaagattagaaatcatatcttgaccttgtcatatgctttgttcacaattactgtgatgtcatcacaatagaaagtaattgtgattatatgcttcaaataatttagccccacaatttatcagtgtattgaatttacactgacgtgataatcaacgataaggtttaattacacttagatgagtggaatgtcttttccaaggtattagtaaagtaaactaggattggatgtattggctatacatcatactggaccgatattgacagtggaaaaggtatcataaacttactgctatatcttttctaagtcaatatcacttagttgatcatagatcatttgatctcaatcttgagatggttaagctctagcttaaatatattgcatgagttctttgacttgttcattatcagcttaccgtagaaccaactcagtacttgcatcttgggaactcggtagtgcaa

SEQ ID NO: 11275 - DNA, 653 bp, Cannabis sativa
tatatataattgttttgtaatttgccttttaaaataaatgagcattattagtagacactttaagatctccaatgctatgtatattgtaaataattaatggtttcttatgttatatatttgttaaattataatgtatagaacgtaatattaaagtatatatcaacaacagtacatatatataatacctgttatagtacttggcaccatatataatattaaattaagctttattttatcaatacacaaaataactgggaacgtacagatgtttaccacccataaataaactaaataattcatcttcaaaaaatctattaatgttaaaaaaaaaattgattacattattagtatttagagtatacgaggccagaaagaaaaaaaaaataaaatccaaatatattatgtatggttaatggaaataagatgatcagtcattactttcggaatcttctttacacattcattagtactgtgatagttagaattgagaaaaagacataaattatttccacatatatatataaaatttatattgtacatgtaatactacaccaataaaagcattaatattgaattaaatatatttatcgataaatattaatatatatataatattatatatgatttatggccacggtattgtcctgatcatt

SEQ ID NO: 11276 - DNA, 527 bp, Cannabis sativa
tttcacttaacacaggcagtttctcgaagagctaccttacatgaaatgattcgagactatagccaggcagccactgacctccagagactcatctccattctcgaaagccaatcttgcaacaagaccaatgagcatggctcgtcaggtagatccacaggcaatacaaaagatttaaggcaagctcaaatgcatctacaaataatggaggaagaatctaagaacggaatctccttggacttctatctcattttgtaagcttttattctgccgaagccttcattagttagaatcatatgattacctaaattatatgctgtataatttgaactgatatcataattataaatgcaggggtagtaaacaaaccgatgcaagtgcggacattaagaaagcataccgtaaagcagctctgaaacaccaccctgacaaggtttcagcttctgttcccttttatttttaatttaattagtcttttgcttaagttactgtttgatcatttttctcttggcgggtttcaggctggccag

SEQ ID NO: 11277 - DNA, 657 bp, Cannabis sativa
aaagttaagtagtcttacacttcataagaaaaatgccaagatataaataatgtacgtaggctatatataaatatctatatatgtatataatattcttaaatcatactattaattcgtagctttgcaaaagttcaatgtctctagttcttatttattttcttctaatataaatttaatagtagcgattcctgctaggcatgtgagtttgaattttaacacaataacctacaaattctatgcttgtgatcaatgtgaataagacacttatgcaatatttactcatattggcatgtgatgtttttttatttagtttttagtttttatcatagtgaatgtgaatttgatatcaattaaatgtcaacctaaaaaaattgaaatcatcatatttaactttgaagaaagaaaattaaattcagcccaaaaagtgacacggtattgtttctttctcttctatggcaaagaagaaaaagcctctttcgaagcctgcttctacgagtaaagagttgccttcaaactagaaaatccttgtcgacctaccagaacatgaatttgatctcacctctgaatctattgatgcacaagatgtgatggatggagagtttccattattgggtgagaactcgattccctctgcggagccagaataagatagtaggg

SEQ ID NO: 11278 - DNA, 1630 bp, Cannabis sativa
ctaaaatatttacagctgacacattacatgcatttctattaattaagaaatttttttaatattatacttaaaattaattttatttataaaaatagattttaagaaaattatttacataaatatcaatgtaccacgtcagtataaataccaaaaactaaaatatttaccgaaaatgaaaaaaatgtgaaaatctcgtttttagaaatttcagtgttttgcaatttttttttttttaaaagcaaccttttaattgcttttattgcaaataatataacaattagttactttttattaaaaaaaaaattgattcaagataatttttaggcaaatagaaattcttttatattttattaagaaatatgtaaccaaatttaaaaagtgaaaatcaaaaaaaggaaaaaaaaaaagtatttttagcaacttattttcgacatgtgaaaagtatatgtttttttaccatcaatatatagaaaatagaaagtaactttttaatttcttgggattttttagttttacacttcaaaacggtttttcttgtacttttatggaattccacaaactcctatagcaacaaacggaacaacttaaatcgcaacccaaatccatatagcaacccacatagaaaccacaggagcaacccaaatcgtaaatttgaaaagaaaaaaagttaaaaaatagtatataggataattctcctagtttcttttatactttattttttttaaagctaggtaaatggaaattcttttatacttcattaagagatatgtaacaaaattttaaaaaataaaaattttaaaaaaaccattgagcaatactacatatataaaaatgttactgttaagtctattatgaaaattagtataatagtatttatttattattttgaaatgtgatttattttataatgtttaagatactatttacactataaaactatcacttttactggtacagttctctactgtactggtaaaagtaacttttactagcacgtttcacaacctacgctggcaaaaaggtcaaaattttaccatcgtgcatttgcaatgtctaaaatctaacttttactagcacgcgctatgaaaagtcattttcgccagcgctttttattttgtgctgtcaaaagttttaatagcaacgttgatttgccaacatatcagaagtaaattctattttaccaacgcaataccaaacttatgccagtacaaaaatgtgctggtaaaagtgacacttcttgtagtgttaatacgtttataaattattttaaaaatttattgaaattgatctataacacaagcttaagaaaaatacattttaattatttttaaatatgaaattataaaataatttttatactaactcatcgaattgatttctttattaggttttgctaaaatttaaagtttaataattttttaattattttttttctttttaacatatatggttaattaaatagaaaagaaactaaaatgttacctcctactatggtgtgtgtgtacaaactgcctccccacttgctttcaactatcattaaaaaaagtccctctagatgtcacttgtttgatctgtcattgcgtgcttgaaaccatactgcacattctcgttgaatgtcctttttcctaca

SEQ ID NO: 11279 - DNA, 836 bp, Cannabis sativa
atatgctttgtcctttcatggaaaattgggtttgctgcaatgtattgtgctgacttgttgtcacaatacaacaattctggttcattgtgatcaaccttgagtttctttaggatagataagagccacacgatttcacaggttgtgtttgccattgttttgtactcagcttctgctgatgaccttgaaactgtgtgttgtttcgtacttctccatgatatgattgaattccttatgaaaatacaaaaccctgttattgatctccttgtgtctgggcaagcaacccaatttgaatctgtataagctctcagcttgacttcagattcagcaggaaaataaattccttgaccaggggttcctttcacaattgtagaactctaattgctgcattcatatgagtagcacgaggcacaacaaggaattggctcagtttatttactgagtaagaaatgtttggccttattatggtcaaatactgaagttttcccacgattcttctatatagagttggatatgccaacttttctttttcatcctatcaaagcttgagattggcttccataagtgtgttaataggcttacatccaaggtgttctaggtcttcaaggagttgtaaggcatatggtttttgtgatacaaatatgcctttttctgatctacctacttccagccccaagaagtacttcaggtttcccaaatctttcagtctgaatcgagcatttaacctgatcttcaatgcctccaactcttgtaggtcattgctgacaagaattacatcaacaacatagaccaacaaaaagatgaagtgattgtagtaatgctttatgaacaatgagtga

SEQ ID NO: 11280 - DNA, 1113 bp, Cannabis sativa
aagcttacaaaccgaaacaaagcagctttttaaacagaaaagtacacaaaccacaaacaattaactctccctaaaaacaagggtctagatttgtaacatataatcaaaaaaaataatactactccccctttttgtctatcaaggagccaaagataacaaaaacatgaactaagtcataatagtttaagcatacataaagcaaaaataagagaaaaagaaagtggacaatttatttatcatcattggatttgaagtatttcatgatgttgtccatcttcctgagaacttgtctccattcttcccaaacgcaagttgaattcagacatttctataggagcagaagtggaagcagatgcagcaccagagccacgaaagggcctcttggatggttgagcattttttgtttttgccatttttctttgaaaccctagaaaaacaaacacactctcacacttgaaaaagattagacttttgagaaaaaagagagaggaatgaatggtggtgatcatgggtaattaggaagttgaacatatatagcatttcaaatttaataacccaataatcagaaaaaataaaaaaaggaaagtagcttccataccttagacaccacgtgggaagagaaaaaaagaaaccaaaaagatttttcaaaaattggtcaaggttaccttaaatggagaaaaggaaacaacatatccccacaaaatctaagaattaaagactcaaccaaatccaaaattgacaccaaaaaaggaaaccacaaaataattaattaattaattaagaacaagtttcctaaaacacaaaagaaataagaccaaaactccaaaaaataaaggaaacataatagataaaatgcaatgaaagcatgtttccataaaaaaaataaaagaaaattatgcccccctttttctttaattttgtcaaaatattctccccaaattaatctgcaaagaacgatcaagacagacaacattaaatgacacaaaaagaaagtaccaatcaacacttaagagcaaaaatagtgtctaagaaaataatgaaacataacaagaatttttaagaaagctcaattgacaaatcagtcacagaatttatttatatttttattatttt

SEQ ID NO: 11281 - DNA, 635 bp, Cannabis sativa
tggactaataggcccatcaggtatatcactaataacaaaacaaaaagccatatcactaatattcaacctaaaaggaacaaaagaaaaataatatgaaaaactagaaatgcatttaaattgaaatgtatcatagctgataattgaaataatacgccttctatataacaacacaaccaaaactcaacaagctaaaatgaaggagcggttgtagtattctgtcccaatatctacttattgtaaagttatggatcatattgttatggaaactgtgtaaagttatggatcatatggttgcaaatcccaaatgcatgtatgaattagattttatagcttttgacttttcgatttgctctacttggaagttttagttttgtgtaaaatttaatgcacgtgtttttctatttaattttttctctaattgctatgaaagtattttttgtttgtcccactttgaggcctaaactctaaattcccattatatgcatgtatttccttagtatatgatgtttgtcaccaatttcgcaatacgatctcatttattgcatgatttgttaattattacttttccaaataatagttgcttatgattgatgctataagcaaataatcaaaagatatttaatgattgtcattga

SEQ ID NO: 11282 - DNA, 813 bp, Cannabis sativa
aaatagtaccttatataattatcatcttttttataactttatgcattatcagaagaatttttttttctttatttatcactttttattcttaaaaagttaatgatataggatcacttatctataaatttgttaaaaaaatataattatgccacatttttagtaatagttataatctctataattttaagggtgtttttttttttataatattattatcttgttaaattagtttattagtttaatttttatttgacaaaaattatatattttcacatatattttacaaattttattattggcaattattctattatttgttgttattattttttattattgtatttttcttatatgtatatgcattattctacataactaccatcatgttcatataattggtttagcaaaataaagtacatgaataatcattcacaatgtgttattttatgtttctttaaacaatcaaaataatatttcttattacactaaaatataaagtaaattagtactagtgtatgttagaaaaattaataataaactcaagatacaagtttgcacataataataatatagaacacaataataataaataataattaagcttgcgtacgtaattgatccatagtgcaatactattaactaagtcttcctccctaaatctctaaataagaagtagttttattcatttgattattaaaagagtatacaattatgatgagacaatatgtatttatagagttagggagcggacttagctacataactctagctggactaagcttgctcattaaaagcttcagttaactagaaaaa

SEQ ID NO: 11283 - DNA, 1080 bp, Cannabis sativa
tcctattgctagtgagcatgagataagtcctccaaattgactcaagggttaaaggtagcgctgaatatcaggcgggtttgtcgaattttaagttcgcaggtttcgaattcaaaacaatgtacccgaatccggtttgtgaagtagatttttgaactcggacccagcccgtgaaatggtcaggttggccagcgggttgcgggttcatcggattaacaggttgactaggtcaacttttctttttttttagaagaaaaaaaactcaaattctatatggttttttttatatattaaattaaacatataagtgataaacttatactaccataatctatattcgttagattaaaaaaaatattaattttaaaaatataagttataaacttataacactgtaagctatagttatattttaagaagaataattagcaattttttctcttgaacttttgacaatattgattttagctccttaaatataaggcttgttaagaatccccttgaacttttatatttaaagaaatttagtccttttattaggtttcatctcattattctgtttaaatgctgatgtgtgtttttatcaattaacaactttgccccctaaactttgacaattatcaaatcatgccccctcaatataaaaatgagaaagattcaatatttttttagtaaataattttatatttttattgaatttttaattttttttttctttatttgttaaggtatgagtttataaatataaataattttgattttttctttaaaaaatcttagttcatttaaattatttattagattctcaataattttggtgtaattttttaatatacatgttgctaaataaaataaagtttgaaaatattcttttaagtaaagttaatatttttatccaattttttaataatttaaaatattttttttttgctgaagtatacatcaatggcgacaaaatatatcaatgacgacaaagttgtcattgagatatatactaatgacgaaattttcgtcagttttttttttttttgaaaaagagccattaaaatgggcgggaattttccctctaaaacattcactggc

SEQ ID NO: 11284 - DNA, 596 bp, Cannabis sativa
ttaattcccataattaatatatattaactcttttaataaatatgattaatttatttataataaaaatcttaaattataaataaattatccgtcataattattaaatattatttaaaatcccttttaatttataagtttactgacctcaaatttggccaatcgacagcggactcatatttatgactgatatcaccatgtctacacaataagaaagggacaagaaagggacacaatatgacacaatatttttataaaatttttataaaggttttataaaggttcgacccccttagttagcgggtaatgacttgctccccttttggttctattgatattagagataataccactcatatcacaagtgttgtggattctaaagtagctctcttaagattacaatagtaacaatcaagaggcaaatctcaagttggtgagatggggaagacttagtctcttctatactgttaggggcgtgtagaagagaaagagagctagggtttcaaaacttgagagcgtagagcttgaaatttagaacattagcacttagagcgtagagagtttaggtttatttcagtgctctttatataggagagctt

SEQ ID NO: 11285 - DNA, 689 bp, Cannabis sativa
aactctgggtaagtgtatcgggttccagaaccaccctgacggttaccccaaccctggttcccctagaacctcttattctgaccttagccaccaagtgcagttggtgcctttcttttctgatcagtggtcgagccactaccacccctaccataacaagaggtaggaggagtaggggccccatcaacaacctgagtccatcgagactcctgagtgcacttcattgtgccctcagctctcagtgcctttcccaccatgtcagcataggtggtgttgtcgtcagcagtaataataagatcatgtcttatcttcgaatttaatccacccagatacttttctttattgctgaaattcgttggcacaattctcaaagccaatgttgccaatcgatcaaaatgagttgtgtattcagtaacactcatattctgcttctagataagctgagtaaattccttttgcacttttgaccgcttcattatagtactttgcgttgaacaattcctagaacttttcccaggtcatagtggttacatcacaagccagggacaccatgtcccacaagactagagcattttcttgaaactgaaatgtggcacaagccactctatcatttccagtgacgcccatgaaattttgaattcttgtaataagcgtcagcaactgctcagcttttattacatcaggacctccca

SEQ ID NO: 11286 - DNA, 797 bp, Cannabis sativa
accaaccacccaacaaccatcgtcgtattatgtaagtgatagtgtaagaggtattttagtaattaaaagcacataaaaggtataaatattgttcacaccttatggatgtatttttgtaaataaagtgtcaatttatatttttcatgtaataattccttaattaaattgaaattaatcacctaaactaaagttagtgtatatagattattgtgagccaactttttagtacatctcaaaattacctctctcatttaaaaaaaaaacccttaaaagaaaagaaatgctctttctattctctcttctctcttgttcgttcgcaccctctccctcgttctcacccaaccgaccaccacagactgcccaaaaatttcaccaatcgcaccaccgcaccaccaagccaagctgaaatctcaccaatgactgaatcacatgaaggcttaccgcgacccacttttgagactcatgactataagtgacaaagacctagccttacacaagtaaataaagatccaaagtcccacaagggagattcgtgaaggagaaacccaatagcagaccagagattatttaaaggtggaaatcaaaggtcttccaaaaaatgtcttaggtatgaattttttaggtaattttttcatatgttagatttgttgaaaatattattggggctgtcgtatgttagattcagttttcttgagcacaaaaaaaattgaatgtgataatggtgatgaattgtgtgtttttgtgatttttttttttttttttgtgtttcatatgggtacgatgatgtccgatatagg

SEQ ID NO: 11287 - DNA, 998 bp, Cannabis sativa
agcacgagcatgactaggcgtgactggacacaacacgacatgatactacaaattagcacgacacgacacgacatgaaaaatatatccttaaacacaacacgatatgagaagtacgaacggtacaacgcgtaagcataaataaactagcctgaaaagcacgacacgcgacaagaccgaaaagcatgacacaacatattaattataaaaaatataaatttatcaattataaataagttaaaataacaataaatcttaaatataatattaattatcataattcataattctataattaaaacaattaaatcatgaaaaagtaagattatatattaatttattaatagggtatgatatacaaatttgaatatttataagtaaatattcaaatcttataaatattcaaattttaatgatgctaataatttttttatatgattatccgtaaaatattattaattaaaatttatgtaaaaaaaatataactaaagctataaaatatacatatattttagtaattgtaagaaaaaaatataaaaaaataaagcatgaatttaagttcggatataaaaatgagttgtctgtttaagaaatatggaccgacacgagcaaaacacgacacaaattcgagtacgacacgaaaatattaggcttacatgccttacagggcctaccatttaaaaatattgacacgacacggcacaatccataatttttcgtagcacgacacgacctattttttgaaaagcacaaataaatatggttcaggccaacttagcacacacaaacttacaacacttgtctcaacattaatttttaatacatatgtgaaataagctatttaaaattttaattttattgtaaattcttcatttttttatagaaagtttactataattataataaacataaaaaggaaaaaaaaaaaacacctacttatattaaattacactaataataatattacaactcattattaaatactttttaatatatatcta

SEQ ID NO: 11288 - DNA, 745 bp, Cannabis sativa
agtcttctaggtcgcttttgctctctaatttcgttctctcttattgcttccaaaaaatgttgaaaaatacccctttatatagcttaaaaaaaagagagaaaaaacctaatttctaatttttgttgtttgacatcttattatagtactaatatgatttaattcttaccccaattttctatgtgcatctattttattcgttcttaattttctttaattgtcattttgatacaaaatctgagaaatgagtattgattatgctatagtgaaatagggacaaatttcgatataggacgagagtacctatgtagtttggatagcatttagggtttctttacttaatgtctcttatctgtttaaatatatcacgagagtaaaaaatttgcatataaggtgagacttatatatcctagtccaaatataagttactacagtaagtccgttattgcatagaaattggtatttaagaattaagttatattacgccatataagataggttcaattgaagttaataaccctaaactttaatcattgttaattttcatcctaaattaggtttttattttcactagattataatatttttcctttaatttttattaccaaatagaattaagaaattaatttattagtacttaactacaattttcgagagaacgatactctacttaacattatattacttgaaatcgattgcatacacttgcaaaaatccataacaatatccatccgaggcttctgagcaa

SEQ ID NO: 11289 - DNA, 1286 bp, Cannabis sativa
agagcagaaaaccacgaactgaagtctgcaacaccagcaccagcagacacgctggaaacgcaccagcaagactttgcaaaacggcattcgattagcacatggttaatggtttcgaacgccgaattacaaaatgggcagtataaatcaacatttacatttttagttccaagttgaaccttagtagggagacaacccacaagaactctccaaagaaaatgttgaaccttcggggggatgtccagctgccacaaaaacttaaatagcagttgatcatgagcagcagcagctacacgagaagcctgctgcagcaaccaatatgcacttttcacagtgtaaaaaccactattttcttcactccaatgccacttatcagtagtggcatgatcactcaactggatggacaaaatcaagttcttatccctctcggtaaacaagtcagtaagaacatcactatcccagcttttagaatattcagagaacaagcttgagacattgtgatttaacaaacctggatgatcagacacaacatagggattagatggatcgggaagccaagggtctaagagtatgcttacagtagaaccattcccaatcgacttccttgcaccagctcgaaccagtccttgagcttccaaaatgctcttccaaataaagcttgggttttgtcccaaagtagcagtaagaaaactacccgagggataataccgagctttataaatcttgcttactaaagagtcttcattagtcaaaagccgccacccttgtttaccaaggaaggcaagattatagtcccgaagatctctaaaccccataccaccatcgttcttatgtctactcaaccttttccaactcatccagctcactcctttagtccccgcttgtgactgggacttccaccaaaactttgccatcaacccttcaaggttagagcaaatctccttcgttaacaagaacacactcatggcgtaacaaggcaatgcctgagctacagatttcagtaaaacttccttgcctgctttcgatagaaaccgactctcccaagtgaaaatcttcttcttcatcttctcttgtaaaaagccaagaatagctttcttatttcgacccagaatacatggtaagccaagatagaaactatcatccccagcctcaaccattcccatgaactgacacaagctagatcgagtttcaatagaacaattcttactaaaaaagactgaagacttagagtaattcacctgttggcccgacgcttgctcataaattcgaagaaggtgcatcacatgtgt

SEQ ID NO: 11290 - DNA, 1312 bp, Cannabis sativa
ccctccactgtctttggtagtaatgagcttcgaaatggatcaagaatacgccccccaattgaaaatgcagactctgatggcacagtggtaacaggaatggccaaaacatcttgagcaatcaaagataataccggatacctattcgattgtcccgtccaccacttcaagatatcaaaacgctgacccacaacaaaatcttcagtatcatcagccaaatatttgtcaatctcatttctatttctttcaccatcatgttgtcgttttttagacataaacttggagacaagtcccccaggtttagttgtatctccttcaacagaaactgataaattagaacttgtagttgaacttgggcccacaccaaagtgcatctcattgtaaaaatcaaacagcttgcgcaaattctcttcaattttcttaatcaactttgactgcaatgatatatcatagaaagtttcataacagtcaaccacaaattgtaacttgtacctaggatcaagaacagtagcaatgattaatgcaccattagctgcctttgactctccccaatatttatcaaattttctcttcatattagcagccatggaggatagcattccatctcttgcctttgacaaagttatcaactcattctgaatttcgcagatctcttgaaaatacaagttagaggtcacataagaagacccactaaatttcaaagtgacttcataaaacgtttttaaaaacttcacaaagatccttgcattttcccaatcatcttattaggtggtccttcctccttattactctttccattatcctcctcagtgaaataatacctataatttttgtcagtctttatcctgtcaaatgccttttggaacttaagagcacactctaacatcaaataagtagagttccatcttgtaggcacatctaaacacaatagccccttacactcaatatcttcagctttgacacattctttaaatgcaaccttgatggtgatgatcttacatatttcacagcatttcttatggcagcaattgactcatttttctcctttagcccatcagttactatcagattgacaatatgtgcacaacatcttaaatgcaagaactctccatccaaaattatagcatgccttttgctcttgaattttctcaaaacatactcaatcgcagtgctatttgtactagcattatcaactgtaattgtgaaaatcttatgaatcccccattgattaagacaactttcaatctcagtccctattgtctcccctttatgatcagtgatttgacaaaagttaatgatccttttttgtaacttc

SEQ ID NO: 11291 - DNA, 639 bp, Cannabis sativa
tttttttttttttgtaataattataaattgtatcaatagaattcttcttattagactttaaaattaaataaagttttttttttttgtaatgtttttgtagactcggaataaatgtgtgatatctccatcagaataattagtcctaataagatttttgctctacaacttttaaaaaacgctacataaaaaaagttgacatgttagagatatatgccaaaaactaatgtgtaaataaaaacaaaaaatcatgaaaagacaaaaaaaaaaaaaaaaaagcataacaaagatatttttgttattaaaaagtcataccgattgtgtaagatataaataattacgcatgttatagttatttaaaattatttttaatttttcaaatttttttgaataatgttaaaaataaagttaattactcgtaaaaaaataatcgtgcttagtgtaataaaatatttgaatatatttttttttgatattgtaattattcaaatttttttaaaattttacaagtaattataaataactataatataaatgattataaatttctttttcattaaaatattcaaaatgctaaaacaaagcatctactaaaataaaattaatattattattagtaaatagtgctataaaaggatgaag

SEQ ID NO: 11292 - DNA, 580 bp, Cannabis sativa
agaactcatacaggcaaaaaaaaattctttaatacattgcctttattattgatttttaaatagttgcataacagttgatttaaagttacatgtcatctcataaatattatcagaaatgtaaagcattagtaacattatatttgacacattaatgtgaagttccaaaaattttcttattagattgactaaaatattgaatcttcaacagttgcccaacagttgattgatagttgcgtaacatgtgttatacataacacattaatgcaaaagattcaagtaacactactacaaaataagcttttagaggcaattttttttagcaaattaataaaattttaataagaatacctacggagtcagttattttgtaataatcgactccgtaggtgataatttttttaattttaatgaaataaccctacgggatcagttattttgtaataatcgactcagtatgtgatttttttaattttaattaaaaaacacatatggtgtcaattattttgtaataactgacgccatatgtctttataaaatcctctcctgctaccctttctcctctcaaacccacgaaaccctc

SEQ ID NO: 11293 - DNA, 1003 bp, Cannabis sativa
ctgaataaagcatttccaaaggactgcttttgattccaaggatcgaccagctagtagatgctacagctggacatgaaattctaagcttcatatatgcttatttaggttacaactaaatcaagatgcacccactagatcaagaacacacaagtttcatgacaaacctaggcctatactgccacaaggtcataccctttgggctgaaaaatataagggccacctatcagagacttgtaaacaaaatgttcaaagatctcattgaccacaatatggaggtgtacgtggatgacatgctagtcaagtctaaaaaagttgggggacatgtggagggtctagatgaatgcttcaagatcctccaagagtacaacatgaaactcaaccccctcaaatgttcatttagagtaggctcaagtaaattccttagcttcatagtcaatgccagtagaatagaagcaaacctaagccttttggacatgaagtcacccacaacaatcaaagaagtacaaagcttgacgagacgtactactatactaagcagatttgtgtccaaatccacgaaaaaatgcattcccttctacaacatactcagaggaacaaaaaatttgagtggacaagggagtgtgaaaagcattccaagagctgaagaaacaattggcttaacctcctgtcctatcaaaacctttggacaatgaagagctgggtgtgtacctgactatcacagaacatgttgtgagtgcagtcttgataagagaagaaaatggtatacaatatccagtatactacatcagcaaaagactaattgatggtgaaagtcgatacccactcatggagaagctgacatacaacttactcttacaatcaagaaagctaaggttgtacttccaagctcacccgataagggtgtacactaacaaaccattacgacaggttttgtaaaaacctaaagaatctagttgactactctagtgggccattgagctcgaccaattgagatcacatatca

SEQ ID NO: 11294 - DNA, 585 bp, Cannabis sativa
gttataaattattcacacacattaataacaaaacatattttataggaaatagaaaatttttgtagtaaattctttaaagggttgttctagtagatctcttatttgtttcggtattcataaaaaaaaaattagttttcttttatgatcgtgtaagttgtagctatttaggatcacttataaattttcaaaacattctaaataatttacaatgccgacaataaaatttaaacagatacttactacacgtataaaaaaaaattattgcgtttttaccaaatatgtaaattttatttttgatattgtaaattattcgaatttttttttaaaaaatttacaaactgttctaaataattataacatcataaagaaaaaaatattaaaaaagttttctatataccaaaacaaatagagatctactattgaacatttttatcatagaaaaattaacggtaaaatcttccattgaaatattcaataacacgagtcacgtgattgaggactattcatgtacagtcacgtgactcgggttattagtttcaatcgagatcaatagtattgttcgagaagttaattaggtcaaaaatg

SEQ ID NO: 11295 - DNA, 504 bp, Cannabis sativa
gggacaaaacgcctcaaacagcatcgaatttggtagccgaatgtggaagatatggtcgggtcacgaatcgggtcgcgttgatccgagtttcagacccacggacccgtgtctgcaattttgggtgacagggacgacagaaaaacaacatgtcgtttgcctctgtcaggcaaaacgacatgtcgttcgccctattggttcaaccccagctgagaaaaaatgatgggtcgttttctgactcttttagatgtcgttcggggaaaacgacatgtcatttctctaaaacgacatgtcgtatgcacaacgactcagccccccttcagtgcaaacaacgggtcgcgcatttatgatcctctggcttgtcgttcttccaccaaacagcatgtcgttttggaaaaatgacatgtcgtacgattagtgataaaaaaaaagaggaagaaaatgggcgcatgggggcgcgtgcagaggtgtttttgggccatttttccactattttcatgtttttaa

SEQ ID NO: 11296 - DNA, 872 bp, Cannabis sativa
gattattttttctggttaagaaaataaaaagtggctgcttcatagaaaaaattaaaaaaaatagaatagagagttttatgtatgctgtgtgtatgtatacacattaataggctaatttttttttttggctttaagttaatgcacttggttattttaatgttatttttttttattattaattgaaataaataaataaatatgtttaaaaaaaacacatatataatttaaaaaaaaaaatatatgttagaataggtcataaaagcaatattatgttcataagaatattttagcgagtacaatttatgacatttggctaaactaaaatttgtgcataaatacgagttgcatcgatattatcattaaagagggccttaaaagtagacttaagtttgtatagaaaaagaagttgtgtaagataaaattgttcttaaaaatgtaaaagtggttgtaagtttctattttgaaggaaaatccccttgtggatgtaattgactcagtttgattaatagacaatatctttcttgataaaaaagaataagcaaattaatttaaaaataattatggtagagcaaaaaatatgttagaatgtgtcataaaaacaatattatgttcataagaatattttagcgggtgaaatttatggcatttagctaaactaaaatttgtgcataaataagaaaaagtgcataaataggagttgtatcgatattatcattaaagagggccttaaaagtacacttaattttgtatatgaaaagaagttgcgtaagataaaattgctcttaataatgtaaaagtgttgtaagtttctattttgaaggagaatcctcttgtagatgtaattgatccagtttgattaatagacaatatct

SEQ ID NO: 11297 - DNA, 542 bp, Cannabis sativa
ttagaactacacatttgattattcgatcaaattttgggaccgaccttatattatagtcgaatccaataattatgggaatctgtgtcatattaatatgagaatgtaaataattatttatttatcaaagaaattaaaaagagaacccccccacccaaattaattattttaatttttatatatatacaatatcccacttttatatttaagttatattaatactaactttctctcaaatgcatcatttgttattattgctattaattattttatttattttttatttttaagaagagattcttttttcttgttgagggtttatttttgataaaccccaccaaaatatatagaaaattgaagaaaaaaacaaaaagaaaatggaagaaaaaacatattaattagaaatcttaagcaattaaatgatcattgtccggatatgctcacattaataaaagtaaatatattgaaaaataaataaattaattaaatattaaataaaaaggttcaaatgattgaactgtttgtgtaccaactgattttttttt

SEQ ID NO: 11298 - DNA, 506 bp, Cannabis sativa
agtagaaacaactgacttagtgattctaatagccccccctcaagatggacggtaaatgtcatggacggacatcttggcaatgtgagaagagagtgtagtagaaggcagcgattttgtaaaagcatcggcaagtttgagggaactgttgacagggatgagtcatatggaggaattcttgattttgtcacggatgaagtggcaatcaagttctatgtgtttggtgcattcatggaacgttgggttgttggcgatgtgaatggcagagcggttgtcacagtagataaaagcaggaccattttgttgtatgtggaagtctcgaagtagaaattgaagccatgtaatttcactaccacttgcagcgagagcacgatattcagcttcggcggagcttttggatatagcaggctgcttcttggtgcgccaagagattaggcaatcacctaagaagacacaaaaacccgttgtagagcgtctagttgttaggcaagaggcccagtccgaatctg

SEQ ID NO: 11299 - DNA, 821 bp, Cannabis sativa
tttactaaaagctcagccataccagaaatgcataatttcaatatcttagtatttatttgttttgacaaaatttcattaccaacttttttattttgtttttgttttgccagaaatttagtatattagtaagcttttcatgggtggaattgatatctgtttctaattgtggaaaggaaataaagtaataattatatgaataatagaattccatgttcttagcattagagaaatggtacttccagttccattcactgaaattggtctttgatatttatatttgttcttatcttacagtcattgcctggcgaaaaagagggttcaaatggcaccatccatggctaatgacggaataggtgagtgtatggtaaggtgcatgaggttccatctcaaaaccaattgacgatgggaggggtagctcattcctcttatatattctataatctttccacacattagcgatgtggaactatctaacaacctgatgcactgatcactcacatcctgtattttctccccaatgaagaagtcgttcgaacgtgccttctttcaaagtgttgagtaaaatccacttataaccagtccctttacaattaatatccacatcagcaacatacaacagaaataaacaacttgactcaatcctaggtggcttcgcctctactgtatcaagaaataggagttagttacaaatgttattgtaactaactcctagatctgtgataaactgactcaatacaagtatataaacatcaaatcaaagtaaatacagatagaacacacagatcagagaagagagagagagagagagagagagagagaga

SEQ ID NO: 11300 - DNA, 676 bp, Cannabis sativa
tattattattattattataagaatgggttttttattacacatatttatattttaaagtaattctatatatagtactcgtttaaagagttgtttcaatattcaagtaacgattctttgtaaatttttttaaaaaattaagataatttataatatcgaaaataatatttaaatattttgttgttgtaactgttatacacgtacggtaaattattaaatttttttaaaaaatttacatgtggtacaaaataaatacaacatatgccatcataaaaataaaaattagattataatttttttaaaataaaatgttgtataaatttgttatatattttataatatactatacatagaaataatgaaagctacagggggtggcgccagtgggctcgtaatagtgctcagtgatgttgtcaacacgcatgcagtcctcctctcccatatgtatatatatggtgtggaatataatggaagtgaaaactaatttgaaattatcgtcttgtttacatttgaccatgtatatatatatataaatatatatattatagtagaaaaatttaaaggcaattagtttacaattatcacttggatagacttctcatcaacatggatatatatatatatatagaaatgttaaaggggactagtggtgtttagtatcctcttatgtgttagtatt

SEQ ID NO: 11301 - DNA, 1164 bp, Cannabis sativa
aaatataatatataatacgtgattataaaatgagatgcttacgtaaaatattcatttttataattattttatatttttacgtttaatattaaaaatatttttatagtgttttataaaaataacaagaaaattatataaaaataataaaaataagattaaaataacaaaaaataatatctaaataataaaaaattaacaaattaacaagagtataatataaaaattacgaaaatatttaaaattctgcacaattctatttttatatatatttttttgttatttttgtgtttttatgaaattatccctttttaaaatccttatttatatgaatatgattggttttttttatttatttttaagcatattatagaggatgttactattgtccaatttatcatacaaaaatatcatctatgggccacacaaaaaagtagacattaattcggcttgaaggattaattatcccacttctccaataagtcggtagcatgataaaacattgttctttgttttaatatgaagtgagttgagttaactattaataattagaattaattaaaaaaaatatgtttatcattgttacgattagattattagtcaaaatttaccattctaatcaaatggatcaatcataacttcatctatccactgatgcaactaagggattgtctatggccccatacctcttatctttcttacaaattttaatataaaaactacataattatgtattataatattttaatttttttttactgatttttcactctaggtcggccattagaaataaatatctattctacgtaacagttaatggtttaatacgttaactttaacagaatatctattaattaacaaaatattttttattaattttataatattattatatatatatttttattataatatttttatatatatttaaaaatcaaaattatatagatattttatacaaaggaattttaatttaaatttaaaatacttaaaatattatagatatttttaatcatatttttaaattttttagtttaactttgaattaaaataaaaaaaaaaattgtgtaaattaagaaaatttaaatttaaaatattataaatatttttaggggttttgtcatttttacacttcaaatcaggtttttttttttttacggaatttta

SEQ ID NO: 11302 - DNA, 703 bp, Cannabis sativa
aaatgtaatgtagtggtattcctgatactttacgttgatgatattttatttattaaatacaatgtagaaaggttattaaacataacgaagtggttagccaaacaatatcaaatgaaggatttgggagaagtaagctatgttctcagtataaaaatttatagagatagaaagaggaaaacattagcactttctcaagcaactcatatagatacgatgctagaaagattgtcaatggagaattctaagaaatgacagttaccatcgagagatgaaatttctctatgcaaggatcaacatctaaagactctacaagagatggaggacatgagaaagtatccttatgcattagcagttagaagcttaatgtatgcaatgttgtatacaagacctgacatatactatgatataagaattgttagttgttaccaattgaatctaggtttagaacactagatattgaagcacattctcaagtattctagaggagagttaaatcctaatgtatatattgattttgatttccaatcagacaaagatagtcaaaagtcgacatctgggtcaatattcactcttggtggtagagttgttgtctggagagcactaagcaaattagtattgcagattcaaccatggaagttgattatatagcagcttgcgaagcagctaaggaagcggttcgattaaagaattctgcactaatcta

SEQ ID NO: 11303 - DNA, 726 bp, Cannabis sativa
tatctttactaaagcatatcaacccattaccactagttcttcttaattacattttagaatttataagttaacctagtcaagtcttcttgaattcttaatcaatgaattcaagtttgggagaataaaactagaacacaagtgttatacttattagtaataaagtgaactagttgagagttccatcatggtaggagtcctttcatgatcataccataaatggcttctgagtttgaagtgaacaaactactcccataattaatgaaaagtggtaactggtcttaaaatatattttttattttgaacaatgaataaaaaatttctttaaacaataataagagtaaaatataccaagaaaaaaggatagaaatcctatttaaaatagtttactgtaattgatgcaccgctaattcataactatatgaatataaattaagaacgtctcaagaaaatgagaaagtaaactaacacacttctttagcgatgatcctaattcaatacaaataaaagatctcataaagaacgcagagaaaatttgttagtttcgaaaaaaatgaaaataaaaattgaaagacaagcataagagactaatctaacgctattattatagctatatcttgggcgtccgtgagaaattataaatttagtttacatttttaagttaacaaatattttccttttgaaaaattaatatgtctcaatattttttttttggtacttttttcttct

SEQ ID NO: 11304 - DNA, 536 bp, Cannabis sativa
gggatcctaatttagacacggggcttaaacttaacccatagtagatgtttggatctgggacccatacccagactaaaacctagacccagactcagacctaaacccgaacccagacccagactcagacctaaacctcaacctagacccagactcggacctaaacccgtaccccgtgacccgaaactggattcggaactgtaagcgtaccgggacctgggaacaagaccgagggactaggacccagtctccttccgggaactagaatctgactaggaccaagaccaagacccagaccgggacacggagccaaattaaaactcacatcggaactcaagacaagaacccgaacccagacacggacttgcacccaaacccagacgcacaacccggaccgggattgaagactcagacttggaccaaagtcccagacctagattggggaaccaaacttgaaattagaacaaaaatcgggacccaggagtgggattgggacccaagacccgaccttggtttcaatcctcgacccgaacccggac

SEQ ID NO: 11305 - DNA, 607 bp, Cannabis sativa
gataaactattcacatgagcaatttaaaaatatttaaaatagttatactgttcaaagtgctcaagtttgctcttcattaaatatacaaacgaatataaactactcgcacacatgcaatcaaaagtgtttagaaacaattaattgtacaaggacatttaagttcgctacttactcgaggcttaatttgagaaaaaatgttttgtcaaagttatgtagataaagcttattcatgaacaaaaatacataacatcttcaaaatattcataactcaaataaaaaaaaatcataaaaaaagaggaaatatattgattaaactggtataaaaattataagtgtaattaaagtgaagttggccatctaacaacgcaaaataaaaataattacattcataataagtgcaacaaagggccaaatattgtctagaccaaaagaccattgttcaaaaattattaaaactaagtctccatggtgggagacttaggtggaagatcttattcttcttcctcagggacctcaacctcattagagagagctccttcttcttccttagtttgtttaaaatacgctagcatcgccttggctgcctcacccaaaaagttgagatcca

SEQ ID NO: 11306 - DNA, 569 bp, Cannabis sativa
ctatgatgaacactcctactcaattgtactattgaattctgaagatgtaagtatgggctagtcctacaggcaagctcgtaacgaacaagtcaaaaaatacataaagtacaattaagctaaaacttaaccatctccagtttgatattgacttagaaaagacataacaataagtttataatatcttattaatatcggtcaagttccatgtatagacgatacatcagatacaaagtttactatactaatgtcctagaaaggacattccacttatacaagtgtaagtaaactacatcactcattatcacgtcagtataaatctagtgcactgataaatcgtgggactaaatagtttgaagcatataatcatgattattttccattgtgtagataacactataattatgagtaacaatatattcaagatttattagaatttatatattaaatatttaatcatgaaagtaatcatgtgaaccataaatttaattagggcataaaatcctaacacaaaaatcacaggaagtctaatgacaatttggtaatggaattttatgctaatctagatgcca

SEQ ID NO: 11307 - DNA, 517 bp, Cannabis sativa
caatagtatggttatggcttggatcttgcaatctgtcccaagtgaaattgcagcgagtatcatgttcaaataatcggctcttgctatgtggaataatctccacgatcgattcaatcaaagtaacgaccctcagatttttcatctcaagacctctctaactcgcatcaaacaaggcgccaattctgtcaccacctattttactcagctgcaatcgctatgggacaaactcagcgagtttcaacctttcacaccatgttcttgtggctgtacttgtggtgcgatgcaaaaaattcaagatccctattctcgtgatcaaatcttacagtttcttacgggtctcaatgactcctatgctggtgctcatgatcaaatcttgatgtttgagccacttcctccgctgtccagggttttttccatgatagttcagcaagagcgtcaatgctcccttgctccttcgaatgctatggctgctgccgcttcttcaagccgtcctcctccgtcccaaaacaacagcgac

SEQ ID NO: 11308 - DNA, 1441 bp, Cannabis sativa
gtaatgatatgactcagttgaataagtccattataaccttgataccgaaagtggctaacccttcggctgtgcatgattacctataagtttgtgtaatgttatatacaaacttatctcgaagacgattgtcctcagatttcagaaagtccttccttttgtgatctctgaaacacaatctgcctttctctctaacagactcattacggataatatcttagttgcttttgagcttattcatcacattaggcataagactcaaggcagactaggatattcggcgcttaaattggatatgagtaaggcatttgacagggtggaatggaaatatttagaagcggttatgctaaagatgggttttgcttcatggtgggtgactttgattatgaactgtattaccactagttctttctctttttcactcaatggagatgtggttggtcatgtccaaccttcccgaggattacgtcaaggagatcctttatctccatatctgtttcttatttgttctgagggtctttcacgtatactgcaatttgaagaatcccaaaggaatttgagaggtttgagtataacacgaaatgcaccatcaatttcacatcttctctttgcagatgatagtctattgttttgtcaagcctcggatcaatctgcattagccataaaacaagttctgcacacgtatcatcaagcctcgggacaagttctcaacaatgataagtcggtaatgtctttttctccaaatacatctgtggcaacccaaaacttttttgcacaaacacttcaaatgccaatcacggattgccatgagaagtacttgggattaccttcttattcaggaagggacaagcaggagttgttcagtagtatcaaagaaaaggtttggaaactccttcactcttggaatgaaaaaattttctccattggagggaaagaagtccttcttaaagcagtggtgcaatcaattccaacctatgctatgagttgcttcaagctcactaaaaagttttgcaaccaattggagagtatgatggctaacttttggtggggtactaatcaaaatggtacaaaaatacattggaaacgatggaactcattatgtaagtctaaacatgaaggaggcatgggtttccgttctttcgtccattttaatcaagcgctcttggctaagcaagcttggcggatttttgatatgcccgactctttgttgagccgcttacttaaacatcgatatttttctgccacttcttttttggatgctaacattggtcattctccatcctacacttggcaaagtatatgttggggaagagaattgctcattaagggattgaggtttaaagtgggtaatggttttaatgtggctgctggatttgatccttggatacccggccaaacaaacttcaaaccagtcagtttctgtggcccttccagcatgatggtt

SEQ ID NO: 11309 - DNA, 849 bp, Cannabis sativa
acggaactttaaaagacagtttacaactgtttgaaaaagtcaatttaaataacagtctacaagtgttgggaaaaatcacattaaatgactatttataactgttgggaaaagtattatctaaattaaatttaattacttattaatatatattttgtaaatattaaatatatataatagtactaattttcacaaaaaaataatattaattaaaatatataaaattaatatatttttaaatttaaatatcacaatttattcattcaaaaaaaatatcataattcattaaaactgtaaaaaatcaaagattattacacaaaattaatatgatacaattctggaaaaaaataaaggaagaaaaatgagagggggactagatcaggactatggttatgaatccaacgctgatgttgttcttttggccgccattgctggctctgctgagcatcacagtcaaatgatgagggtgagtggtgctgctagtcgtgacgagaatgattatgagaatgatcaagatgaagacgatgatgaagattggactgataacttctacaatgttgatcttgataatatggaggagaatgctataaacaacaagaatctttactcttagacttacggttttaagtctttgcttgaggaaatgtcatatgggtctgctgtggctaacgagattaataataataatggtagtggtagtgtgcatttacgggtgaggaatgagatcaagagcattatgccatggacctggtgaggctgtgaagaaggagatggatctgatggagatgatctaccagtacaacaacaaattcggccactgccaccgcgcaagagaaaaaggagagagagaga

SEQ ID NO: 11310 - DNA, 532 bp, Cannabis sativa
gttatagttatagtattattcttaaatttttttgaaaaatttcaaatagtttatattattgaaaatagagttcgtgatatttaagtttatcactcgtgtttgaaaaattttaaatgtatttttggtactgtaaactatttgaatttttttcaaaaatttacaagaataatattgtaagtttaatgaactttgttatgaaaaaattattttgtcatgtgttttcaggcatggaagttgattaagaaattataataggaggttgacagtagcactcatatcgcttattgtctctttaggggcatgtgttatcaaaaatttcgacaataaaactatgagaatatttgtaatgaataccatgtatgagctcaactaagatcaattaggagaacaatacatcttttagggtttttaaattcatacacgataaggatacttaatcaaagaaaggtattgaaaccaaatctaataactcggaatccgattctggccattaaagaatccactcgagtagaaatcacaacactaccatgca

SEQ ID NO: 11311 - DNA, 543 bp, Cannabis sativa
gtctattccattagcgaggcaagcggcaaaagatgggtggtgatgggtggtgctggctacttgttggcatggttgcttcaggttgaggagggtgttgcaaactcatccaggttaatttgatggtggaatggagtatggaatcttgctatgccaccaaaggtgaaagtttttgtttggcattaccagtagcaactcaacttatctcccagaaagttcaggtaccttattgttgttcacgatgcagagaagaatctgaaactcctaagcatgctattttttcctactctaatttgatttctgtgtggcatcggttgagggtgtgattggtgctctgtcgatgtgtacatagaccaatgcaagaaattttcctatttatctttgataggctatctcgtgaagcttttgaattgatgatgacaactctttggtggctttggtatgatcgaaactcagtattgtttggcaataagcagacgagattagatgttattctagatttagcccatagtaacatgtcagagtttaaggagtatggttggcggg

SEQ ID NO: 11312 - DNA, 553 bp, Cannabis sativa
ttatcttttttgtcaagtgctatgttcttgaatgataacatatgcagctagctttctttcaagccatatacttttgttgagatatgacaggatgaatattttagaatttgagttctatgttgaattataatgttagtatggaaaaacatataactacaggatgatgcaaattagaatgtaattgttatttattttgttggtaactttaggattgtatatatataattatcattatttcttgcttataagaaacaatctcataaaccaccaattagatccactcatgctagaagaaattgtaagtgatgagaagatttggaggttaccttaattgtggggaataaataataatatgatattattcataatattttgtttttgtttagagttaatttctatttctatttagcttattttgggtaagttagtgtattttaaaaaaaaaaaagggaaagagaaggtagtgttttttatgaattttaataaaacactttcttttagtgcctatttgttactcctatgggctaaataagttcatcacaatcttttgttt

SEQ ID NO: 11313 - DNA, 557 bp, Cannabis sativa
atccatgggcaagagagggtactctgccctctcctgtcttgactgcattattcaaattaaaaatcacatcttctatagtgccatcttcctcatatccctctgctaaagattgaaaggaatttcatgtattggttggcataacaggtaaattaaaagcctctattttgcctctagagactggaataaatccttcattatcagctgcaatttcttttttctgttcaacttcagctttttttcttggtgccttttcaacccacacctatttgctggttgttttcttcctacagtcacctatagcgtgccccaaaccagcacaatgaccacacaaaagtggtttccattcataagaaatagccaccgtagtattgaacccattctcatcttcaaattctatagtattcggtaactcctgctgtattgccctattatcttgaaaagagatttctcaccccaatatttcaagtcaagatcatcaagatgaacccaaataggtaccaccttgacatcttctttcttgaaattcactttagaatcccatggtttcatcactacag

SEQ ID NO: 11314 - DNA, 743 bp, Cannabis sativa
attatttttttgaatttatattttcatgaaaaacaatgtaaaagtagcatagtgtaaagcaaaaatgtcaatacaaacaatacaaaataaataaaaaaaaaacaatcatccctatttttttgagtaaaaacttcaaatttgtaaaaatattgtaaatatttgtagaattatattcttatatttttttttgttctttttgagtatgtaatatccgagaaattttataaatcgtcaagcagcggttccacttaggttggctgacacacctgaattcgaaagttacgtgtttatatgtttagtgtacacgtttattaagcttgttagattacatcgatagcggtatcagtatgcatagagtcatattggatacgaatagatgtatgtttggctcagataccgatcgatgctatcacatcagtacagctaaagtatgtctagcgtaccgattataggctgatattatggtcgatagtattgtcgtacgaatgttctagacttagtatcgtgttggacacagggatagggttatgattgggtgtataggtgcgtgattataatccgggttatagttatgttattgattatatatacttttcttactgagtctgtcgactcaccgatattgtttacatgtgtaggtaagggcaaggctaaggttgagctgccgtgagtgtgagcggatgaggattattgtacatttcaggatggttaggccttgagcatatgatctttggacagctagt

SEQ ID NO: 11315 - DNA, 504 bp, Cannabis sativa
caatgtaagctacttgcaagagagaaagtgatctattctttcagtttctaataatttaaattctaagaacataattagcttcacccaagtctttcttttcgaattgggtaccgagccattcctttttgtcagccattttattaatattgttaccaatgactaagatgtcatcaacataaaggatcaggaatactaccacttgattatccttgagttggtaagcacaaggttcacctaatagtctagaattctatgtttaagcgataaattacttttaatgatatgttgatgggtattattattttttttttttttttgataaatcaatgaattgtattgcacaaacatatttacatcctaagagcaccccactccaagggcctcaatttatacatttttatttatccatcactttccatctatgttttaacaatgaatgatatctataaaacaaaaaaccattctttatctacacttgatagcttctttgggaacaaaaattgg

SEQ ID NO: 11316 - DNA, 508 bp, Cannabis sativa
ttaattacattctattttcatttctatacatatatgtttatttctctcaattagacgccaccttaactttttttatatatgataatgtatcaattataaaaatagaatgattggtgcacttgtttttagaggcactataaaaaattattattttagtgacaattttttagtcccaatataattttttttgtgattaaatgtgacttttaattacaataaaatgttacttgtgactaaaatataatatttagaagcaagttgtcactaatttaattttaatcacgataagtaatgtaactaaaaatacatttattcacaacaaattatactttttttatagcgagaaaaacttatgacaaagaaaagtttacttgtagtaattgctcatcataaattgtaacaatacattatattatttaaggattaactaattaaatttcaaaataattaattaattatattatatcatatacaataatagttcccattttttgtgttttagcttgac

SEQ ID NO: 11317 - DNA, 609 bp, Cannabis sativa
gcaagcgtagcaccaaaaactctgcgcgaaacagtggaaaaaaggggaagtttaacacttctcccatgccacagaagaataaggagatgaagtacacctgcttcaccctcctaacaaagaagcccgaggccatcgtcatggctactcaaggaattgtccgataccgaaagcccttccgtatcagaaagaagatgggcaagaggaacatgtcaaagttctacagatatcacagtgactttggccatgcactaatgagtttaaagagggagattcaatacctcaaagtgcgtaacaacccccaccgacgtcgttatgtgcaagatgaccaaactcaggcagaaggtgcctagaatagagatccaatgcaacaacctgtggtaggaaactgaggggttatcattggcggaccccacattgcaggaaagaccaaaaaagctagggagtgttatgcttggacactctgtcaccagtccaaaagcgacatcctaactgtcaaagtcaagtactctaagcaacaaaatcccatagagcccacgatctccttcactgaagaagatgttgcttagttcagtttcctacacaatggacccctagtcattactgtacaaa

SEQ ID NO: 11318 - DNA, 955 bp, Cannabis sativa
tttactgatctattgaccgcagggggcgagtggtgggatgggttacaaggtcgtccagttagaagcatcattgagttcaatgaaagggctcaggtatttgttcgcaagaagaagcacgaaaaaaaatgaatttattgaaaacaagctcgggaagcaaacccagcaatgtttcaacaagtactatttccacgagaattgataactcgggggcttctagttcgaagagaaaggacggtaccaagcaaccgtcaaagggtaaaaagaaatagaagaagcattatacattatatgtacgtggtacgtgccacgtgccagtgtatgctatttaactgagcttaatgaaactcgagagaatatttacctcgcacatgagcagaaggttgccttcggcaagcccgagcctattaggaattcaaggagcaaaagagatcctaacaagtattgtaaattccataaggatattgggtatacgaccgacaaatgtcgccaattgaaagatgagatagaaagtctcattgcacgaggccatttgaaaaagtacgtgaaaagacagggtcatggatacaaccagcccagtctgcccaataacccaaacaaccaggggttacaacctcttcctgtggaaggagaggacatcctggttatttcgggagggccacatatcacaggggaaagcaataacgcccagaaaagatatgtgaaggagataaagaacgagcaattggcatttgccccagaaccttccaagaaggtgaaaactgaggaacctcccattgtattcatggaggaagacgagaaaaacgtgaggtatcctcacgtcgatccattattgattaccattcaacttgccaataaaaggatcaagatggtgttaatagaccatgggagctcagtaaatatcctttataaagaaactcgacaaaaaatgggactcgaaaaggccaaattaaggcct

SEQ ID NO: 11319 - DNA, 716 bp, Cannabis sativa
ctgtctttggcctcaaccaaatcataactgattcaattttccccgaattaaccataatactgtctttcccgacaatgtgtcctaggaaggacacttgtgataactagaactcgcaccttttaaactttgcatacgacttgtgatctctgagttgtagcaaaaccattcagagatgttgtttatgctccgcttctatctcagagtgtacaaggatgtcatcgataaatactataatacagttatcaaggaaatccttgaacaccctattcatgagattcataaaaagccgtcagatcatttttcaatccaaatgacatcaccagaacctcgtaatggccagatcttgttcaaaatgcagtcttcgaaatgtcttcctcctgaattctcaactgatgataacttgaacgcaaataaatcttagagaaaatactcttaccctgaagttgatcaaaaaagtcaccaattataggtaatggatacttgttcttgatggttagctttttcaattcttgataatcaatacacatccgaagggatccatctttctttttcacaaataaaactagagctacccagggtgacacactgggtcgggtaaaccctagatctagcatctcctgaagttgattttttagctccttgaattatgccggagccatcagatatagatcttttgagacaggctttaatctaggtgccaattcaataatgaaatc

SEQ ID NO: 11320 - DNA, 848 bp, Cannabis sativa
acaaagcttttattcttgcagttaccgctcttttcgaaccaaagaattacaatcaagtccgacaatataaggtgtggaatgatgctatggacaatgagattcatgctctacttcgaaacaagacatggacagtggttaaacttcctcctcacaaaagagctattggttgtcgttgggtatacaagatcaaatacaacagtgatgactctgttgaaagatgcaaggcacgtctggtcgctcaaggttacactcaacaagaagggttagatttttttgacactttctctcctgttgccaagatggttactttcaagttattactggccatttcctctatcaaataatggcccactctccaaatcgacatcaacaacgccttcctcaacggagatcttcaagaagaagtctacatggcattacccctgggattcacttctcctaattcagaagacaattccaatttggtctgcaaacttcacaaatctagatacggtctcaaacaatcttcaagacaatggtataagaaactctccgatgctcttctctcagtaggattctctcaatctcaagcagactacactttgtttactcgaggatctcatgacaattttattgctctactcgtctatgtagacgacattattataaccggacctgacattacattacttcaccagctgaagactctctcaatgaccaatttcaactcaaggcacttggtcctcttaaatacttcttgggttttgaaatcgctagatcagcagagggagttttcttgtcacaacgaaataaaactcatttcaatataataatgtcttcaagtaactagttgggttttatgccctaaa

SEQ ID NO: 11321 - DNA, 590 bp, Cannabis sativa
aaagattattatgtcactttttataattttgttagtaggatattttgagggcaaatattattacatcctaaaccggtagtgttccatcttggagtaatataaaacattgttaatgtaatattattttaaaattattttggtaatactataaattactctataatagtaggagacaacttaaaagagcttaaaagtaaacccaaaaaatgaaaactacatcatatcttaaggtaggatttttttggatccctaccaaagtggatggacaaatttaattatgtgaattgcataaataataataataataataaatattaaaataataaataataaataaataaagcctagtgtgctacttgacataaggcaaaaacaaaaaaagaaacctagtgtggtgctactcgacataatgtacttttgtcttagaagtgggctcatttttccttccaaaatagaagtatatgtttcactttcactatggtaatcaagaggctagttatatttctccttgaaaacccaaatcaataatgcaaaatttacatgtatcttttaattaaacatattgattgttaactatgacattagttaga

SEQ ID NO: 11322 - DNA, 574 bp, Cannabis sativa
ttttcgtttaattaaattttttttcatataaagtgattaattaattgaaaaaacaaattggagttattttgctttcaaaaaaaaaaaaaaaatcgatcagttatttttatttattcaatgtaaaaaaataatagtaatacaattcaaaagtaaatattaaatgtaatgtattagtgataatgattataaaagtaatagaaacaataaaatgaatgttataattataaagcaaagcttaaaattgtgaaacttattatgattattttattttttttttttaaaaaaaagaacaatttttaaaatgttgatgattaaataaaactaataaaatccttgcataaactttgaagaagagaaaattaaaagtacacataattaaaggttcctattttcttacttattagaatcatgcaaacttgatcagatattatcatcaaacacaatatgtacatgttatgtacatacatataatcactatccactaaaaactttttaacagattaggtggctggaaataggtataagtttctaagtaagatgttattctaactttccttttcatcttagtgcccat

SEQ ID NO: 11323 - DNA, 517 bp, Cannabis sativa
aatctataagagaaaaccatttaacgatattgaaggcccaaaattataaaacacatatcagcacctaccttttcaaaaaagatagtttgaggattttggattctaacaatattgagcaatttctctgtcatattgctctctgcttctccatattcagatattgctctatggttgcctccaaattacttcctccttcctggaagttgaacaaatatatatgtataatttaatttcacagtcaaatgaaactcgaggaaacaatccgaagagaaagatggtcttaccgtactttttttcagcctaaaacccatcatatcatagccaaaagaaaaccctagcagagaactgcctatcacaatttaaagcaaattacaaaataaaatttgaatattgaaacccttacctgagaatcaaaagaatcgatttctctttgcaaaatcatcatcgtcgaagcagattttacccgaatttttttgaagtaatttgaagtcttcacaaagattgttggatttttcaa

SEQ ID NO: 11324 - DNA, 842 bp, Cannabis sativa
aaaaaaaaaaaaagaacaaagacaaagtttagaaagcctgggttgcctcccaagaagcgcttgatttaaagtgaccttttgagaagcactcatcaaagagtggcttccgcccatagagagtggcatatgcccacatatgggtcttccttttcaacgccctcaagcttgacgagatgtggaattgaataggccaaattatcaacttgacttgatttcgatgaatgcacatgatggatgccaaggtaccataccaatgggggaggaggaggtagtggccaaaaatgatttttataggcgtaggcttccatgactaatgactcactaggttgaggaatgtaaacattttgttgttgaattttgtcaaaatctgggtgactttactgtgaaaatgttgcaacattatgagccacaacaaatattgacaaacttaaaatgcttgcttcctcatcgttttcttcactattttagattgaagtgggctcttgtaattgctcaaaagttttccccagcatctcctactcattaccactcctcaaaatgacattttcactttcttcttcctcccttgaatttccatatcactacccaaaatttcatagggtttattagggttgtacatcggtcggtttagtcggtttatactatatattttccaacacccaacacatataaaatcggggttgttaaaattctgcatgcaaactgcccaatttaaaaaaaaaaaaattctatacccgatcgacggtttggccgggttaacccgcccaaaccgaattaagatgtttttttttttcagattcaaattgttatgcctaactaggaatggctatttttggttgtat

SEQ ID NO: 11325 - DNA, 695 bp, Cannabis sativa
aaaaaagtaaattagttttatttaaataaaatagaaagatgagattttgggttgtaagtttgtgtgaccaaatggagtggtgttttagacttttactaattactactgtgtgttctgtgtgttgattttcaccattcatagataacattcagctttgtacaatttctattataaacttaattagtactaaaaaaaacgaatcataagaacttgttctgtctgttaatggtgtcattgaacaagtgggacattaggagttactatgagtatgtatgaggttgtacttttcaagtgatttgtttttgtttgatgattaactgattgtctgtatttagtttctcttaggggaatattacattatatgtttttgtttgtttacttgggataactaactacaattaagaatgcaattctcatcattatttcttgtagagtcaagttgatcctattctcatattggatttttgtacctcaaatatgaatagcttataacattttggcaactcatttcaggtgggtgatgtcatgtgggagccactattgacatatgcatttgttcatttgttaataagagaatgtaaatgtagttgccaatgtaaatgtactctggcttagttgctatagttgaacttgaagaatctatgttttggcatgcactagaactagaatccatcaattctcaaatgagatgaata

SEQ ID NO: 11326 - DNA, 594 bp, Cannabis sativa
atattttttattttaagtttcttcgtattattttattgttaggtacgaaacaggtttttatgtatttttaattggtcatttaatatagttagtctctatgatttaattttatatagaattgttttaaaaaattgtggtatgtcttattattttattaattttcataattggttttttttaagtaacgagttttcataattggttttttattatttttcattactgagttttaagtttcagttttttcttttgattattcaaaaaactggttttgctttactaactggtttccctatgttagaattttaactaagtgagaaacgaaactagtttttgacttcatattataatccatttttttttgttttatgtgattgtggagtgtttgttattaagtttgttgacttgtttattcgtgaaaaaattgatgagattccatctaagatggtcgatatggtagcaagatgatcttgttgtgagtttgtttattcatgctaccaagaaacaagttggtggttacataaccgatgatgaaacgttgaaaagaaaggaaaagacaaaggataaggcaaaggcaaatgagaaaagatgaat

SEQ ID NO: 11327 - DNA, 609 bp, Cannabis sativa
gataagagtttccttaaaagcccttgaaaaaaatttcccattccagatattcattttagaggaaactttctgaacaatataatggaaatgggagttgttcattctactagtgcagtgaggtacaccaagatacttactaatgaatccctcacaatctagactaagggagttcctgaaaaaatccttagaaacattggtagtattagggtagaacattacggtagatttggctacgttcacggtttgcccagttgccttttgataagagctcaggatttccttgatgggaatgttggaacttttagtgacaggggtgaataagatgttgtcatcagcaaataggaggtgagagatcataggagcatttctacaaatcctgagcccaacaaagtgattgccatgctccttgacacaaatggaagcagagagaccctctaccactaacaagaagatgaagggtgagaggggatcaccttgcctgatacctctggtaggagtaatgctctcaaaaagggtgccattaatagagatgtgatacacaaccgaggagaggcatctcattaccagggagataaaggttgggggaaaaccaacatgagtaaggatggc

SEQ ID NO: 11328 - DNA, 1070 bp, Cannabis sativa
ggacattaattcaatagaggtaacggtatgtctatcacaaagcaacaaccaaatagtccaagcaacggttataccttttcagacataggatcagatcttattccttgtgtcagaccatggtagtgtatacacctcaactctgaatacatctttttctcctaacggcctgtctaggcatcttattttcaaagtgctacctttaggcgactgtgttttgtaccagcaatagtccccattgtataactgcctaccgcacgagaaagaaagttcttaggagccaatagtcattattttatatgaatttcaccccaatagttttctctttgacagaaaccctaatgggtcatgggtacacccatacccgtactttagcttataaatacctcattattttcacatagacgaggggatcagaaaaaaaaaatagtcgaagctctgctgtaattgctgtaagctttcttctacttctagagaaaacaagagacagagttagagttctctaataagcaccactataaaaatattatacaagccttttagagccaatatattatctcgtggactatgactcattaattctcgaactacgtaaaactctttgtctattttacttattgcattaattatttctgaagttctattttaattagtttctgaaaatctcgataaacattaaatatgatctaaatcttttgagacttaaaagggatatttactcttatgtcttggtataattaattatcatgtattattttagtgaaattatcattgttcattcaagtaaatttcatgtttaatcaattgttactaagttgccataaataacagtttgttcatctagatcttgtgctagaagtgttggagctagtagttagaatttgaatgatgcaagagaatattcatttctaggttattcttagtaagtgaaatagggatattttactgccttgtataactgtaagaatttgtgattggattgtgttcttaaatctgatttaatataggaaaatgttgatttagatgatagaactttatccatgagttgtggaaaaatttcatgaacatattgg

SEQ ID NO: 11329 - DNA, 739 bp, Cannabis sativa
gttagcaagcgcatgataggagccaagacacagtatcccttaatcgagaaactagttttttgcctcctgatggcttcgaggaaattgagaccctacttctaggcccatcccattaaggtacttacaaaccatccgcttcggcaagtcttgcagaagtcggaagcctcaggaagactccttaaatgggccatggaactgagccagttcaacatacactatgttccatgcatttccataaaaggacaagtcctggcagacttcataacgaaatgcaataaggcagaggctagctcaagtatatcggccccgcagataccagcatggaaggtgttcgttgatggggcatcaaatgaaagtggatccggcgtcgagataacaataatatcaccggacggacttcggctccaggccaccttgcgcttcgcattcccagcttctaacaatgaagccgagtacgaagccttaattgcagaactaaggttggcaaaagtcataggggctacaagggtagaagtcttcagcaattcacagttagtggttaatcaggtatcaggggaataccggacgcgtggagaaaaaatggtcgtttacgtggcaattgtcagggaactgctccatgagttcactgaatacataatggaaagaatctcatgaggaaagaacgctcacacagattgtttagctaagttagcctcggatagcaaaatagagaaacaggggtggtacccgttgaacacct

SEQ ID NO: 11330 - DNA, 931 bp, Cannabis sativa
ccgtggcagggggcgtggtaatcaagggcgtgtcatctgtcaactctgtagcaaactaggccaccctgctagcaaatgctactatcgcttcaatgtctccttcatcccaccagccaacaacaacaatcaaaatcaatcctataacagcagtactcagtcacaaggcaacaatcaacaagcctttgtagctaaatctagccagcacactcgtaccgatgatacaaattggtatagtggcgccacaaaccatatcactgacaccaccaacaacatacaagcaccggctgaatacaatggtaagactcacatcacaataggtaatggacaatctctttccatctcaacacattggtaactctgtcattaactcaaatagcaagactgttaagttgaacaacatcttatgtgtacccaacattgcaaaaaacctcttgagtgtatctcaacttactagagataataatgcttatgccaaatttgatgctaactcgtgtgttttgaaggacatggattcgaggaaggttcttttctttttcaagggaagttagcttagcaacggcctttatcaactcacaacaccagtaccacgatctgcaagtcacaagttcactcaacaaccagtcccaaagtcacctaacacatgtcctagtcttaggtctaatgagtcttgtttttttatttccactagtgaatcaagtttgtggcatcataggctaggccatccttcctctaatgtactcaaacatgttttaatcaatgaaaagaagtctttaccttctcattttcaattttgtcaaagctgtcaacttggcaaagcacaccataaaccttatccaacctctctaaaagaatcaaaacagccactcgaactaatccatttcgatatttggggtccatccccaacttctttctagacatggttatcgatatt

SEQ ID NO: 11331 - DNA, 657 bp, Cannabis sativa
gttgtgtttgcttggaggtaatgcaatggaaaggaatcaagtttcattccatttgtttgattacattttaaatattggaatgtcattccaattctaatgaaatgacttttccaccattttggtggaattactattccattttgaaatggaagaaaagaagactatttcaatgcaatgttaataatatttttttttatgcatttttaaattttattccatttctattcctattcatattcttattaatatgtttcattcctcccaaccaagcgcaaactaaggtggcatttggttggaaggaatgaaaacatacgaatagtaattggaatgagaatagaaatggaataaaatttaaagtgcataaaaaaaattgataaaaaaattattaaatttttttttcatcattcgttggaatggtctttccttccatttcaaaatggaatagttattccaccaaaatggtggaaacgccattccaatactttaatatgcaaccaaacaaaagaatagaataaaattgtttccattctattccatttcattacctccaaccaaacgccacttaagtgttcttatttgtgtttcatgctgtaaagctgctttggaaagtttcagcattgtgggaaatttttattctttcaccttgttcttttaaat

SEQ ID NO: 11332 - DNA, 516 bp, Cannabis sativa
ttattgaactgcctaagacagataaatgtacacaatcatagggagaaatataaaggaaaaagtcattcatgaaaaatagaaagtaaaataattttaaagctcttcaacataaaacaaagactacaaagtaattgaagacatcaacataatcacgtatacccttggtaaaaatgaattttagttaagttaaacaactctttgatcttgaagattcgatttgaagaaaattggaaacagtttcactaacaaaattgataaacacattaataaggaagctaatgcaagagtgaagcaacttccatcatataaaagttacattgcctaatcataatccttattaccaataaagtggaatgttgaactcacagagataatactatttttcactatacactaataactcattgtattgtatcattagaaagcatttcaataatctcaaagaaaattgattacttcattggaaaaaaaagaccttggataactctctggcatgctatggattaattaagatga

SEQ ID NO: 11333 - DNA, 767 bp, Cannabis sativa
ttataatttgtctctttttcttttccttttcaatatatatataggccataacaatatatatatatatatttataataatacaaatggtaattgatctcagttattatttaataagttacaaatttctagctctatatgctttgttattcactagctagtcaccaatgccttgcctcatttacaaaatacatcttcctatttggtactgatctagtgggagaatttcaatagaaaataatctatggaaacaaaataccattttatatcaagttgaatgagagaagagagaagagagagggaagagtaaaacaaaatactctctatattgattaattggtaaaaacggtttacaacaattaaagaaagctactacaactattggtaactaactatttaccagaatttgtcattacaaaaaattcttatttttagtacaacactaatattaaaagtaaaaaaattgtgactaattataaatcataattcttatattattactaaaaggcccatgactaaagatattagtcacttggactgatcatgggttgggttggccggattgagagtattttagtgggccaacccaattaaatctgtttcgaaaattataactaattcatattatattttatgtacaacctaacccaactcaatacaacatgggttgggttgggttgggtcgggttccaacccttattttttacaattataaattttaatctaaatatgatctcaagttcatgcatgaccggaaaataaaaaattta

SEQ ID NO: 11334 - DNA, 1844 bp, Cannabis sativa
ttcagtttgtatacacataaccctcttttttttttagtgataaaaccccctttagtttagctctgtttgcaaacttaaaataacagttaaattttccagttaagtgccaattaggacgccaactaagactgccaccatgtacatctatgtacacattgcatattcttattggtaccaaaatttattaaaatcacttcaaacttcacagggcacatatatactataaatattaccatccttacgtaatagaaattaaaattgagcccttaaatgaaaaatgtcattaatgttcagactaagctttaaaaagtttcaaactcgatttttaactcaaaatattactcaaaaattttcaacacaagaaaaatatcaaaactagtcccatgactattcgggaacaatcttataaggtcagaacctttataactattctaattcacaaaactcctatacgaaaccaattgtttttaaacttaaaatgaaattaaaccatacattaagctttccctcttcgaggatttggtatcatgctaatactggagcttagatcgctaggaaaataaaaaaaaatagatatagaaagagaaaattttatcgaaggagggagaacgagggtttcattcgttcgtttcgtttatgttactgtaacttatataatatatataaataatattatatatattgtaacaatcagattatatatatatatactaggcaccgaaaacgtgcctacccgttaaattctatagtttgtaattatatttgttattttcatcaattgtgtttaaacaattattaaaaaaagatgagtgctaccgtcaacttcctagtcaacccagggtcagccctaggcataggcgggctaggtccgtgcctagggcccacgcctttcgggggcccaaaataaaaaataaaaaaaattattaggcttttatttaagtaaaattaagtgcattgtaaacaacaaatattcataacttagttggttaaggtgtatgacttattatacaatgtcatgggtttgaatcccataacactctttttcaatatttttttatatatattttggagggccccaaaatcaaatttttcttaggcccatatattttgagggtcggccttaagtcaacctccacgctcaaaggcacatgtcagaatattttttttcaattttttttttcacggtggtgttcgttatgcttacaacatcatccctgtaaatttttgaaaaatttctaatagtttacagtgccaaaaatacgtttgaagttttttgaacatgagtggtaaactggaataccaggaactctgttttcggcactgtaaactattcaaaaaatttcaaaaatttacaaggatgatactgtaactataacgattatcgctatgaaaaaaaatattccggcatgtgatttcgaacgtgaaggttgactaaaaggttgtaattagcactccttttaaaaaataatgtttaaataaaaatatagtgtggtataagtttgtttattgaagctaagatcattattcttgtataaatgtaagccaatgtgatttgttatacatataaaaaaaaattacatcaagttttgtaattatatattgaagcataatgctaaaagttgatgcaaatatatcacaagttatttttttttttgccaaatacaatacaatttttacatatccaattaaagatgttcttgcaacttatatataatgataacaaaaaaattaaattctaatcgaaattaataaaaatatgtatatattaataacaaaaatattaaagatacattaaggtgcgaagcactacaaaagattctatcattttatattaatttgatgtt

SEQ ID NO: 11335 - DNA, 540 bp, Cannabis sativa
actagccggcaaggtcgagttgtcaggtaaaggtttatgttgcttttgagaatatataaatatggttgtattttgaacgtaagtttcaaaaagggatccttagagtttaaaagttgtaatgttatgttttaaattatttattcaactagtaaagttttaattaaactatattttttttaataaattgtagtttattattataaactaattcgtaaaagcacacataacacttcataaagggtgttatatatgcaccataaatgttattagcattttactataaaaataaataatttactccactttaattttatttctagttttgcccttactttcgaggagatctgatagctgagaactcgctaggctcagggacgttatataattttgaattataatatataaattaaatatatgtaacatattaataagtgaatatatgaaaagttgtcatgcttttataatataagaggggttataaatttgaaatgaatttgtaatttgtgattgataaaaatacaattaagttagtaattgtat

SEQ ID NO: 11336 - DNA, 847 bp, Cannabis sativa
tataatgttcttgcacaggagatctatgaaaccttatcaatagacagaaacaagtatggaattacagtgaaatttcaaattaaagaagggataccacctataaccatcaaagatgacaatggctgcaagttctaccatcaaataaggaagaaaaatgatgatgaaacaagataccctttgatggtaaacacatttgaatcatcagcatcacctgaatgtcttgccagcaacaattatttagaaattggagaaacaagtatgcagtgtactgaacagttaccaacaagaacagaatatgcacaattggtagcagattatgcttatgatcatgcacaacaagcactgcaaacaagttcagagataaaccaagtaattacaaatcctcaaattgacagaatacatgttggccaagtcttttcaaacaagcaaacactgaagaatgcaatcagcctatactcaattagacaaaaccagccattcaaggtgaagagatcatcaactcttgactataaaatcgtttgtgttgatgaaaattgcaagtggagtttcctagcttcaaaacatggaaaaacagaaatgttcaaagttaggaagataaaatatgaccatacatgttcgttagatatcacctccggaaaccatcctcaagccacaagcaacctagttgggcatgtgataaaaaacaaatttgtcaacccaaaaagaaactacactccaaatgaaattgtagacgacattgcagatgactatagtgtctcaatatcctaccaaaaagcatggagagcaagagaaaaagctatggtggatgctagacgctgcccacaagaatcgtatggcgaaataccat

SEQ ID NO: 11337 - DNA, 1409 bp, Cannabis sativa
  modified_base (771)..(774): a, c, t, g, unknown or other
aaacacaaatttagattcaaaactaaccttggctggcttgggaggtcttgtttgagacctagctagtcctaggacttaatcatggaagttggccagctctagggtttcaccctataaagctagtctgttcatgccttgggtttggtgaccctggccaattcttgattgagtcatggaaccctggccgacccttttaaggcttgagaaccttagccggcctgggccttggccttatgcatgtgagttaattttttattcatattcggcctcaaggttttcatgttgttgtttttggcctatatgccctctatttttgaataatactatcatttagccttaaagccttttatcatggacatatgatcatcctggctatcttcttattggctggacatgtaagtatccacatttactttcctttatgtcaagtcgaagtatgcctagacttgactttgaggcaggtttagtagcttattctaagcgttaaattttctttacataagttctttaaattttctttacataagttctacctgctagttcgatgcattgtacggtgtaggtgccccccaagtgagcgcccagacatacggtctcttggtcacttgcaattcaccaagtttcattaaccttacttgggatttttttttggggtgctacttggtgtacgcatgtggaactggcaaagaataactttaagaagttatctttgttagcaagtggcttagacacagttggtcttaagtgtaacaaaagcttacagcttagtgnnnntttttgaaatcacgtagtggctactcctacgcagcttaccgcgcaacgacaatcactgaaaagtgataggaggccatgctgaaaagcaatgggtactagctcttttatgggtccctacatggtgaaacgttagaggaactaattgacaagttggctggtgagagtacttaccgagatgttccctattttagtgtttaggtagaagtaccaactccaagttcctgttgtactcaccagacttctatgcgcctttattgttatcttgtaacatggtgcggaccttttcagtttgtccaaacatgcttgttgcaggatctttattgtcaaggaatattcttcggggagtaaatctcttacgaagaatttctttcctcaatctgtttgttgaagggcctggtaactctttgtgggtagccatgctactttgagttggcttggtctcttcttctttctcatcaagggatcctgctagcaagatggtacctctaggttattgtagactaaaagtatgagagtaaactattgctggatcgggctagccagagtaagactaggtggccagccacattgaagcattgtctagccatttggaagaggctatggatgaccaagttgttaactctatggacggccac

SEQ ID NO: 11338 - DNA, 575 bp, Cannabis sativa
ctttcttctttcttcttcttttttgtgcagaagaagaagtggcccatccaagttgtatttgtaacactcaaaatatttgctgctgcttctcctctctctagtctccctatcctttgcttcactgcgaaaatggcttgcatatgtcagctcagtttgtcctccactgggcaccattgctgccccaaaggtttactattactcttgctcatctctttccccattaagtcgtaatgcccacacaaaaagccctactcttctctcttctcaaccgcactcttccttcatttccagcttctcctgatgccaccgtgctaacctaactcattctcgatccaccgtcgcaccgctcccacgagctcccaattttatggtaatattttcatctaattatctttaataatggcgattgagtgaaagggacatggatttttttttctttaaagaaaatattttctgaatttattgttgagaataaggtcgtaggaagtgctaaggcggagacgctgagagtaatgatatttggagctctgcttctggcaagggaacacaaggtcagctcataactcagaaaaaag

SEQ ID NO: 11339 - DNA, 635 bp, Cannabis sativa
tctatcgtacaccattaccatcatataatttgattcatttcaattaggggtgagcattaaattcaaaagaaaagtgaaaaaatcgttcaaaccgacctaccgaacaccgttagaatcgaaactgatgaaaccaaaaaccgaaaaaaccgctaacgaataaaactaccattaaacggaaaaaaccgaaaccgaccgtcatacatatatattttaatttattaagtttttttttcatgtattatagttactaataatataaaaaaaatactatatttttttttattaatattaaagttaaaaagaataaaataattagtttttgaacaattaatttgtatgtttatagttgtaaaatgtagaataatatatttatagaataaattagattattttttgaaaaaaaaaaaaatcggttggggcggtttaaaccgaccaaatcgaggttcaaaacggtcagttttaatataggttctggattggtcagtcagttttcggattgcaccaatccaaaccgaaaactgaattttagatttttatatagaaaaaaaccgaccaaaccgaccaattctcacccctaatttcaatatttttctacctaataaaagaaacattcaataattaaaaacaccgtaaac

SEQ ID NO: 11340 - DNA, 616 bp, Cannabis sativa
aaaatagttacctaattatgcttcgtttgttaacttctgttttttttttaccgttaaaaatttacctttgaattttgaccaatacaaaattttgctcatttttattaaaaaaagttataatattttattaattaaaaaaaaattattaaaaaattaaataaaaatattaaattaataaaaaaaatataattttactttaaaaaatattttcaaacttcattttatttatcaacacgtatcttaaaaaatcaaaccaaataatttaaatgaactattttttttttaaaatcaaacttatttatatttttaaactcgtaccaagtaaaaaaacaattaaaaatttaagaaaaatatatttttttgggaaaacaaaattataaattaaactaaacaaatattatgtttacttaaacaaatctatatttttttataaaaacaaaaggttaattaggatttttactcctgaactttgacatgtaccaaatcataccccaaacttttttggcagttaaaaattttccctgaactattgagacttttggatttaaggacctgtgtctaattttattcaatctaactaatttggcgattgcccatgaactaaatcatgctcctg

SEQ ID NO: 11341 - DNA, 552 bp, Cannabis sativa
ccggtgcaaacttgcgtcgagaaaatcttttgtgccaattagaaattcagcgcatatcacgtttattggcacattaatgcgcaggtaaaagttcacaggtttagggttttagggttttaggggtgagttttgctagcgtaaaaatgttgcggcaaagctttgttttatttttttttattttattatattttaatagtttataattataatataatagaattaattataaatataaaattactttttaaaaatgcataattttaaaaaaaatagcattcacattgataattaaaaagttttctaattgaactaatatacaaatatgtttgatttagtaagtaataaaattttctaaaattaatagtaaataaacaaaatattaaaagatgttcaaaaaaaattaagttctaaagttaattataaaatatatattattttaaagacaggtaatatcatcgtcgttgttattccgagtctcggaaggatgcgataacgatccaggaccaagaggagtggagaatggtggaagacccataggaagcaagttgaaac

SEQ ID NO: 11342 - DNA, 1198 bp, Cannabis sativa
tctatatagttgaaataagtgaaaaatttgtaggatatcttaattaaataactataacggatatgaaaaaaaaatagattgaaatttttttctagatatcgaaacgggtagagggtgcatcagtgcatccattaggggtggattgtagaagcaccctataatatataatgtaagccctcactgtttcgacatctatagaaaattttaatctagttttttttatagttgtgtacattatagttattaaagacattacaaaattttgagaaattcagaataatttacaatttagaaatcaattttcaaaccgtctatttcagacatgtatataagataaaaaagtcacgtgtgcaacagactttttgaatcctattttcggcaatgttaaatttttcaaaatttctcaaaattttgtaatttaaataactacaatgtatacgaccatcaaaaaaatttggactaacttttttttttctagataccgaaatagataacggagcatcggtgcactcctttcaagtagggctgaacatcgggcgagttgaccgggtttcaggttcgcgggttttgggttcaaaaaattgtaccagaactcgacccatgaaatggttagggttcgtgggtttgcgggtttgggttgatcggatcggccgggtcaacaaattgacccggtcaacccattaacttttttttaaaaaaaaattaaattttatgtggttttttctatacattaaattaagcatataagttataaacttataataccataatttatattcgttagattaaaataaaataaaaaatgcattaacttcaaatctaaaatacaaaagtcaagttccaaactatatataatatattatatattgttatttttaatatattatccatgtaataaaaataaaatgattagattttaggatttttttatttttaatatattatatatgtaacaaaataaaaaacaaaaaaaataataaaaagtgaccgagttagcgggcgggttcgggttcgggttcaacccaaaacccaatgaccatagaaaaccaacccgcgaacctgcccgaaagtgtaccgggttgaacccgacctgcctgaataaaatgaatttttttaattttcgggttgaccggatcgggtctgggcgggttggccaggtccgagtcaaacccaatcaacatgttcaaccctactttca

SEQ ID NO: 11343 - DNA, 619 bp, Cannabis sativa
tattttactcaaattcatggctatcacactctaaactcaaatgacaattatgactatctttatattttactcaaattcatggctattactctctaaacccaaatatgtttggcagctcatgactctgtcgctgcacctcctcccaaactgaaactttcctcttatcaaaataaattcataaaaatcctcttcataattttttatgctagtatcaacactcaaccaactgcaaaatacaactctccttcttataaaatactttttttttttattttgaagtaaatacaagtaaacaaaaaatttcatgaattgcaaaattactttattgaccctcaacagtatagcaatagtataaaataaagaacaactaaaatttgaaatattatttaaatattattagtgcaactcccagttatataaccggttcttcaaggtcaaaaagtaaaaaagtaacctaatctacagtaaaaacaaaattatcctatatgacggatgtgaaatctctattgtaagtgaggtaatgtataaatcccctatttataaattaaagtattatgatttatttatataatttacctaacgtttgatcattagtctgctaaaaatatacacatgtaat

SEQ ID NO: 11344 - DNA, 520 bp, Cannabis sativa
agtggtgatcttaaccttattaccctcgtcattgaatttgtattcaacaaccttcttgattccgttctcatcgggtccaatgacctgacgaggcggcaagagaaagtcaaggtcttcgccatcatcttcttcgagctctccccacctaagcttggtcaccatctttgtctgcagatatggaagattagggttttgtttctcataacaaactcaaaacaacaatcaagcaaaattgcatatcttttattttgacaatttcatatgattttaaaacaagaacacacatatggaatgaacaatatcaataataaactcataaacaaatctgaaatcaaatgaaaaaaatctcaattaagtttcttatattaatctcaacagtcccataataacacaaaatataatcacaataatacattcatatatatatataaaagattaatcaacaaactaatcccaatcccaataataagctcataaacacagctgaaaccaaattaaaaaataccaataaagtttctta

SEQ ID NO: 11345 - DNA, 725 bp, Cannabis sativa
cagcggctgcgggagactcgatgattggtgggggcgccatgtctcatgactcggcggagatgaaggggggcggtgagaatagtaacttaaacaagagcgagcaaggagtggtggtggagagtggcggcggaggaggaggggatggtggaggtgttataaactggcagaatgcgaggaacaaggcggagattatttcccaccctttgtacgatcaattgctttctgcacatgtggcttgcctccggatagctaccccggtggaccaactgcctaggatcgatgcccagctggatcaatcacagaatgtggtggccaagtactcagctttgagtcagggcttggttgttgatgataaggagcttgatcagttcatggtatatcaatttatttctcatctctctctctttacagatttaattaattaattcttgatttttttttttacttcttcgtctgttttattttgatggtaatttaatgaactgaactgaaattaatatttgtatgtattgtgttgctatatgtgtgttcgtacaaagtctaaagaattttgtttatttatgtatattattaactctgtaaaaagcagagaatttcgttatttgaaatggatagttagttttctcattaagcaggttgatcaggattaattcaaagaaataataataataataacaaaaaaaatggttttgaattcttaaatgaagattattattattattatt

SEQ ID NO: 11346 - DNA, 552 bp, Cannabis sativa
ttttgtagtgagtgtgattaagataaaaagatcattaattaattttgctaaatccacttccaaactacatcttcttcctcaaacttgatacattgttcctcccaatagacattttaaatggagaattggcatgtttttgagtttttgatgcaaaatatagtgtgatgacttgttcttttggagacttgaaattacttttcttatgtaattattcatagttttccataatatgtgagggtgtcataagcaaaaactcttaaaacatagtatgaaaataaaaaagtctagatcttactatataatgatgcaaaattattagccatataattacatgaatatggttgttattgacaatagtaatactcccacattgattacaatttgtaataacaactaactattacttataaaacataaatctttcaattaaggataatcatacatcacacatattacttcattaattggatatgtgccctataactaatattaataataatttaaatttaattaatattcttttaaaaatttaagacactttaatctttaata

SEQ ID NO: 11347 - DNA, 632 bp, Cannabis sativa
agggcataaaacccaacactcatccatataggaacatttaattttatgttaagaattgggtaaactaatataaaacttattatacgtgcaatgtagaaccatctttgactgcaaacctaaatgtagttggaggaggttaagagttcgtacaatgtagaaccatctttgaccaaggagtcttctgatggtgtttgaaggtgacaaagagtttattacattgttaagcaaacaataattcattaatgatatatgaatttacatttgggaagcattgttccttaatagttgcatgattgtatctttatcaggtagcaagacccattttcttcttttttttttgaaaaaaaaaaagaaatttgaagctgggctcctcgccttacctacattattcgatgagaatatgcagtgtttaaatgtagttcatttgaaaataaatacatagattatcattagtctttccttctaaatcttctcatggtttataatagatgcttaatgacttattttgatataattttcctaataattcatttgataaaatatagtaaataaataggaagagaaaagattccagagactatgtccatcaaagttttgattgtattttcaagcagcggagagaggagctggag

SEQ ID NO: 11348 - DNA, 619 bp, Cannabis sativa
aagtgcgttcatactaggtcgtctgattttggataatattatggtggcttttgaagtaatccactacttgaagggaaaaaggaaaggtaaaaagggctttatggctttaaaacttgatatgagcaaagcttatgattgggttgaatgggattatctgcgagctatcatgcttcgtatgcgatttacaaaaaaatgggtaaaccttgtcatggcttgtgttacctcggtgagatatatcatcatgcatagcaatcatgttatgggtcctatcatccccacccatggaattcggcaaggtgacccactctcaacatatcttttcattatttgtgctgagggtttatcatcaattatcaagaagtttgaatcaaatcaactcctgcaagggtgccgtgtggctaatggggctctatcaatatctcatatgttgattactgatgatagttacttattttgtcaagcctcttcgggagcagcttcaaatgtacgcaccttgcttcactcttttgaaatgacgtctggccaaaaagtgaatgtcaccaagtcatccatattctttagccccaacactgatcttttgctaaggaataaaatatgttcaacactggggatgcctgaa

SEQ ID NO: 11349 - DNA, 596 bp, Cannabis sativa
tgtttttaagtttacacgatttttattgttaaattcattaacatgatcatcaacgttatactacatcgagattacgagaaatagaacgtttattaatctcatctttatatcttttaattattattatcttataaatatttattgcttgcatttgatttgatcagttttttttttcaaggctatcattgattgtgttattagaaagatcatcggctaatttgtgtataattttttttgaattataattggttatggaagcagtgattaatgttgacaggtactactctttcatcatcagttgagtacaacaagaacaacaataacaagaagcaagtgatgatcaaaagaacaaccctaagaaagaacagccgaatttcttctggctattataacaataaaccatctgaaaacattgctccggcaacggtcaacgtttctggcatcatccaacaccttccttctatttacttttttaattatgttaataataataataacccatatcatcaacgacaacaaaacccacctttgcttcctctaccaattcttcccttatcttcttcatcatcgctaataaacagaggcctctcatgccc

SEQ ID NO: 11350 - DNA, 596 bp, Cannabis sativa
tgaccaaaatacccctagggttaataaatcacataagcatacaattaggaaaaagttgtcatttcatcacacacacataacttaaataaatttcaaatttctcaattattcatataataccaaaataaaatgtcaaaaatgtatttcgggccccgaacccggttcggcccaaaatacccggttgtgactataccaggccaacttgtcataaaatacctgcagaaagatagaacaaatacactatataataatatagtccataagcacgatataacattcaaattacggttctaccctcctcgggtcaaaattacaaaaatgcccctaactcaccaacagggtcttaacatgtcatttagcagtataatttatatatactaaattatataataatataattccacattaatacaaatttaactagttagggtttgctaatctgattccttaatcttagggtattacagaatttttctaatttatatatgtagtatgtagtactaaaccgttaggaaaaatattgtatatataaattaaaaaaatattaggtaaagattatttttaaataattaaattatgttattccaatattgtag

SEQ ID NO: 11351 - DNA, 801 bp, Cannabis sativa
taaaaccccaaaaatagtaacagagactcaccgcggtcatagcaacactgatatcctgaatctgatagatggagttcgtggaagcacaggctgtgtatcttttggccgcgagttgggtcaagttggagacaagatggctcattaactcggaggcgaagggagcaagagtaggcccgacaaagcgattgaaccagtccgtcaggagatccatatttaggtaccaagcgttccttaaggcctcctcgcgcaaggaattttgcttggcctcccgtaagacctttttcaaagcctcaacctcggcgttccctcttgtatactcggccatagcataattgtgcttggctatccggagctgctgcctctccttatctgcgggaacgggagtaagaatgatgctgggaggcacagtatactcctccgcttctggcagaatcctcgagtcagagctgacggctggagagttcaccctcttagtctttttggaagactctgcatccaccattttgcccttgcattttcggtctaagggagccaggatctcaccctcttcctcctccttctcgacctctccgtctttgtcaatcaagatgatttggcctagaggggcgctataagaagaccttcccggggtcaccaactggtcaggttccgaaggaatagcagagtctgggctgtaggtctgggcaagagtcgccaaaagatcctccattggcctggctgcttcaaaaagacaaacaaactaagtgtcagaatggccatgagaaaatatggacacgaaaaacaaagcgttaaaactagtca

SEQ ID NO: 11352 - DNA, 622 bp, Cannabis sativa
aaaatatctcactaaaaaaagatacccccttttaaaaaaagataaaaaaaaaacaaaatctgccaaaatttgcctcctcaccgcatatataggctaagcctacatcgatatgttgaaagaggaaataagagccaatgagatatatatgctatatctttttttttttttttccttttttgcttgcttcaacctacgttgcagcgacaatccacgagttttttctcttcttagacttttgaaactctaggaaaatatcattttgcacgtcaatctatctacaaacatcacctagcataaaaaacatcaaatctattactttttgcccataaaaatcaattttcttcaggacccgaattattctaaaaatgatgaaaaacactaaaattactaagtaacaacatcctttaaatatagagaaatcgataattttagagcctaataggctcttaccatcacaccttctcgcgagttcttatcatgtgaggatagctctattggagcagttattgacacatcatactttttcaactaggggatccacatgtcaaatatatacgagactgtactagtatttttagacaaaaactcgcactataacaactgatatatggtataatgtaaa

SEQ ID NO: 11353 - DNA, 1240 bp, Cannabis sativa
  modified_base (862)..(878): a, c, t, g, unknown or other
taattattattatggtatgattaattattaatacattatttatttcaaattataagatcagagattagatattattatattttaattgaaattgaaatattatatctaattatcttattagaaatttaattaacaataaaatataatattaatctaaataattttcaattgctaaccataaatatcagtttttcaaaattttgttcaaaattttgttatttttgttatttttaaatatttttaaatatttaaatatattttattaatttaaattataagattagataaatgttatttatttaatattttatcttattataaatttattttatcaaaatttatatttttgttaaaataacatgaaattttaaatagtttgttgataattttgtttgaattgatatttttgggtttcctaaccctaaaattttcgaaatttagggtattttattttatttattttggaataaaatgattacattctaatcataaatatcatcttttttcagatttgatttgtttcttttattgaatttagtttagtttattaaattataagatttgaaatataatattagaaatatcttatattcaaattaaaagattatattatattatcttaatttaattaatttaaattatttaagtaaacgagatttttcaaaattagttagatatttgaatttggattgagatatttagaattttattggatttaatattgtttgtttaattaattatttaattaaatttgttaacaaacctattatttatttaatttaagtcgctttaattaacttgttgatagatccaattatctaattttaattctaaacaaattgtcaatagatcaaataaatannnnnnnnnnnnnnnnntttgtaatttctttcatctgtgatgttatacccaaaatttttttaccatctcaatagaggacatgggtcaagttaaggggaatatggatcgatgaaatcacttttaatagaataactcattaattgcataaataacagagtatacttgcaactcgctaactataaggtcatatgcgaagtaaagttataccaactgttgactcgtgtattaacaagaaaccataatgcattgaaagcattatgcgagacatcaacttcgttgcacctgggaagatgaaagtgatacatattgactgtgaaaacacttagagtacaatgtacaaaataagtataatggttagatggaatcaagacttaataag

SEQ ID NO: 11354 - DNA, 751 bp, Cannabis sativa
caccaatgaacacctcttggaaccattcacatcggaggatgtcctccaagcaatgaaagccatacacccccaaaaagcgccaggaagcgatggtttgccaggtttattttatagaaattattggtctctcattggtcatgaagtcactaaagtttgtttaggaatcctaaatgaagggatgtcggtgaaagatataaatgacactctcctttgcctcatcccgaaagttcctaaaccaactcgaatgacagagtttagaccaataagcctatgcaatgtggtttataaaattgttgcaaagtgtctagctggccgaatgaaacaaagccttcaccaagccatctcggaggaacaaagtgcctttattgggggaagactaatacaagataatgccatcattgggtttgaaagtctccattgcatgaaaaccaagcgatttggaaacgggaagaaaatggctctaaaattggacatgtccaaggcatacgatcgagttgaatggagcttcttggttactatgatgagggggctcgggtatgaggaaaaatggattgaaaaagtcatgcgttgtgtagagagtgtctccttctcagtccttataaatggtgaaaagattgggaaattccaacctactaggggccttcgccaaggtgattcactttccccttacctttttttactatgctcggagggtctttcttgtcttattcacaatgccgaaagggcaggggagataaatggggtacagttt

SEQ ID NO: 11355 - DNA, 668 bp, Cannabis sativa
  modified_base (210)..(211): a, c, t, g, unknown or other
tagagcagtgaaactggtattgttgcttggtgggtattattcggttgagccttagggtaataagtttgaggcagagagaagaagatgagaaggaatatgaagaaagtggagcagacgaaaaacaagaagaaaagaaagaaaaagaaaaagaaaaaggaaaaaaataatttttaaataatttgtttatttattatttttattttttaaaannaaaataataatttggaccaatattgacatgtggcaatttaaaaaaagaaaacggctcagttaaaattaggactaacggacaaataaaaagtatgaccttgaggactattgccattatttttggaggttggggactaatctgcatcaaagtgacatttttggagacttttgccgcaaatttccttaaattttactataaaacttacttattgttttggaaaaaatttaatatataattgtctaaccaattaaattgcctaatttattccaacaaaagaaatatatttttttctagtttatagagaataattaaattatgaaatgcacatatctcaaaaacttttatgtatatatttaatacgtgtacttttaaaaaataaactaaataaattgataaaaaaataaaatactaacaaaaataattaattataaaaaatatgaataagacaaaaataaaa

SEQ ID NO: 11356 - DNA, 669 bp, Cannabis sativa
attggcatttgttcttcaccttttgcattcaagggttttagtttgggggcttcactttaaatttggttgttgcatttgtattttgtttgtaatatattttgatttaggatgatgtataaagtttttgttcttgacaagttttgggtttgttttagggtgttaaacaaattttgtattattgatggataattgaaaatcgataatgaataaggaaggaaaatagtgagttgatagagatagggtaaatatttttggattgtttttttttttcttctttttttgcgtttgaagttggatatctggttctgggttttgtttttttctgcgtttcaatttctcaatttgagtttattttttaattcaaaaaaaatggaaaataaataaatattaaaaataaaaattaattatatttagttttttattaatttttcataatttttaaatatttaaataataaataaaaaataatgacatggatcaattaacgagtgacacgtgaattctgaccacacttagcgaacaaatacctaccgaagttccacattagtgacagaatgtatttttaccgtaaaaaataccactgcacaaacacacgaatacagctaagcaagtaaatgtgagctaaaatgagcttcgtgtctctatcacagatagaatgatggagggaat

SEQ ID NO: 11357 - DNA, 567 bp, Cannabis sativa
ttaatatgttttgtttgtattccaatactaataaatataaggtgttaattctacaataaaaaatatctctctgaaaaataattgaacaaaagattgtagaaaaattgaacaacaaaaagaaaaagtgtttgagataaacaatgtaacactaccaaaaatactttagtcacaatcaaaattgcttatcatttaaaagtagtatttaaatataaattatcactaatttaattataatcacaagaagtgttgtgactaaaaatatatatatttattgataataaattgtgaattttgtgactaatacttttagcaacgaactttttattaataatataagaattgtgatttatgtttagttacaatttttttacttttaattacaaatttcgttgtgactaaaattaagattatttttttataatgaaaaagcactacaaaatattctatatataagtaaataaaattttgtctctttttattttaaaaaatgcatctcattatgtattgtttgtgagtttatttatgtacttaagttgagttttcatatactctaaagtacttgatttg

SEQ ID NO: 11358 - DNA, 535 bp, Cannabis sativa
acatgtagtagctgaaatctcgcggattgaatctttactcggtgaattgggtgtacccttctctgttccctcgatcacttggtgcgataacatcggtgtcggtgctcttgcttcaaatctcgtctaccatgcacgcaccaagcatattgaaattgatgctcactatgtccgagacaaggttctacaaaagcaattagaagtgagatatgttccatctcatgaacgaattgtcgattgcctcaccaagggtctgtcaccgtctcattttgctttccttgtcgacaaactgggaatacagatctcacccttcagtttgagggggagtgtaaaggaataacaaaatgagagtgacacatcatcagttgagtcacagtctcttccaggaccttcggagctcacataatcattggcacaaattatcacgtttatagcagtacaagaaattcattttcaccagttgtcctcatctttgaagaatcttttttgttattccttgtgcaattgtattctgccatctgttgctattgtattggtt

SEQ ID NO: 11359 - DNA, 523 bp, Cannabis sativa
catcatcatcatcatcatcatcgaaatgacatggcttataattagtaaaaaataagagtaaggggttttctacttcattcttcaattgtttctttgcaagttgtggcccataagagcttccatctatgatttgacgccatagtttacaaatgcatcttaatcttagaatggttttcacttctaaattggagaaaatattcacaattagatcctcgcataattgatccattgagtaagatagagagtgagtagtgataatttaaatggtgagagagaattattatgtgtatatataggctttgaatttccatatcctattcaaattatatttatataatatctaaaaaagatattgtaaatctttaaatacatattttaaaaaaaagaaaaacgtagtttaatctttttaattaatgtaattataaattcaagtttaattagtaccacaagctacttcaaaatcttaggctaaattaaaatttaatcaaactttttttaaaaaaaagaaaataacggtcggtaa

SEQ ID NO: 11360 - DNA, 901 bp, Cannabis sativa
ccccgtatttcttccctaccactatttttggttacaatgacgacacaaggtgacagatctaaatttatagctatatgtaagtgatgtgaactaactaacaagtccaatagttgaaatgtccatgattaataacccattttgggaaacttaaaatcataatttaacaaaatgaattaattaaactgagagtaggctattgccacactcacgggaccgaacctctttaaaatctgatgttctttttactttattgttcttattctcttttaattatattattaatcgcttattaatggattaactgttgtcggctaaaagcgaggtcaacattttggtactttcattgagagcaaaaactcgagtttctttttgtcttaagttttaacaggcatacaggatggttgtacaaactcgtagaggcctagttgatcaaggcgacccgatggtgacatatcacaacgtacagactcctggaaatacaagaggaccaccaaggacaaaccctgagcaggtcaatacataacgacccactgtgggccatggagtgacttcccctctggctgggatcacaccaagcgtgcaagagactgggaataccaatttagtagccaatcaatccactcataacacagttgcgtctaccactaatgttcagagggcagttggagatgctattgagatccaaaacctccaagcaaccttgggactcatgcaaggtcataataacgctttgcatcatgattaggaggatctccgtgctgctatataaaccttgcattcgacgagcaaagacatcagtttatagaatggagggacggggagatggaaactttaaaggctcagcaagcagccattggtcacttttcaacgtcaatatttttggttctttcattgagagcca

SEQ ID NO: 11361 - DNA, 1000 bp, Cannabis sativa
ataaacatgttcggtaaaaaaaaataaatattataatatttacatagatttttttttctctatctttcaataaaatgttttttaattatttttttaaataattttttaattatttaatgatgtaaaattatacgtttttttttttgtcatttttataattataattggcaatacaagtgttatagtattcaatatataaaagttattaattacatttatgttaaatgttatgaggcattaacaatatataaagagacatttttcttaaacaaaatatcaatgctcattaatgaaaattgattatttcatcatatgtaataattaaaattgattattagttttggagttggggtgacaactacaccaacaaacaaaaacatacaacaaagactaacactatgtttggtaaggtgaaaaaaagagtgaaaggagaaagattggaggaaagaaatggagggataagtaaaatcatttgtttggcaaaagataaagaaaagagaaaatcaaaattttcaatccttcttaaaatagagggattaaaaaaaagacaaaatatatatatacaatatcatatttgtctttaaaaattataaacaattatattaagaaggataatattgtaattttagtagttaatttatattattgaaaaatttatttctaataccaaataatataaagagagttatttttctttccatccttagaagtaggttgacctaagtattggaaagtttgtgtcattacacaatacccctattttctaagccccgattttttttttgaaagaaaataccctatttttttcattttacatacataaataaaaaaattataattaaaagtttaggaataaatcttaaacaaaaagaagttggtaataaaattgtaatcttaatataccatttatgattattattattattattattattattattattacaaatatttgagtccactctataacatattctctagagaaaattacactctatac

SEQ ID NO: 11362 - DNA, 566 bp, Cannabis sativa
tttagtacctttaactttttaaatggagcattattattgggcactaattttgcccaacactttctatgtgtggtgtttcatgcttggttagcgatattctctaaaactatattcttaagttaaattaaataggacccgatacttaattggactaatagcgatattgacacataagagggtgttagtagtgccttttaatatttctcaatactattaaggggtaaagtttaaaaaatgcaaaaaattatgtcaccctttttaattattgaaatttcatgttcatatatttatgagcaatggccatagcaagcaattatgatgatgatatacaaaggcacacacactcacacacactcaacctttattggaatggagtggcctattactattatgggctatgggctagagcccatttcactcaactcattcatgatggcttatactacatacatgcattggtatgtgtcagtgacaattacaggctcttatctcattcaatctcaggcattaattaatttattatgaaagtactgtccatacaagtcaagacatgtcttactctactc

SEQ ID NO: 11363 - DNA, 538 bp, Cannabis sativa
taattattatagatatttgttctcagcaatctggggtcgaaaaaacaagtttgagagggctagaaaatggtagtcattttacatgtaattattattgtatatataaatatataactaatgacgtacgtgtatgcaacttgtgataattggctatgccaagtcttaaaaaaaacagaactaattaacaaacaaaaaggagtgatataactaattgattgagatgattgatgcatatagagattaatgacgaggtgagataagattaactagtatgaaatttgaataaagttattggttaagacattattatttaagatattttaaggaaaaaaaaaacaataatttacaccactgccgcgctagctttaattgactaaataaatatataaatataaataagagttattatcaatcaaaaaatatataaatagtattcacaatcaatcaaaaaatataacggaggaaaagaaataatgatgaaaattaatatttgtaatatattatttttttggaaatgaaatgatgatatgttgtttat

SEQ ID NO: 11364 - DNA, 671 bp, Cannabis sativa
gatcatactggggagagttagagacgaaagctgtgacttgaagggtttggttagggaggctttatccttgttcggagctttcaatcttgctgattacataccatatcttcggcaatttgatctacaggtttgtttgttattctttcatatcattattattattattatgttaacattatggactttttacaccaagcaccttttaatcgatctatttttgcaaaacgggattttcataaatattgggaaaaaaaaattaaagtttactcttaagtggtatataaaaaataatacaaaagaaaataaacaaaatttaaaatatgaaaaaggtaacaaaaagtcctaaataaaattgacagaattctgaggacaaatatcactgaaaaagttgacggagtaaacatatatactgctcacagaattctatttcttcaatttgatctgtcccaaacacacatttccttcttataattttaagacctatttctccaatatgtgccaataacccttctatgccacttcatggccccactcttagcaccttttgcttgatttctcattgtatttccttacagaacataaaaccattcacctttacctttcatgactatcatagcacacttagccactttcatgatttcattttcaattctgaccaagtaaccctcttg

SEQ ID NO: 11365 - DNA, 536 bp, Cannabis sativa
gttcctcgatagaaaggctcaaatggtgcagccacattgccttattaactagtgctagtatagaattagtatgactgtgactatttttgctcgttacttaactttttctgttattttattttggtgggtggttttctgttcagcaggaaggagaggttaagggtatgaaatctggtaaagaacctgaaaggtttctgtcagttggaaaagaagagcgtgtttttcctaaattggatcacacaagcaaaaagccaatatcaaaagagagtaaaacacctttaacatcttctggaccacaactaagtaaaccttctaaaccaagtgaatccaaatatcgactagttcatccaccaccaagaagcaatgtagaaaactcaaattttattgaacaagttaaaaataaaatttctttgaatacaccacctacagcaaaaccatttgataggccattgggtgaatcgagttcctcgcatgtttctagagaaaagaagttgttgctaaagccaagaaaggagaaacactactcgccactttct

SEQ ID NO: 11366 - DNA, 840 bp, Cannabis sativa
tttagcataagagagaatacgaagcaccatgaagagagctctgaatccatttgataaatttggaaggaaaacaaagaccttttaagagatcatatattatatattacatagataatatattaaaaataacaatatataatatattatatatagtttagaacttcacttttgtattttagatttgaaattaatgcattttttattttattttaatctaacgaatatacattatggtgttataagtttataacttatatgcttaatttaatatatagaaaaaactacataaaatttgattttaaaaaaataaattaatgagttgattaggtcaatccattgacccggccaatccgaatccgcaaacccgcgagcccgaaactcacgaatctaaactatttcggatccggtataattttttgaacccaaaactcgcaaactcaaaatccggtcaagccgcccgatgttcagccctaatcttagctattataacttattctaaactttaagaattttttttttatatatagttcaattattctttttatcttcttattctttaattaattgtatttcttttatttgtttttatatttttattttttaaaattttaattaattatgtaaaaatataatatttaaattatcaaccatataattttttttttttaatgatgtaatgtaaaggtttgaagttaattagaaaaagtaaattttgttaaaatattttaaagaattggaatgtaaccaaggagtggtcttacaaagcagcaagagaaagtagaacaattctactagacactactactcctctcgggcctctccttctcctacagtaggggg

SEQ ID NO: 11367 - DNA, 688 bp, Cannabis sativa
tgttataaggtccttgctgtatttgtgtcctatacttctattcacttttgatgctgttttttcattcaaagactatagttgatgttttgaatgttctctttatttcagagaagttctaccctgttaaaaatgctcttcgtcaccattgcaagtggaatttttataattgcaactagtgcccttggtcaactttgctttccccatgtcaagtttggaaaatattcttgggaacgcaggtctcttcagccatctaaagctgaaagtgtacaactacatcaatcacttgatgatgccgaggtatggatgaattatgatgtgttatacgtgttcattatagttatacataactttttcactttaacctagttgagaaccctcaattctacttaaggatgacaactttggggaatgagataagtgctagtctttcaacaagttcttccataatattatattcaagatatttcaaatgttgttgcaaaaaagaaaagatattgcaattgtgatgtccatctcttaatacatttctctacattatgtatttccttattctctgtttccactccaattttatccttttttttaacactcttggattaaaagaaaaataaaaatgaattccaaaggacttcatttcttcttgtttggagtcaataaaaactcgagaaatctttattttagaaaaaaa

SEQ ID NO: 11368 - DNA, 775 bp, Cannabis sativa
gaatgacgagatttttcccataaatgtttaccatatgggaattgcttaatattggcatcagctgaatcaacaatattccaaaagaaattgctcactttggtttcaggaatagtaccaaacgcaaaattagcaagaaaatggaccaaaccaagtttgaccatattcacatccccttttgctctcttgtgaatgaaagcattcttaacttcatttgtttgttatcaaacccttactttccttaaaaagtactttcttcaactctcatccttctcaacaaagatagatttatcatcgttaccatgacatttcaattcagtaatcaaggaaaattcctctatcgagaaccgtaccatagtcccatttatcttaaaccaaaaatcaacatcttctgacatcgaatagacctctctcaacatgatgtgatgtactaacagagcttgaagtttaagatcctttggaaattgtaaaaaatatccaaacggtgttggtttaaataactcatttcgtttattagtgaaagtagtgttcaagtcagaaactacagagagattattgaaaggttgtacttttgttccaaatcactttgtttgggaaatcatatattgaggaaccttcataaattaataaaagtaacctagtaaattattaaaagtaagctacaataataggaaaaaaagattaggtaaatttaaatctaaataaagaaaggtttcaaattagtctaatcgaagatgaataacattaaattttcacataaaagatcattgaaaataaa

SEQ ID NO: 11369 - DNA, 603 bp, Cannabis sativa
ttaacattaattatgatgttataattttctttatttgatttgattttaattttttttaagaattaatataaaaattatataacttattatttaatttattttctaattctagtagttttacacaatatagatcttccaattgaattgcaatccattatttaagttgaatatctttctacttgagcatcaaaatccccaaactacccttaccaataccaaaccccaaccaaaccaatctcattactcaaaaacgtactacatgtactacacacgtctcaacattaataaaaataaataatccttttattattattattattattttctgcaaattaacattttcttttctctctctaaaaaccccaactcagatatttcccaaactcctccattgtttctctctctaaaaaaaagcttaaagatgatgcatatgactttctactggagcaaggagatgactctcctgatcgacacgtggcgcacatccaccttcactggctacgctctctccttactcgcttgcttcatcgtctccgccttctatcagtacctcgaagatctccgccttcgtctcaagatcgcttccgccggaaaaccttcttc

SEQ ID NO: 11370 - DNA, 590 bp, Cannabis sativa
gcctctaaatatttatactgatatgatataataatgaaaaatttacaattcacctttttaaaagagatgcatgtatcttatctattttgatatttgaaataatattttagttaattttttttttatggttatgtatgttataattatttaagacatcctgcaatattttaaaaaattcaaaaaaaatttaatacgctgaaaacagggttcacttattatgttgcacgcatgattattttattttgtacgcgtgtgaaatagattggttgaacactgttttctatattgtaaattatttcaatttttttaaaaattttgtaaatatattaaataactataacatacacgaatatataaaaaaaaaattaaaaaaattatcctcgatgctaaaataagtagatggtgtatcaatgcataatgcatcccttttaaaggaagtattatagaaacacactataataaattcaggtcctaaatatataaacatgcattttagtattatttgaagggcaatttattttttttttatttttattttttttgttttttgagaaagattgcaatttccattaaatatgaacaatctatgt

SEQ ID NO: 11371 - DNA, 586 bp, Cannabis sativa
atataatgtcggtgtgtattttcatgatgatttaaccttatgacttaatgttttcaattttgggactaatttgaaggagaaagtgcagagtgggattgtatggagccattgttggaatgtactgtgtttttttggcattggtattgagcattcttaggctgattttgtgtcgtattttgtagcttatcttattttttctctagctagtttttgctgcttgttttgtgtcatataatgtggtctgtcttgtgctttttgagacatgttttgtgccataatatgatatgatctttaattttatatgcggaagttttgtgtacaaaagaattacaaaggttttaattgtatgcggtctaaattatcatggacagctttgtcgcatttgggtcacaacaattacactatgcccatgatctgaccaagcatactcttaggctagagagtgagttgggtttgaacagctccatgctctgattactgatatctttgtgatgcttttcttaatgtgattcatattgctttgtggaaaaaaaaaatctagtgagcttagacctttgtttagaccattctgcatgtttagaccttt

SEQ ID NO: 11372 - DNA, 507 bp, Cannabis sativa
cgcctcgagacttaggcagacacaatttttcccaggcctttaggtagatcccatgatttcctctttcaaatccccactagaaatctctaaccattccatcaattctcgtcgctagacgattagagagcttagtcgtatgcatggaattcatcggcagagacaagcccacatacttgattaaagtagctcgaccagtcctggataggggtttcaccttccacccttggagcttagcagtaagattttccaaaataaaattaaaatctgtgtctttctgccttgtgttaaagagaggaagacctagaaattttatatttttctccggcttacaaatacccaaaaaaattttaatctctctttttatactaattggagtatttttactgaaaaagatcgaaactttgatcttgttaatttattgtccaaaaccgacacagaattttttcacatattactaatactttatgaaactattaataaactactaacaagtccttacaatgtttt

SEQ ID NO: 11373 - DNA, 554 bp, Cannabis sativa
atttcgttggttgctatatgagtttctacgtggatttctattgtaaaaaaaaaaaaatatattttaaagtgtaaaaataaaaaataaaaacctaataataataataataataatagtatcccaaaaataattaggtaactagcccgagcaaagataaccaagtcacgacaaatgatgaaagttgctgcgaataccgtttgggcgtacaaattatatggatgaacgggaatgaaattttgccaaaagtcgaaatgttttaccatatacttgtaaagagtgaaagagaatgtacataatagagttacatttttttttcttccaaaaaatgcatataaaaaacataggagattgattgtaattttgtaattagatttcaaagaaagttatatgagttataaatatgttttgaggtaataaaaaaacttctctgagttataaaaaaataaataaataaataatctattaccataataaaagtgacaatattttggaacttaaccaagtaaattattaaaaaatcatttgttcttacatatatactcataataattaga

SEQ ID NO: 11374 - DNA, 786 bp, Cannabis sativa
tttattttatatgaagattctttagtttttttttttaattataacctttgaaaatatctctttttttactttcattttaagataagaaattgtatgataatttatctaagtaaaaaaaaatattagaataattactctaaatgcatatatttgaactctccttaattttctcacttttattagatataaaatttattatttttttattaattttctgcttctataatatcacgaggctaatataacaacataaaaaaattgttgatttaatatttttaattatttttatttattagtttcttaatttttttaatcgtagtttactatataagaaattcatatatatatatatatatatataatttgagtgtgtattaaccaaatatagtgtttgtttattggtagagtagtttatataatttttttataactttttttagatatctctttgatcaaatgattataaaaaattaaaattttgaataagttaaaatatctaaaatatatgtgaggtacaatgagaacggtttaaaaatttaaaaaagttaaaatatctaaaatatctataatttaaatttaaataaaatatttaaaaaaaataaattatatataatttataccaacgatttggtggtaagtaattttggttttaatatttttaattatttttgtttattagttttttaacttttttaatcgtagtttactatataaaaattcatgtatataaaatttgagtgtgtatcaaccaaatatagtatatgtttattggtagagtagtttata

SEQ ID NO: 11375 - DNA, 526 bp, Cannabis sativa
agtaaagctactccagcagggactggcggagcaggaaaagcatgtaatgatgttctaggagcttgagggtgcacaactgcctgctagggattcgcgtcaccctattgtttgggaagcatcatgtgtccctggaccacccctggtgtgagatagattatcaagatgcagacccatttccccagatgccccgcgcagaccaacatttcgatatcatctttcaaatatttgcattaatttgtggtgtggcccttttctccatggtattcgcattgcttattatgatcctgcctgttcctcccaccatttgacatgcgcgggggctttcgatagtggaccacgttacacgtcaccttataaacattctcccgagtatctatcagacttgtgtactcgatatactttggattgtactcctttcttgatttctttactgaatcattacgactatgattcttacctcccctcttaccccgcgaatatcccgcactggaatttaggactagagtcttagattgtttgggagcca

SEQ ID NO: 11376 - DNA, 520 bp, Cannabis sativa
taatatttttatttttatttttgtaagtgctatgaataatatttattaagtatatgtattaaaaaaacatttattatattatatatgtaaggaaatgataaaaaaaaattaaatgactttttaatatatgagctaatggttcaatcaacctaatatttggagtaaatcaagttaataacaaaatgatatatatgagaatcagaacataaattatacatttaatgctcatttagtaggccgtataaggatcgtattgtattaaataataaataatattatgtttgaataaaataatatattgtattaattattacgactaaaatttttaatatataatataagttgtattatttaatgtataacaaatgatttgtattagcttacgaaccatagtaatataagagtagtatacttattctaaatttttacttttaaattttttatatatatgaaatatctcccaccttttatttagttagcgggcctctcaagtctccaattctaattgtggttcaagaat

SEQ ID NO: 11377 - DNA, 914 bp, Cannabis sativa
aagtaccattatcctctaaagcacaaatctctatttgcatagcacgacgccaaccggcatttttcatagcttctttaaaggattttggctcacaacctgcagtaacagcagcaagaaattgccgatggcccatagagaatttgtcacaattaatatagtgtgctataggaaatggcgtacctgaggatgctgatggtgcaggtgaatttgaagagagagtagatggactttttgtggaaacagtgttagtaacatagtcacgaagtcgaactgacgggatcttatctcgtaacccacgtccaagtggagtttcagtagtagaagttgaaatagaacctgttgcattatctatattgtcatggtgggctatagtagttgggtggactgacccatgatccgtaggtgggccaaggatggattcatgtggtgagtgaggagtaggtggttgattaggtgaggtggctggtggagaagaatatgtgggctcaagtggagtaatatgtgttggatgagattgagtattatgagtggactcatgtgaaggagtagtgagtggttgttggatagtttgggttgagaacgaatcaggtatcccaaaaaaatcatcaataatacaaggatctccactcatattcatatttccaaagtcactatcagaaatagtagtatcaatagcattatcagcaaaaggaaaatgattttcaaaaaatttaacatccctagaaataaaaaaagacttagtttctagatcaaaaagtcgccatccttttttaccaaaagggtacccaacaaagacacattttcgacttcgacttgcaaacttatcacccttagcccgttgattatgagcataacataaggatccaatcacacgcaattcgtcaaaggttggcaaagaattaaataagacttca

SEQ ID NO: 11378 - DNA, 542 bp, Cannabis sativa
gatttcaatcattgaagccctaatggtccaatggtccagagtctctcgtcactgaatctcaactcaatgttatccttgtcgtggctctatgcctgtcgaaatgtctagattgcgctgatctccgtcctaaagtagtggttttggagttctttcattctattcgaacttcattctgtaaatcgttttggctgcaagcatttggtactgctgtgaatcgtcgttggattttgcagctggggtaactgagttaacgagcgagattgcggtgttggctatcggtaatggaggaagaggagatttgggtatttctagggattttttgattgccctgtttcaaaactttcctctgattatggcttccgatgctgagaaattgatttcttcacaaagttcaccttttagttcaagccaaacttcagatcacgttaccttaacagctatctctcagactatcatctttggagttgtggttgaacttgtgtctgtgtgaattgatttgaacaatttccccagctttattttctctgccccattctatttct

SEQ ID NO: 11379 - DNA, 709 bp, Cannabis sativa
attttgagagaagagccattacctcctaccagtttttctttgcccttgtaggaggtttggtgttgaagctgtgagttgtctgatgtgacatggttagaagcaccactatccaagtaccagttggtgtcttcggttgtggaaggtgaggccacatatgcctgtggttgattgttggattaggcaggatgtaggttatcttcaggaccattgtagctgagatcaaaccgtttgtaacatctttgaactgtgtgaccaactctgttacacaattgatagattggtctatttccttgattgggaattcggcctccttgagtgcctctgcctctggtatgtgtgttgttgccacgaccacgatttcttgtattgaggttgcgattttgttgattgctgttgggaaatggaggcttcttgaactgtgccatattcgcagaagctccattaagatcaagtgaaagggcagcaactgcatatttagggcccaaaccagcaagtatatacagaattaattgatcatcggtgatttgattgcctactgctcttaatccatttgcaagattcttcatttttaaaagatattcatcaatttgcatcgttcctttcttggtgttctgtaactggttcatcaggtgtatgaggcgagctttagaagtggtgccgaagagttgttcgagagttctccaaagttcatgcacagagttgcaattga

SEQ ID NO: 11380 - DNA, 740 bp, Cannabis sativa
aaattcatctttccaatggatatgacacaaggtcgagtcctatcgggacagtctcccaaagaattatttggcaaaaatttgataagttagcgcatacaaaatgtttaacctcgctcaaagctcaaaagtggttacaaacccacgaaaaatagtaggatatcacaacaagaatcgtccctcaaccaatctcaaaaatcaagggaacaattgatatattccagtacacaattagggtttagtagacccttaagtcgtgtcttttgaagagagatgcacccacccttttcctatataaggggtcatacctggccttagaaagaaatccaaaattcatattcactaagagaaactctaccattagacttcttgtattcaagagtctgttcttgacatgcatgtcagattaataaaacacatggggaataggcaattactaatacttgaggccaaacctctttaaattatggtgttcttcatttgtatttattacatttttgttttagttctcattaattatgactctatgtcggttggctaaaaaaccagtcaacacaaacatatatatgtacattgagaagctataatataatttcattttagcttgtgactccaatttttttttctcaacctaattttttatgtttataaaatttctagttattattttaattaaagaatatttattaatgaaaaaaattaaaatataaaaaaggaatttattaaaaaaaattagcagaata

SEQ ID NO: 11381 - DNA, 502 bp, Cannabis sativa
gatacataaaacttccctacttgctattgtgattgaacataacaatgcattatttggctagagcaatatcgaatgtctacagagtatacactaggtttccaagaaactaccattcttcctttatctaaccaaggattattgtttgtaaaacaccaaccttgaaatagactagtatataaggttcccatgttcttattttgaacctttgtttctaggagactaacaaaatcatctttcttcgagtagatcaattgcttgatctcattgtgtttgtgttgattgttaatccccctgacattccaacacaagaacctatccatttgaggaagagggatctccctcccctcctgtgttaatctcatttccaggttcttctccaagagtctcaaacatattcttcactactgtcccttatgaattcttatttatcagaattctcttgcccttgctcactttctggaacccttcagcgtctacatgcttctccttctctattactttc

SEQ ID NO: 11382 - DNA, 1447 bp, Cannabis sativa
tttgaagttgattgtttcgtatttcatacatagtcttcttttaagtcacacacctgagataggtcagaattagatattattaataacgatcggtgggatgagtactgttggggtagggagtcattcgagttgacaatagattcattcaaggaaaaaattgatcatgcgatcaagatgaaaaatcagaaggagaaaatggaggtgagacttatgatggttggtattgaacattggggtgtttgtgggtgttcattgtctggtttatgagtgttgtccagagatgcttaattatttttgtaaacgagttacatctagtattctgagaattctcaattgggcgaatgatcttaaggccaaaaacctaacttttaagcttttgaaagataagataattgatttgcctttaaagtcggtgattctaagtttgttaactattttattataattgtttcccagtgtcttttttttttttttgtttatgttttttgttattttgattggtaacttttgcggttaaagttgaagaagattcttcctactgatgaagaaaggaaactctcaaattggatggcttatttgtggatgaatctattgatgaccgtgctccaatcaagccaacctttgaatatggtttgtctttcaaaagaattattcttatgatctagatatgttaaaagataagttggaagaaattatatccagtcaggaattgttggacaataatttttatcgcgttgagatcttttgttaaccttaacttcaagtctttgttgtctgttgttcaagatatatattaaaaaaagttactgtcatttacgaccgccctttgttgaggtatatttttttatatagttttggctgatttcttttttaaatttttgttacattagggttagtttctttcatgttttgttcagttgctctactgttgttaaacaggtgaagacatctaatgatattgatgatccaaacatgtgcttttcaagaacttgaacacgttcttcatgttcttcgtgactcaaaaagctaagaatcacaatgaaggtcaaaattagatctttttcatctaaaaagaacatattatacatcataagactacaatgcagatcaaaataccaaaaggattacaatctaattttggaatcaaaaaatattcaaagcaaggaaaagattcatgcaatcatgggaaaaaaatcaaataaatcaagtaaatagtaggaatagaaagcttacccactatacgagaaacctttgatgaagagaatggaaagcttggatcgttgaaatggtgcaaaaatcccaagagatggagcaatgtgggtttcagcctctagagagaaggaagatctttttaaagttactttttctagtgagagaatgaaaagtgaaaagtgaaaaggagtttctctccataagtcttatacaacttctatgggaccacttcctc

SEQ ID NO: 11383 - DNA, 515 bp, Cannabis sativa
acatggcaggtatgtatataatttaaacaatttataaatgtcattttggatcttgtattttttaaaagttatcaattagatcatttattttgttaaatgataattttgaccctatattttttaaaatagtacaaaacagacattgtgcttaatttccattaaattaaagctttatgataacttgacctggaagtgttataacaaaaatggttatatttttttgtatttatttgtgctaaaaattagtttcaggttagttatattgagaaaaaaaaaaaagtgatagaaaattaagttcagagtctattttgtaccattttaaaaaacacaatgtctgaattatttttttaacaagagaatcaaatttataagttttacaaaacgcgatcccacagcataaatttttcaaaatttgagtctgcataaatccattaatcaattaatctttttactttttgatattcagggaggatcaggaactgcaaccaacgtaacatttgagaatatagaaatgg

SEQ ID NO: 11384 - DNA, 670 bp, Cannabis sativa
agttttatatcaaaggctttctttcttttttatttattcctatttttttagaggcttctgaatgttgtttagtttattatatttagttatttataataacacatgtatatgttttgagttatacagaagtcagtgtaaagaatcttgtaattgattaacaaataaattagtgtatggttaaacttattagcacatttcttttttatctctaattgtttgattttgttttaatcattgtatagaatgaaaaatggccattcctaagttgatacaatcacaacattttttttaattatttaatttttttttttagtaattagcgacataaatatttaaatttaatttttagtgggaataatacttaacttatacttttacagttcagttccgtaagtacttagccattaaatgaaattattatactttattctcttattagtatatttaaattaatttacaaaaaaaaaataataacttggactaatcaaaaattaccacataataatttacattacttattacttacaaaattttaaaaatataattaagatattattacatcaaaaattaaatttaaatatttatgtcataattttttttttattaaatgatgaccaccaaacaaatagataacaaatgaagtgagattaaaacgagaaatgatattagc

SEQ ID NO: 11385 - DNA, 705 bp, Cannabis sativa
agcccagaaaaaatcaagttcttctcaaaactaaaactagaaaaatcacattcaaaactaaactcagaaaaattatcttcttcctcaatcatactgataaaggctcaaattgatacattctaaccctttatttgtgcacatataattaatataaattaaatattctttatttttaatgataaatttatttcaattagaaatgtttaatttattttaagttttgtgtcaaatttcagatttggagcaatcttgataaacttaaaaatggatatcataagtgctaagtcaacactttcatggatataatattcacactaactagaggaaataagtccaaacgttattatttttaattaagacaatcatggacttctccaacaaagtatccaagcccataatatcatttcatcaagtgattgggctatgcgctccaacaattaagggaaatttacatgcccaataacttaggtactggctcaagaccacgtcccttcaggtagcaccaagatcccttcacttcgccaagtttccaagtcgtggtccactccagcacttgccatgattgtgacatctcattaatatcaattgactagccatttctacaccttgccgagttcctagaagcatttccccactactcatacacgttcattattacgttgggatcaattgtctctataaataagagccaaatctaatgtaaaa

SEQ ID NO: 11386 - DNA, 953 bp, Cannabis sativa
cttaaaatctaagttgaggtcgaagtcgaaaatattaattaaaaaacaaaatgtttaaaaaaattttaaaagtatattttttaaatcaattaaaaattaaaaaaaatataaaattgattaaaaaaatattatacacacctttagtttttcaacattaaatttttatttattttatgtaaatttttcttttttaatgggttgtttcaccctaaaacttcttataaattattggtctatttgttaaagtaaataaaagaattaagttgtagagtttaggaattaagggaaatttattttttttaaaaaaaaaatagtagtttacaccatctccaatgaatagtgtatatttttgattaaatttagctaaatttttgtatttgtactctaatatacaagacacactataaattagctataaaaattaatactagtgatagtatttattgaaaatatataatataattaattttatttatattattttaatatcttataaatataaaaacttttttcattaatgaatagtttaatgagggacaaagaagtaattaaaaaatgtgatatttattgtcggctaaaatttgacccatgctatcttttgtgttaaatttagcacaatttttagcttgacccaaatttgtcacacattttatattaccattggagttaaattttagtaaaatattttaaaaaaatagtaatacactacatttatagctctttattggagatactcctaatgtaatttttctgttgtgctctttttattttgttgttggttttttattatttgtatgttgttttgatgttatttttttttattttttttattaatattgtaaaaatgtaaaaaaaatattctttcaacgtaagtgtaatttcttttaccaaaaatcaaaaataataatttatgtgaaattctttttattggttgtttcaccccttagctactt

SEQ ID NO: 11387 - DNA, 534 bp, Cannabis sativa
cctagagtggtgaatacttaaagattagactacaaaatagacaaaataaagatagtaaaaagtaaataagacaaagaagtataatggttcagtcagaatttggtcagcttagtccacttttggtaattctttcagcttagtttatttgatttagatgacgataaaaagtaagtatcctttgattttacatattaatgaatcagacaggattatttattacattaattatacacagtaattaggataaatgttaacagaataaatataagttttgtttgttctttgtcttaattgcttgaacgtgtgtgacttttcgagtcgcatatttgactatccatattctaaacacgcaagctctgtggggttttactcacaccatgggcctttgggcctattaggtgaatatctgtgttcatccttaattttgcatattatgacattcctgcgttgacaacgtagaacttgcgagttcttaacgagtcgtcgaacacattagtctttcagacaaaacatgtgtgaagaagtggtctttac

SEQ ID NO: 11388 - DNA, 503 bp, Cannabis sativa
tgagtggaaaagatattaaaagtacaagtaggaatgtgcataaatcgatcgaatccaatgacaaacaactaatctaaatacaatcggccgtcaaatattagatattcaattataatcgaattggatgttatttttaaatatccaattagatcagatcggatattggatagggaatccaaaaatccaatacatccaacatccaatcaaactaattagtattttcatttaatttgaatgagtaattaaattttatgttgttatacgcaaaaaatatatgtatatatgaaaattaatattaaaattttactctttttttttttggattcgatgaatctaatccaatctaatacatattggatctaaaatattagatggatccaatctgatccaaaaaaaaaaaatatcaagtataaatattggataaacctaaatttaacagataaatatatttgaaatacatggatcaaatgggataggtgatatataaaaagaccatgctttaa

SEQ ID NO: 11389 - DNA, 575 bp, Cannabis sativa
caccaaccatttcgttgtaagtagagtagagttaccattggtggcatgtgcatctcatctttgtaaaagagttattgttatttgatattttaaggtacttaatactacatcaatataatattttataattgattagcgatttttaatattatttattatattaaaacatgagagttaatattaaaatatatagcagtataatacattttgtgatgtttgataagtatttttttagtatttatctaatctcaattataatagcatatatatacaaatattttttctcctactgctgatattgaccctttaaagtggcggtactgttgtttacatctctattataaatatagtattattagtaagtattagccattataaaataacgttttataaataattagtaaaatattttataataatcattaaattatataagattcaatatttaattttattgaatgtgataatttaaatattatacattataagtgtcttagtatttgtcattaataatttgtaaataaatttaagaatcactaatacgatttggctttaatgtacttataatttgtgtc

SEQ ID NO: 11390 - DNA, 558 bp, Cannabis sativa
ccaatttttaactaactaactaacttctttgctctttctttcatcttaattaatcaaatttttttcttttatttttttttattaaaaatgtcttacgctacaaaatctgaagaaaaataccatttttgtttggattgggaaaaaaaggaacgaatttccagaaaacggttaaggaaggaagagaagagagtgaaagtacagaaatgcccatattcagagtttactggttggagggtaaaattggaatttccttgattaaggtacgtagactaacagaattaactgtcggtctgccccttaattttgttgattaaaaatatgtattaattaaaattcttcaataataataataggctaatttttgacccccaaactctaatatatattattgtgtctttaaattttttagtaggttattaatggtcgataaattatttatagtattgtaaattggttattttgttaaattttatcatatatggcaaacaaaataatttaatattaaaaaaataaaaaaacttgacaaaattggtgaagtagccatattattattttatt

SEQ ID NO: 11391 - DNA, 559 bp, Cannabis sativa
tcattttgaaatctattgcatgtgaatgttcggtccttcaagtttacaatgtgttttgtcttcatatagcacctcaaataagttttcatttgttggcttcacttgtatatattttgatgcatttagtataggcatatcattttttgtgcaaaattatataaagcaacttacaaacatcgaaaaaattctataaaaaactgctttagtataactgatgctacatataattttaacttacagttaattgcaacgagtatacatagttgtctatgagttttttttaggaggatggggtcaatcctgtcgtgcacttttgtgcctcttttctctgctattatatgtccattattgcatttgtgtacacaagaactccaacaatgttgttaccggtgtttgcctagctactacattttgttgagttaagtgtttcagttgtatttgagttgtttcacgattgcattgtagttcatccatcattatcagcactagttcagcaaaagggcaatctcttgatattaattctctacttatttcgtaatcaacatagtacttattgtca

SEQ ID NO: 11392 - DNA, 504 bp, Cannabis sativa
gtgaagtgtaatgattcttagaccgtgtaggcgtgggactacacaattgaagagggtttaaattgattgattggtactacctgtatcaataaaatgtatcttctttttggtagcccatcatgaaagaactctgaagttaagcgtacttgacctagaataatttcaaaatgggtgacctcttgaaaacttttttctatgaagcaggcgagtaaggacaaatcacattggaaagactcgtattagtttgcagggtcagtcgtcattctataaaatagccaagagtgacgttcccgtgtataagagtcattagtccgtgggggaaggcctaatagaggcttaaagcggggaggttacaaatggtattagagtcttgacctaactagaagtgtggtcgacgagaatatcgaattcataaagagaggtgattgtgacagtcaaagtcccgtgattcacaaggggaaagatgggagctgtgcaatccaatatcgcctgagaaaggtgaag

SEQ ID NO: 11393 - DNA, 617 bp, Cannabis sativa
actgggttgggcttatcttaggtttcatctggccggggtttgtcttcctctttttgagtgggcaggccaccaaaaaagaggggagagtagagaatggttagtgggcttatttatacttgggtttcattttgttacagtacaaagtccaataacaggcttcgattttgggcttagattaatggattctcaattttctgttgcccccaacgaattgtgattgttgtggggaaatttatatggtatactgacttttgttattttttataaaaatattgtcaggtagtattttttactttttatcgtgtatttttataagttttatattgtagtttacaatgtttattttttagtttttttttttgtttgttttagtgttgtttttcataatttatttttttaaggtgtgtggctcttttatgtttttctaagtgagagtataatatatatctacttattgtttttataagtggttatatttacttattgttttacattaatttttgtgttgttttagtagtttttttgttatgatattttaagattgggcttacaaatataactgctattgcattgggtattgaggctgtgcatatcattttttagtttttttaatcatg

SEQ ID NO: 11394 - DNA, 621 bp, Cannabis sativa
cgtactatctaattttggtttaactccaaattattattagtgtattttaatattagatcatatatatatataaatatatattgatttaatatataaaataaaaaattactaactaatttagggagtcacatttatattaaacaccttagagttaaaaaggacaatcaatggtacctaacattttctagacgcatctctttgtgattagttaataaaattcacttaaatttattatattaaattatatataggacttgatatacttaattgcaacgatagcgatgtaacaccaaggagagtgctaggcactactagtgttttatagcatttctctatgatatatatcagatatactaaaaggcactggtgcacaacacccctttacgtgttaatatcattattgatttaattaagtgtcgagtctcgtatacatgttaattataaaaataataagtgtagaaagtattaagtacctctatgtatatatacatgtatagtactgattttattgtcttacatcatcataaacgaggtcataggttttagtcatcatatagtttttttaaagtggaatataatgaatccaagtgtttccaatgccaatggaagtgggaatttaat

SEQ ID NO: 11395 - DNA, 658 bp, Cannabis sativa
cggctacaaggtcgggacatatgacccaaagaaatgttttttcgctgttggctagtccctatgcgaactcggtaagttgagccggtgccataacggtgatgttccagaggtttgaccgtcggagttgggaatggtggaaggtataaaatatgggattagataagttatttacaaaaatatggcattcaaaaaccccatcaaaatgtaaacaaaacaaaaaatccataccctattagtattatttaattctgccataaataagtaaatccttaaaattttcccatagatgtaatttttacttaaatttaatagaatttttattcggataatttcacaaatacacaaaaataataagaaaattacaaaaatacggtttcaaggaattttaaatatttttacagttttgtgattttatttacagaaaatacggtcctttatgttgttatcttgttaatttgttgttgatttttgttatatgtatgtttttttttgtttttgatgttatttttatgttacttttatatgtagttttcttgttgttttcatgttatttctatggaataccgtaaaaatatatatataaaaaaaaaaaaaaacctaaaactgtaatttttttacgaaaaattatgccttgtataattattctatttttatttac

SEQ ID NO: 11396 - DNA, 592 bp, Cannabis sativa
atggtgatggtgatggtgatcatatatacatatggtgatggtaatggtgatggtgatgataatgtgccatgatatatgatccatatggtgatgataacggtgagatggtgttgtgccgtgaatgtcatcatatatatacatatgtcttatctatcacatgttatatgtttaacaaataaagaaagagatgtgattttttttttataaaaaaaagatgatgttgatagtgaagtttcgtcaaaaaaataatgagaaaatgaaaaagaaaataaaaactgacctgatgtgatgttgcaacagaggttgtagaagaaagaaaagaaagaatacctaatgtgtaaagtgagaaaaaaaaaaggagagatatgtattaaaaatattaaaagccaattacacatctagtttgctaagaggtattaagtgacaataagtgattagaaaaaaaaaaaaaaaacaaacccacttaattgtgcaagatctgatcgaatcacatcatagggtctattaagaccaaacaaatgggcccttaagggataagatgccttcagtatcatttctaataataacaatattatcaacatacactactaac

SEQ ID NO: 11397 - DNA, 821 bp, Cannabis sativa
gccctactctgggaagttattcttcgctgaccaaccctatgctcggtagggcctagccgcccgctcttccttaattggctggtgtcgtatgtgcattgataggggttgatcacaccacttactagagttaggtggatctaagtatctgaagtgattggtctcacttctcaagctgtattcgtcttgagtgtttgaactcgttctcggacctaggctattaaagattatcctttgggttactcactcttggatcttctaggatgagagttcaccttttggctggatagaggtgcaccactaaggggctggccagccaaaggttggctaattgggggtgttgttgtgccacagatccctggctggcccccagactattggttgctaggatctggctgttctagtcagtagatcttcgtggcaagacttgtcctcctttgggcagaggaaggtctatcctggctccagaggaacctggttggatagtttatctgcaaaccctccccgatctaccaattagtctccctgtaagaggatctctaatgagatcttgacctcgtctggcagttcttttattaaactgccttatcaggtcactagcttctctgttatagcagtctagtttcaccggatgagatcgaaggatgtactcttggtcatccatccatctcaaaaatttgctgtctggtatgcaaatgctgcttagtttctgcacctccaacaacgagacagaacacaaagctatgctagcaggcttaaaattggctaaggaagtgggagtccatcaaacagaagtgcatagtgattcctagctggtggtaaat

SEQ ID NO: 11398 - DNA, 705 bp, Cannabis sativa
taaagtcttgagtgagagatagatgtgcgaactatttattcacgtattgaagagaaaaccatttcgtaaatgacatatgattgcaaggacgacatcattaatacaaagcgaggcaccaacctcgctacgtattaagaaaacaaagtgaaatatttaactattagaacacttagcatataatgtacattatacaaactaagcataacagttgaatgaacttggacggaaaatagcgaggcatccatctcgctataagaagacatactctgggtaccttcactaatcagcttcagaaatttttcaatgagattcactactccatctagtcagctctctcagatagaagctgatattcaaatgatgttgaatactgaagttcaccttgtcaccaagaactgcgattgtcaggcggagtgttatgtcttcaatcgtagaaatgacggatttacattatcaacctcagaaagacatgtgaaaagctctagctcactactaaggttattgttgctatgttcccagcgagatgtcccagaacgatatgctttacaacatatttaatacgcgtatgtattggcccggtaaaagcggaccaatcacaactgtgtgattttcaaataataatcgcatttattttacatgggacgtaatcgaatcccaaaaatttagggtattattgttgtcagatatcagtctaatttgtaatta

SEQ ID NO: 11399 - DNA, 669 bp, Cannabis sativa
aatttttggcggtaataatactaacaatcaagtatttattataacttaggtattattaccgtaaaaaattaaacttaggtatttatttacaactggaagttaaacttaagtacttatgccgcaaattactctttaataaattatatagagaaccgctgactaattataaggctttatatcagtgtagtgttgagtattctcatttaaaaatagtagcaataataatagaaatctaagtatataaaaaaaatattaatcatttgatactttataaagtaatgtgttgtataaatatctaagtttaactctcagctgtaaataaatacttaagtttaatttttttgcgctaatgatactttagttatacttctgaaactctctaggtacctggttgttaaatattaattaaattttcacgtggcaattcttgattggtccaggtcttaaatttttaattattttttaaaaataatttatatataacaataagaaaataacacatgaataataactttgacatttaataaataggtactagggagatttaaaaatataacttataactattattaaagtaaaaaattaaagtatttatttgtaattggttattaaacttacgtattgaagtatgcagtatttaagacgtaaattaatctaatttataatata

SEQ ID NO: 11400 - DNA, 865 bp, Cannabis sativa
  modified_base (286)..(295): a, c, t, g, unknown or other
ttccttttttctattttatactctcagattaatttctgtcagatcagggagatacttgatcctacgaacataatttgaaatagaagtggaaaggatggtcatttaatgatgatgtacctcgaaaccaaaaactgccaaaatcagaggacatgcattttttcaaaggggattatgacaaatataccctttgtaatcattaaaagcactttttattaaaaagaattttttaaggggcaattgttatacccgaaatacagttatcatttcagaggaggacacgtgtcannnnnnnnnnaatacgaatcaacaaatgtaatgataattatatttgaaaatgaaataactcattaaatgaaaaattgacagagtacatttacaacttgatgaccgtaaagtcttacgcaaggtaaagatatacaaactattgccttgtgcattaatgagaaaccatacatcttcagatgtacatggcgaggcatcaacctcgctacacattaagagacaagacacaatgattggtaagacacttagtgtataatacacattatacaaactaagtataacagtcgagtaaatccaaacaactaatagcaaggcacccatctcgctataggaaggcacgctcatgatatcttcactaatcagcttttaacacctttcagtggggttattagccatctctcaatagaagctgacatacaaatgatatcggctgctgaggttcactttgtcaccaagaactgcaatttttagatggagcattatgtcttcaagtgcaagaatgacgaggcttatattatcaacctcagaaagacatgagaaaagctcctgcttgctaacaagttattgttgctatgttcccagc

SEQ ID NO: 11401 - DNA, 650 bp, Cannabis sativa
tgtgttgcaatcttgtaacattccttataataaaacttcacatagtgtttgtgaagcctgttgtttaggcaagatacacaaactgccttttcccaaattttccaatacagtttattctcagccattgcagcttgttgtatccgacctatggggcccttcacacacactatcacataatggttacaaatattacatgagttttgtagatgcttttagtagattcacttggatttacttgctgaaaaccaagtctgacctttctcaattttaaaactgaagtagaattacaattgggaaagaaaatcaaagtgtttcaatctgattggggtggagaatataggagtttttctgaacctcttagacaagcaggtatcattcataggcatccttgcccaactactcatgaacaaaatggattagttgaaagaaaacataggcaaattgttgaacatggcttatgcctacttgcacaagcctctatgccactaaagttttgggatgaggcttttaggtgtgctgtctatttgcataacaggttaccaacccctgtgcttcatcaattatccccaattgaaattctgttcaacactaaaccggtttacactaatctaaaagtgtttggatgtctatgttaccctaatattaggcct

SEQ ID NO: 11402 - DNA, 840 bp, Cannabis sativa
aaattctttacctcaaacacttcatgcttcttgaattaagatacattggatgatggtgactgattgtgagagtaaagagtgtcatagatttgacaaagagtgtaatagtgaggttaaagacgacttgagaattttgaacgcatagtttggtggacgggttgtttgactaaaatatatactgatttctattacgcttagttttatgaataataataataataataaaataataattaaattattaaagaaattaatatctaactttaaaatttaaattgtaagctttcaatcctgtaattttaggattagttttgacctagaaaaattttgaattttgatatatatatatatatatatttcaacaaaatttatatatttttcaattatctttctaatgccactagaatcaccttaatcagaattatataactccagatatgatcattttagtaaaataattcaaatcctatgaatttatctacttacgaatttcttaacattaatttcttaataccacttatacaattgattaaacccattaaataaattataaaactctaatatcttcatattatgctttaattaaatgattacctaccttgtaaaagataccataatattttatttttcgtagttaatacaattttaactatttttaaaaaattgctacaattactctaaacaataatttcaactcactaacaacataaatcaagaaaaaaattaaatactatcttaatctgaatattacaatgagctaaaaagagaattgccaagccttgaaattgtaataatatttgctcttgctttcatatcttagataatgcccattgttggtgt

SEQ ID NO: 11403 - DNA, 792 bp, Cannabis sativa
ggccccatcagacatttatccaattgggccttaaaaattacccaaaattaccccaaccagaccccaattggacccatcagaaacatattggacttcaatccaatcggtcctaaaaaatccaaaaaactatattttggataacacaatcggaccccccatcgtacccgtcggacacccatcagactcgacccaaaaaaccaaaacaaacaaaatttttattgggttcccatcggaccccatcgggccttcacccctatcagctattattacaagacatcggtccccccatcggaccagcatcggaccccatcgggccaaataaaaaaaaatacagaaaccaggaaaattgaagtattcacaggcagcaaacattttaacacaaaaaacagtaaaataacagcaacaattcatagatcaagcatcaaaataacattctaaactaaatataacaacaacagacaagattacacaaataaaaaaaaagtacccattgcttgcatatgtgtggtccgtgtatgatgctccctcaaaattttaaagacaataggtagaatagcttgtagtgaagtagattatagtgtaatgaagttaataaaatgagtggagaatgtgtgaggagaaaaaaaaattgggtgggcagtaggaactcggcagtgaagaagagagaagaagagagatgggagggggtaatggaaatggggagtagaattgggttttaggaagagttattccattttacaaattagatatactatgaaattaggtggccaattttaggttttattaagtata

SEQ ID NO: 11404 - DNA, 537 bp, Cannabis sativa
atatttatttgactatgcaattacactataacagtataattggaggtaattaagggattttaattatattctccaccaattttcttagtcccatgagaattgaatgtaattacattgtataattactaaaaactttccgtattaaacattagctactaaaaaatattattttcccatataattagtaactattttgccaaacaagatattagaaattcatatgtaattaccacttcatatccaaacacactttatattttaaaatatagtataattattaaactgtgtaattaccaccctaataattacacagtaacttccaaacacacttttaacatatgtcaaaatatatatatttggaaagaaatactatatttgggaataatattgattttgatttgatttttttttttttttttgaataatgatttgatattgttttgagaatatttttttattattattcatgtattataagtttattaaaagtaaaaaaaaaataccaaaaaaaagaataattactttaaaaaaaaaaat

SEQ ID NO: 11405 - DNA, 680 bp, Cannabis sativa
  modified_base (446)..(463): a, c, t, g, unknown or other
aaaataaatttgaaaaatgtactgcattttatcatataatttaaataaagtatagcaaagagagaaagaacaaatcagaagtaaattttaaaccatgaaaatttacactaaatactaactttttttttttcaaactttacatttatacttcgacaatgaaatttttacatttatattttccataattttttttggctaattatgatttttgtccctgaactttaacttgtaccaaatcatgctcctgaacttttaaggttgttaaaaatctcgcctgaactattgagattattagattaaaggactttttctaacatggatgaaagttcaggggatatgatttggtatatgtcaaagttcgagagatatgatttggtagatatcaaagtttggggagtatgatttagtacataaacaattgctgaattagtaaaattgaatgaaannnnnnnnnnnnnnnnnnatctaataatctcaatagttcaagtaaatttttaaccgctagaaaagttcaagggacatgatttggtatatgtcaaagtttagggagcaaaaagtctaattagcctttatcttttctttcactattttttacttattaaagcttcatttttttcttctcttttttttttatgtttttttagtcaagcaaaaactctttttcctctctctctctctct

SEQ ID NO: 11406 - DNA, 760 bp, Cannabis sativa
gaatatttttctttttaaaatgacttgtataattaaataatttcatattatactgttttaaatttttgttaatgttcagatttaaatgtgggtgtgttttttctagttttttaaaaattacaatactgtgggtttaggtgtgtttacctctattgtttctttctgctataaatattgttgttcgttcttgatttgttgttgaattagtaattttttctcttcaccggattttatggttttttcttggtgtttctatgattccagtgttgatttgtccgtccccaaccacgaaggaggtgccgtttgtgctttgttactgttcaaagaacaaaagtaaatatattgggcctggacagtatgaaagaaaaaaaaaagagcctggacagtaaaaaagaaattatttccatgtggcagtattattgtaaaatttaaggaaaaatttttgtaagtttccctaaaaatattaggttcaataattaagaactcatgactaccaaaacttattttatgttcatagatatcacttttatttataatatatgttgtaactaactaaaatgcatatatatatattttttttaatttttttttcagggggccactgccccacctcgcctctatgtgggtccgcccctggttatggtgttggtgtttcagtccatctatattaacagtaaataaggaaatattaagtcataatactcaaattggattgtgattatattaattatttcacttgggaaatttgttaaaatatact

SEQ ID NO: 11407 - DNA, 656 bp, Cannabis sativa
attgtaattaaattttatattaaatttattacgtaaaatgcttatttagttaatgaaaatctgcattaacaaaagttttgccacaaaaataaaataaaagagttaaatgcatatattcaaaacgtaaaaagatttcaccgttaataaccctaaaaactattttctgttcacctcatctcatttaatgacaaggaagtaatatagtattattagcaattgttagagaatctcacattaataatgtgttgaaactaaataccatatataagatgcatagttacttttctcattgttaattggttttgagatgaaacctcatgtatcttatcatacactcacttattctactaccttaattatacaacttctgcattctaatagcaatcgactcattcaacaaaaaaaaataaattagtaaatgaaaaaatgttcaattatatattgttttcctattttatgtaatgaacattttttgtaaaaagaaaaaagaaaaggtaaataatatttgtgtgcatttacgctgtcattacaatatttttacggagaaaagtataatttaattaaagagtgacgtacgtaatttttttaccccattacaaaaatgttttctttggtgttttggtcaataactagaactgatcacgtgctcttttttt

SEQ ID NO: 11408 - DNA, 577 bp, Cannabis sativa
  modified_base (142)..(142): a, c, t, g, unknown or other
acaaatatctcataatttactccaacaaacataaaccatcacttaaattaataatttatattcaactatcccatatatttaggcaacactataatttaaaacaaaaactagctttcaaccacaataataataataataatantaataataataataattgtgataaaacaacacaacaatgatcataataataataataaagtacttgacacgtattaataaaagaaaccaatttctatacatcaaccatccttattttatctttactaatttttaatctaaattgaaaataacaacgatcataatttggtcaacaataaaaattcaaatattatctttcttttcttaaattactcacaatataatccacaaaacaatctataaattctttcaattattagtactttaataatatccaatacttgaatggactcttttataaggcctacctaaatgagttactccactcgtaagaataccagtttaattattttttttttattttgacaactaatacaattttatttttccttagataagtagccaccaaaattctaataattatccctactcacca

SEQ ID NO: 11409 - DNA, 1292 bp, Cannabis sativa
attagttagagctgcacatgttttgcacgtgcgttaattaaaatgttattttaatataaatatgttagaattttgaaataacataataattttatgaaaaattcagtaggaagaaatagaataattcacttaaaatttacatgaaattaataaatttaataataattaaattagcattttatttttcataaactatagaaaataataatatgtgcttaacaatttataatttttatttcacaatattacaatcaacaaaatcttgcaaatggaacaaagttaaaattatagatagtagggatcaatattgagtaacatacaataagtgtacatcttagtgattaaaatatatttttgagtagtatatatgtccattaaggaaaatatcatagctattaatttttagaaagtttttttatttttacacttcaaaataattattatttttttttttacatttttacggaaattcacatatagactcatatagcaaccaatgaagcaatttaaatcgtaaccaaaattcatatagaagcccacatagaaactaccgaagcaacccaaaccgtaaatttgaaagaaaaaaagctaaaaaatagtatatggaataattctccatatactatttttacacttcaatatatattttttttgtatttttatggaaatcgacatagaaacacacataacaactaacagagcaatctaaatcgtaaccaaaatctttatagcaacctatataaaaaccactacagcaaccactggagcaacccaaactgtaaatttaattaaaaaaataaatgatatatggagtaattctcctaatttttatagatattttagaaaatatggatcatgtaattaataaatagaaaataaaatgtgagtaataatttaaaatagggttgggcatctaatccaatcatttttcttttaatctgattcaatctaattaataattaaattttaaaaaattatcatctgatctaatttaatgaaacctcaaaattcaatctaatataattggattagataagtttttaattgaattttgagatgtacatttaataacttatctaatccaattaaatctaacttttcacatttaatctaattataattagatatctaacctactttaaagtgttagaagttcaaattaatattgccaaaaccaatatttacttataattcttaaaaatatatatatatatatataaaaaattcatatttatttaaaaattgtgtaattaacaaattaactcattcaattttagtcgtatatgaatttt

SEQ ID NO: 11410 - DNA, 615 bp, Cannabis sativa
actggttggtttgaccgatcacctagccagaaccattaaccagggtggagttattaggtataacctctcctgacgaattactagacaaggtctggccgcctaccactaggcccacaggtggaacttgtcagtggggattggacgctgaccattcagagtatgagaggtgttcccagctggatctttatctgactcgcccagcgggataatggttgcaggttactgattggtagcctgattggctcttcatattagcacggtggcctgtcttgttcagtcgtcaatggctctgtatgttgagccctcaacgtttccacctcttcatccctccattcagcgaacatatgcctttgctcttcaaatgcaaggttcaccgccacacggagctcctcctggtcatgatgcaaggtattactatgaccttgcatgagtccaagagcagcacggaggttctagatctcggtgtcatctcccacggttgttcgaacatttattactggcgaaactctagtattgggaataccctgactcgctgctgaactggtatttccagtctcttgcacactaggtgcgatttcactcaaagcagttgtcacaccctaacctacggttggc

SEQ ID NO: 11411 - DNA, 955 bp, Cannabis sativa
  modified_base (839)..(840): a, c, t, g, unknown or other
ttgtggattgcttttacaggtttgacaaaagttttactggggttcaatccaacacttctgctgtaaagaccgtgtttaactttaatttagaaattaacagataattaggatttaattatgaaacctgtatattagttatgaattatcattttacggagatatatttaaattcagaatgcatattatatgttatgtgtagaatttcatattttcgcatattttgtgctcgacaatattggaacgggatgtttggctattacaatcacatcctagtattttaagtatagcgggaccatatagttagatattgggaaagttgggaatagtcgagatttaagaattgactaaaatacccctaagtgaaatctatgacttttagtgtgggcaagggcaaaatagtctttttaccctatatttgttttgtcctttagtgggatttgagttgatttatcattctgattttatgttttattaagttgagattaattgattaaaatcatttttaatttcatttattttacaaaaaataaaaattagacaaaaaaacacatctctctctctctctctcaccctcctagaaccagctagggttctggttttcttcagtgattcttgtgccttataaaatttttttagtgatctcaaaccaaggtaaagttccttacacttctccttgtgatttcttgagtttgaagttaagaaagtttgcatgttttgtgagttttgctactgttgtggctgttgatgtttgaataatgtttctaaagttaaattatggttagatatgttgatttgtgctggttttgtgggctgttattaggtttgagcaagctttgagnnttagaactcaagcttggctctttaatggtaatttttgcttctgagcttgggtacttgtttattgcttggtttttgtctattggggtacaatatgcaggcctggaaggttttgtaa

SEQ ID NO: 11412 - DNA, 1159 bp, Cannabis sativa
ttcggctccgagccaattcacatataattccaaaaatagcaagaataataccatattcactatttatcataaaatttatataattcatccatttgtgatctaaaaatcacataaaataaaatttggatacatacaaaaaagtagtatgttacattgttggtaaccaaaatatttattttggaatacctagtagaaaaaaaaatcaggatccgagattttttccaatttaatggattcttgtataaattaagtttgaaccagatatatatagaacacttcaatgaatattatgcattgatgtttactaaaaaaactttacatataattattaatttaaaaaatatcaaaccattcgattttgatccaaaacaaataataaaagtaaatttaaatttttacacttaatttacataattaaaaaaaaatccaaaaatataattttttatacaataccaaaaatatagttatatacaaaatatttaagtcaaacacaatttttttatctttttttttgccgataaacatttttccattttttttttcagccgatggaaaaacccgagccatataatgtaaaaataagagatttttctaattaaatagaaaaattaagcaggcaaactcaaattttcgtaatactacatgttatctgcgtttccagattaatgacatgtgcacttccaaggcccaatattagccaagacgagaccattttgaagaccaatcaagttaataaaccaacccacaagcggagttaggctacgactttggatttggatataattcaagcttacagacgcacgagggaaaaccactttggtttggaaaataatgtttggccaagaagacaaaagatccattgggacaaatccaacatggctagctgcgcacaaaacttgacatcacaaaatgttccccactcgtacgaatgatcgttatctaatgaattggtcctcacctaattggtccaaagtcaaactcaaactttttttatttgtcgaaaaagaaattcttatttttttcagccgatggaaaaacgtaccttagctcatagtaagtacgaaaaaactttttaattaaagaaaaattaaacataaaaactcaaatttttctaataatactcttttataggtaatactcaaatatatatacatataaa

SEQ ID NO: 11413 - DNA, 514 bp, Cannabis sativa
cggtcctaaagaatctgtggtaagccctaacatgtgaagttcatcgccatggacgagctcgaccaaccgtactataagcggataaagtttacttataattttgcttgttgctaatgcacatttacgtatttagagttctcttgtattgatctcttaccgcaataactccttttcattataagttatttatgtgtatggttcaggaagttcagaatgcctcctcgaagatcaatcagagtaggtcatggtcgaggtaggggaagagctgcagtaaatgcagcatagccttaaccaccacaaggatgggaggaacgttttgcgagaatggaagagatcattcaaaggcaaaatgcagagatcaatcaatttaggcagcatgctgggccacctgcaaggccagaagcacctgttgataggcagccacctgccattgtaaggctaccagttgcggagaatcatatggagcccttgtttgaaaggttccgaaagcaacatccaccagttttcgaaggca

SEQ ID NO: 11414 - DNA, 663 bp, Cannabis sativa
tttgttgacattatacctctaattctatactttacatcttgcttaattctttttgttaaaattgttactgtgaaaactttctgattccataatacttcattttggcagttccacaaatgatacaccatgactgctaccaaagtccccataacatgcttcctgaatttggctactttaagtcgagtaatccatcacagtaatctcaataatgaggatgctgatgtgttccatcctagccaatattgttcaaacaatccttactcagatggcatgcaaaaaacaaatgatctctgattttcttatgcattccatacaacaaacatatatcatctgttactacattggatatgaataatctcactttcacttgtagtctatctagtaccgaaaaccataaaataaattgatgctttggtattgttgttgtattccatacatctctataccagaagactttttactattttaagtataatctctggtatcctttgctgcttttgtaatgcccttttgtgaaatcttgagccaagttttgatctttaacgctttccttcaccttaaccacttgtcgccaataccaactgcttgtgcccaatgccacataggcccactagtgttcattaccaagatagacagcatgtacccattgaacccataatgtat

SEQ ID NO: 11415 - DNA, 949 bp, Cannabis sativa
ttatagagaaaaattgagcacaaagtttgtattttttcgtgtagaatatagagaaaattacttgaaaatacgtattttttaaattatttatggaaatgtgctttactttattaatatgaaagaataccgagtattttataatcattcttatgttacgtttacctaaataaaaattttatcattttttttttgtatgaagtgacacaactgataacacgtcagtttttttttcctgattgagaaattttttgtcaggttgtttttcactagcttttatcatactatttgtttttgtttttattattcttttaatatttttaagagattttgttattgttatgttaatgtgatgtaggttttatttaattatttatgagattttcttattgttattgttattttttttcacttttataactctaaagtgaatatttttgtatttgagaagtaatataaaataggtaatcaattaatttctaatatattttgtaggttttggtaatccaaataaagaatcaagttgtctaaattcagttccaagtttgttggagaagttagttatttctgttatgttcacagtcctcattgttcgggtagttaggttagttagttggtttgtttgtcatcttgtaagcctatatataaaggcatgtgagctcattaagagagttaaagaaaatcagagagagtaagcgctgtttggagagtgaagaaacagagtgaaaattctagagtaaggcattgtccaagtcgagtttcttggagtgtctaagtgagagaatcgggattttctcctgtgtaactttgaggctgtgtatcatacatgttatgattgtaactttgatcttgatatgaatgagatgaatacaaaaaggggtagcaggaagtaggcattgattttggccgaacctaaataaaacttctatccttaattttctgcatttagttt

SEQ ID NO: 11416 - DNA, 644 bp, Cannabis sativa
tatatatatatatatacatgacatgtctatgataagtaccttacttttgtcgttatagtaggaacatttttggagtcatagatatttaatctaagggtcatgaattgatgagtccatataaatagttaatacttgcaatgtattagattattcctaaaattatattttaaataatattcttaaattaaataataattattttaataaatatttaattatttttaacctcctccaactaattaatatcttttttctctctctctcattagaaacctcctccaattgtttattgatcatcatcaccatccaccaaaagcttctcttctcaatctcttcgtctccatcttgcgaccgaagaatgatggagatgattttgaatgattgactgtggaagaaggtaaaggttaaaggtaaggtttctcttctcaatctctttgtctccatctcttcttttctcaatctaatggaaagagaccatcatcgccagttgcatcactcagactgttttggaaagagagaccagaactctcacaacgatatttactttctggagaacaatttgccatgttggtttcattttcatagattgaatattcatcttcttgaacctgatcttccttagagtctgatgagtttccataatg

SEQ ID NO: 11417 - DNA, 823 bp, Cannabis sativa
aaccattttatttattattattataaaataggatttttattactcaaattatgacattgtaaagttttgtgctcagatagacaaattctccgaattatagtaattattgcaaatatgttctataggtttgtatttcgttcatttttcaaaataatctattgattatgagaatttatacttataacatcactatctatacaagtattttttgcataaaaaggggagaaaaactaaatgacaaaattcctaattatatatttaagggagaaaatagaaaattagtgcccttgaaatttactatacaccaaaaagggtttctaaaaagcatagaaagggattcaactgaccgttcgagaatgcatagatttcaaagcaattcatctctgtatatttcgttatgttcagctgattttacatttataaacaaataaacaagtcagtatatattatatgtaaatataaagattgtgactttatgagtgacactgcaataatcttatataaactatagtgtgaacacaaatagtgtgacataatatgtatgtagggctttataatatataagaattaaggtctatatatatatatatggatcccaactccccagatcatggtgtcatcatcttcttctcttaaagccataaataatgaattgaattggtacggacacagtaagacctttgaaccctgagacagtcagaggattgcacagagatcatcattcatcacatgcaaagtgtatagtatatatattattacacttatccatctatatatcgttttgtatatatgtagaacaatttgcacttgtttatatctctta

SEQ ID NO: 11418 - DNA, 579 bp, Cannabis sativa
atttggtcgcttttttcacatattggctctcgaacaattttaggtcgagatgttgagaccaatcaccatcttctagaggtgactttagctcctaagcaagacactatttcctagatacgcattctctatggcacgcaaaggaaaggcattttagtttggagaaatgctaaagggtaccagtggtgcctagcaccctcctacgtgtcaatatcgttattggtccaactaagtatcggatatcatataatttaatataatagtttttaggaaatatcgctagtcaatcgcaacgcgacatgttgagaaggtgctaggcaccactggtgcccaataagtttgtcccatttgtacaacagacaaacgagttctcaataaggtcatcagcaatggaagctacatgtttagttgctaagatgggcccactttttatctttaatttattttacttaatagctaaaaaatagagatggcaacgcagccctacaaattttaaatttatgttgaaaaatcatcatttttatatatacagggacctaatatctaacaagcagaccattatcgtcaaaaaaaaaaaaaaaa

SEQ ID NO: 11419 - DNA, 621 bp, Cannabis sativa
  modified_base (535)..(537): a, c, t, g, unknown or other
aagtagaatttaatctaattttttcaatatcaatatttaatcgattttccagcagcgacgctaaaaacttgttaagaaaattatgagcagtttcggaagtatacgtaatcttttgtagttttaaactcacacaggtgaagtcgattcacatgaaattgttatcgaataccactaaattaatttgtgtttctatttggaaaataaattaaaaagattgaagaattaactgactagaaattaaaatgcaaggaaataataatgaagagtgcaattaattatggatgagtgtttaggaatacgaatcctgttagttcagtttctcaatcattaatgttaattattaattctctcccttttggtgatgacaaattatcaatttaaccctaattcttttcaaatcattaaggtcctaaatcatatatcatctactcacatctctgcagtaaattaacctataacttgcattaaaatccaaatctaaaaaatcacataagctatgtaaatactctcgttttacatcaacttatgtttgtcnnnttagagcattcctaatattcacttatcagatttcatattaggatcataagttacatttatgatggccagtttaaaatatgtaat

SEQ ID NO: 11420 - DNA, 549 bp, Cannabis sativa
cactaacaatgttaatatcattaactaacaatgcacccatttttttgtaattgagcattattccattaatcaagaacaactctaactcaccgaaccacctccatatagcaaaactacaggttctactctttctcaaaacataatttctgaccgaccatagcttccagcttaccgtggctgcttccatcatttcctgattagttttaaatcacagtagtaataaattatttagggatacaatgcttatgatgaaaaaaagtgggctggccacgtaaaggtttttctagtgaaaaatcttctatttctagcattgtctcaaatatttaagctcattatttccataatgttcctagatattatttcccttgtttctatcagattttttttaagtcacttttttcacatgtaatcagtcttattttacttttacaaagtttataggtattaaataaacttgtttacccatttcaaaattaatttattctctaaatttgactttggagttagattgtaaacttatttggaatcgtcttacttttgtgtgtggtg

SEQ ID NO: 11421 - DNA, 692 bp, Cannabis sativa
tcatgagcatgagcatgtctttatgttgattattgtttttaatagcacgctcattgtgaaaattactaacaattagttctcaaagacaaccaaggagccaactctcttgctctaagtcctattttccatgcccggatgaagcacataaagatcgatcttgattttgtgcatgattaagtcctgccaactcttgggacatccgttatgtgccatccaatctccaaatagcagacttacttgccaagcttcttgctatctctcaatgcaactctctagtttccaaatatttttagggggaatgttaatgatacacgagaggcttccccaactagttgagagttagtttattagttacgtaaagctgtcattacagctgaataacaattcttgtaactattatgtctaacttctttcatctcagtctaaataaataaagtcaccactgataaggtagagcttattactattcattcaattcattgtgttctttctagctcaccattgtttctcaagagctcactttttctttgttctgctttaactatctacttataaaattccatgatcataaagttgcaaacaaaacattcgaatcttatgccactgaatcctgcactagttgccaaggctaaaaactcttttttgctgcgctcttttcctcctggacattgagtcatcataagcacatccat

SEQ ID NO: 11422 - DNA, 1229 bp, Cannabis sativa
  modified_base (702)..(716): a, c, t, g, unknown or other
cgaacccagactcaagacccaaactcgactcggacgtgggcttgggactcgggatctgggacccaagaacgggacctagactaagactctggacctcggacccagacccgaacccaatcttgggacctgagacttagacccaggctcaaacccaagacccagattcagactcgggaccctgacccatatccagacctagacccggactcagaactggacccagactcgagacccgacccatagtcagtgtttaggtcaagtttgttgaaaatatattataactttatacaatctattaatataattcaataccaaacatgatattgtattaactaatactaatacaatacaatataatacgacgtaccaaacgagcccttaattctattattacaactccactataaatatagaattgcactctttgacaatataaaattatactcgtagtctatttatataatcaatataagtagttcaccatccaattattagttcataattagagttgttcaaattacagtttttccttttaaatatgtcttgaattccttatgtatcattaattcaatgtaaacaattaatctataattcaattatagatttggatccaactgttagcactctaagaattaacactataagggaagtaatattcaatcctctcggaaagcttagattctattattgtataacatgttnnnnnnnnnnnnnnntattaagttcctaaaatagaaattttgaaaattatcttgtctaagaaatttaacgagtgaatcaaataactcaataaacacaaacacgagttcatgtatactaagaatttagactgatccaactaataatcatcgttgtgatatgaataaatcttctatgataaacggcatgttgatgaaagattttatttcatatcggtccaatcatgtataatcaaattatacactacctttactaaatatctatcaacatatgtgatccgaattaaaatcacacacacatatactagaatatagtggttagtaaactgtacttggtaatttcatattaaagattccatactttaatactttaaaaaaactataccatatactataggcaacagttttaaatcgtcgcatatagtataggccacggtttaaaatcgtcgcctatagtgttataggccacggtttttaaccgtcggcaattagctcaaatctaaaaaattttaaataatatgttttctctcg

SEQ ID NO: 11423 - DNA, 568 bp, Cannabis sativa
taaaagagcaaaaatccatcccttcatttgacttagatttgtacagtaacttctaaatcttccaatggattttagaacctgtctctgctgttccccaccataaattagccatcatcgattcccaattggttacaagtggttattgggattcgaaaatagctcataacaaaagtaggaattgattgcacaactgctttgagcacatgcactaagtacttttcccatactagtgttggtagggctgaaccgtaccccgagtactactgagtgttgtaccacatgcactaagtacttgtcccatactagtattggcagagctaaataataccccgagtactactgagtgttgtaccacatgcactacgtactttgtcccgtactagtgttggtaacactagatcgtagcctttgaacatcatatactctgagtttgtggtggtttgaggacgagattaaggaatttttaaataccctctcgatgaggacgttgacttcatttggtgggggagggtttgttacaccccagtgaaccaagatgactcactgaactgttggattttatgcccta

SEQ ID NO: 11424 - DNA, 1068 bp, Cannabis sativa
cgcttgggaaccgtgtacgccgcccttttggaccatcaaggagcgcaagcttggatttctatctgcaccaaaacccagatggggtttcgctcttggactggagacgacgtctcagggtagccgctggtgcctctaagggcctcgagtacttgcacgaaagggtggcaatgagagagagaacgagaagaggagaaagaattcgttagggaattagcatagaagaagaagaagaagagggcgtgggaattgggaaattttggttttttttttttaattttttttttttaaaattgtttttttaatttttaattttttaatttttaaagaaaaattaatttttttattttttttaaataattattttttttatttttttaaattcttatttacgtggaccaataaaattgtgccatgtgtacacagtgtacacgtaaacattctaccatagcagttaacagctaaaaatggatggaaatgttaaacagctaatagaacacgagtttaggaggttttaccaccaaaattttagaattggagtttagttgtaaaaacttggccacttaaagagattatgccgcaaattactcaattatatatatatttatatatatgtatggatgatttcttaatgggtattaaaaaattgatgaagtggcaatttggtcacttgctatagcaggttaccaagaagtttttttttaaaaaaaaaattatatttttttcaattatagaatgatgattcttagaaattatatttagaaattaattttttttttttctaaatccttatattatccttacattaaatatttaaatgtattagatgagggttattagtggtattaatttattatgttgttctttgtttcaccattgaagacattgagattggtatgaagaagacactagttttctacgtaggaaattaaatcaaacttttttaaccttttatttaactaattaattgggtctttgtgttgtgttgggttttatgcatattcacaatgtagacactctagtatcatacacgaatgatcaatgggatgaagcagagaataacaagacaaa

SEQ ID NO: 11425 - DNA, 992 bp, Cannabis sativa
tgtatagcaaatttattgagaatgatagtggctactacatggaaaatacaatgatgacattgattttgaatatagtgatgactagaggtaaaatgcggtaatgacaacggttttaaaatcataaaaaaaaaattgtagagatttatcaattattttttatcttttagatatttatttttttgtaagaatttttaaatttctattattaaaaaatattacattttaaacaaaattcaatcgcacataaaatgcagtttgtttcttaattattagttaattataaacataaaaaagaagtagggttggtcttatgcaatgcataacctagtgattccacacttctcaaagaagagatagcaagttggaatacccctcccccaatataaaaagatggagtaaggattgatttacaagacaataaaacataggatctaatatgccaagaagttaaaagaatggggactatgggaacttgagaattacatctcgctagtctcctgatgaccttgacctatgtaaattaggactttacataagtttttataaattgcccaaactgaataatctgcccaaactaagctgacataacttgacgaataatgcaaaccgaataatccgatgaaaatataacccgcccaatctttttattaggagagttgaaaataatatcaaccggtccaatcaacccgaactaacccaattaacccgattaaaaggattttatatatatatatatatgtatatatgttttattatatatatttacattatcatataatttacatacatatttaaaaaaaatataaagttcaaactactatatttttttatggtagttgatttgaattttaaattcaatttatatatatttactttatcacaattaactaaaatataataattgaatgtaaaaaaaataaaacataaattgtcggtttagacgggttaaccaattttattggactggttactaatttctctttttttttttt

SEQ ID NO: 11426 - DNA, 869 bp, Cannabis sativa
tctttttcgcttaatgtcattgtgattatgttggtttgtataaaccattgttgactgtttttgcacagttcagaattatgctcaccaagttaaagttgccaacttttgccaatttagaagagatagctaattttgtttgatcacacattgttggctgttaattgtttgtcctttctatagtaattaataatgtcactcagaaacgtttcccaagatgacaatgtggcttgacaaatatgaggatttttgtagatctttataggctgtggaaagtccttcatagaagactgtagccatattatatatgtttttttgtgatatcaagtggcatggattggtctctttccattgttcattgttttctgctattaatttttaatacttacatgccttcaaatactgttaattctcttctcaaatgttttctcatcttacctttgtaagttagcatattatgggtcttatatcaaaaatttatatcattgttaccagtgaacatcatgacatagctgctcttatagcatattagggtcagttatggtaagttgtaatacaaatggtaacccatcatctcttatatatgcaactcttatgttggttatgctatcttgtcattatggctctgttgattgcttagacataggtggcctgcggctgcgatttttaagtggtagaagtcatttaggttttgtatttctgcttcttccatttttagcattattttgcttttctggaaaatattttctagataccttttattattatagtttaaaacaatttgctatttatgaattctcattttagtgttattctgcatcagttaagaaatagtggtgaataaacatgaaagtaaaattaggaattatgaa

SEQ ID NO: 11427 - DNA, 653 bp, Cannabis sativa
gagagagagagagagagagctccgtgcgactcttttagggtgtaagaaaactgtatcgttcaattttctatctcagctatatcatatataattaccatcaaaagttatatcttcgtattatgtatacatcatatatataaacctttaaattaatccaataaaataaagatatattattatcctttatttgaaattcaaatataattatttatcaagatttttagaaactaaattaagtaagagctaagagattaaatgattgtttaagtaaagtaagacagagatttttacgtgattcaggagttaatgattcttagtccacaagtcaatgtattggccttaagagacttttaatgtattcaaatggatctttacagcttgaagaaccctagttcttgctctagtatttctcctctaggtttctcttaatgaagaagaaagcttagaaaagatcttctaatttctccccctttttcacaaagaaataatggggttcatataggcatagatttgggtctgggcgtacctaggacttgctagggtttatgtgcaaaacgggcccactatttgggtaaatacattaaatacatgaccttgaggcccacgtcagtattctggctcgtagggcaaacctgcctgtacgaaggagagct

SEQ ID NO: 11428 - DNA, 1031 bp, Cannabis sativa
tagagcataaatagtaatttttaaagaagctttaaaacgaagaaagaatttataacatttgatgtaaagaatatttttagttcagttctttaaatatattaaaaaatctctattttaaaacatctaatgtgagtgctcggttgaataacaacagcaattcaagccatgaggaaagcttaagaaatacctggatattgacaatgaggagtggaggtacttttccttctgctttcagatttgggagctcaatgtgttgagcaatatgattaatcttcttaggactaacaaatagatcaacacctattggtgtgtatggacaacaatttgaggcaggagatttcttcttatctctgcaaaagtaaatagatacattagcaaagacattgttataatcctaattcaattataaatctaaaaatcaaacaagtgcattacttaaagaaattttctcctcgaagtttaaatgatgaaggtggaatctctgtccaatatcctgaactaggaggcttgttatctcctttgctacaacatggaataatatgtcctgctctaggatgatacaagtacctttttgattggcctgtatttacatagtcataatttacattagtaatctgatttttccttaaaaaacagaaacaaaataaaatattgttaatacaatgcaccccctaaaaagagtacaccgatgcacttctattggtatttgagagaattttttaatttaatttcttttcatggtcgtttatgttgtaattatttaagatatagtgtaaaattttaagagatttaaaaaaaaaaattaacacgccaaaaataggattcagacaatcttttgcaagcgagactcttttattttataaacaagtgaaataaattatttaaacctcgtgttaaatttttctgaatttctcaaaatgttgcaagatgtcataaatattagactaaaaaaatcctcccaaatgccaaaacagataaggagtgcatcggtggaccattttaggggtggatgcattgtagaatttttcaat

SEQ ID NO: 11429 - DNA, 1350 bp, Cannabis sativa
atatacttttttttttaaagcaatacagatattaggtgcacattaattaggccaaattaatgaaaagtacatacaataatttgatatatttatacgtgtattatgtgttcatacatgtttgattaaattattatccatcaaaactgttttcattttttctttttaccaaaaaatgattaaaaatatgtataattatatgataaatatattgaacaattataattaactataagatgttcatctaattaaatttatactattagtaaatctaatcaggccacaatgtcaattttagatttttttcaagtgcacatatttatattatgttcaaaaaaaaaaaaattgcaaatatttatatactttacagattgagttgaattaaaattatataacagttaaaaatgaggtccaaatgaaatctaaatttacaaacttttattattattttttttgttgaatatatgaatacatttttttttttatctgagctgaatatatataaatattaatttgatatattatgcatttgatacatcaatttttatgccaatgaaattatttattgtatgtatctttattactaggagtgaaaattaggagcattaaattcatgatagtgatatatcaatataaatatataatatatacatactaggcaaatattagatagattatagtacttaattatatgtttagacttttttattagattatatgttttaatcttcgaaaattaaaataaaaatattatgtataatttaattaaataaataaaataattttagtagaataatatttattttaaagctctataaaggaaaatatagtagtatatttttaaaaataaatacatatgcttaaagtttttaaaataatttatctcaaaaaaaaaaaaacaataatgatgatattttgaataataataatatattaatttttataatagaattcatgatgtgattgtaaaataaggcaactaaaaatgattgtgatgataatgaggcaagatttttctaaaaaaaaataaaataataataataataataaaaagttgttattaaaacaaaaataaaactaatgatcataaataaaaaaaaaattgttaaaatttgaatacagtcaacaaaaaaattacatgacaatctaaaatataatatagctaaaaatgtatatgcatagaattgaaaaaaaaacaatgttaattaaacaaagaaaaactaaaacttatattcaattaagttagcagaaaaatagaaaattaaacttaaataaaaaaattgttaaaaatatctaccatatttcatgtattttttattatgtcttaacagtttgtttttgttacttcttaac

SEQ ID NO: 11430 - DNA, 662 bp, Cannabis sativa
agcgactcgaggatagttattaattcccttatcgggaaggagtcccaccgggcaattgaaaactatgtctcattttgtaataattattctcctttatttagtagttgtattttctctaatattagtaaaacttgtaagtttatcgcttataatgtggcaaagtgggctttttcccaaaataagtttggtttgatttcgtcatctaccattattatgaatattttatgtaatgaccaagatgtctaattattatctaattatatatcaatcacgcttttcttaaaaaaataaaaaaaaaaataaaaaaaaggaaaagaacttcttgaggtcatccaacaagttaattagcaactagtgcttcatgataccatgccacatatagatttgaaataggctatttattagtatttgcatctcttggcaagatgaatctcttaaactcaaataattaaggttgaactccttaacatccacaattgttttgctttgtactttttgtgtcaattttgatagtgccaaaataaattactactgtgtagtacatatggtgaaattttattagttcacgtaatattaatattaatataaataaattaaaatttttaaaaattagaaaaataaaaaatttctttcttttgcatctctctcactctctctctctc

SEQ ID NO: 11431 - DNA, 524 bp, Cannabis sativa
taatttatgccattatgaagaggtacaacaactatactaaagatgcatgtagtttttagtattccaccaaacttgtttttttcatttttttttcttcttggtgatttgccaacaaatactccattgtttctatgttgattgggtttggcatgtagtgttttaatcaacatatgggaaatataatagcaaattttccatttaatttaatgaaagaagcaccaaatttaggtagagtaccaaaattagttaatgatttggtttggttttacacatcattgagaaaagagatatactattgggtcatggagcacatggatttggttcgggctgccatttacaattcaactgaattttttttttttttttaataaatataaatagcaagatgccttcaaaagatctatggtttttatatatgggtaatttgcaacaacatactctgtgttcaatttttggcaaacatgtttgtactttcttttaatacaattatagatatttgcatttaaaaattgaaacaaattcta

SEQ ID NO: 11432 - DNA, 556 bp, Cannabis sativa
ttcatcgtccaagtccaaggcaaatctgatgaacctcgccactttctctccaccctcataccaatcgcagcaacgggacggtgaacggctccatcaaacactaacctgtaagttttaatctctctattactgataataataaatgatgaaataaaccaactctttctcgggttctctgtttggaaagcgtgacagtgatactcccgtcaccgtaggagaaaatggaggccacgggtggcctcgccgagttctgaaacgcaacacccttgagccacgaagccaccaccgctgttctggctccgtgaagaagctcatcagagctgcgagttcacaactcaatctgcctctttgaagaagctccctgagcagatctaaaatggttgttgaatttctgggtaattttttttgtgttattatttcatttgtctttgtgtaattttttttctgtatttgattaatttgtaaaggttatgtgtaaatttttgtaaactttttttctattttaactttgtgtaaattataaattaaattgttgatatgtatttatttattttat

SEQ ID NO: 11433 - DNA, 501 bp, Cannabis sativa
cttttacaaatagattagaaaagataaaagcttacaaataaaattttaggaaaatattatgtttcgtaatctttttccttcaaaaaattcttgttccaaacaaagccttgcacaagaataattccaatacattttaattaaaatgaaacttatgtagccaacctttaaagcttcatgtctccatctcaagttgtgatttcagcattatgaatagacgcataagataaaatgtggactaactcttgaactttttcaatgtatttgtttattattttcgttcgtagacatttccaagcctacggatgcagctttctatattatggatgtcgaacaatatgtgaaacttctaaaataatatcagtcttaacatttctatagaagattcctttctataagatacagatctgttaaatttttttaggtattcagtgtctaaccctctacttagatgctgtgctacccactgttagaatttactgatcataaatgaattggtaaatg

SEQ ID NO: 11434 - DNA, 645 bp, Cannabis sativa
aggtggcagtttatgttggtattgtatttagatcaagacatttaaatgtgtcaaaaaccttatacacactaacatagacttgtttgtaaccattaaatatgaaaagtgaagccctcgagtaatttgaattgtaacgtgtgacttttacttgttatgattcattatgtaggtgggtaaaaatactggatgaacttttgccacacattacatacagtcatggcaaaaaaatctcattttgtggggtcgagttggggtgagtcgagtcatgtcgtgttttctttaagttgtcatctttcagaaatctgatataggaatttatgtgatagcaaatagacaacatcaagatttacgttttttttttccttttgattgtttctatagattatagaatttcaaaaattgtatattagctaggatatgataaataaaatgaaataatttgtatatatatttgttcatttcagttcatataaaaaactatattgttgttttgtgtaaaaaagaattgtgcaattcgggccggatctaaatacatatacaattgttgcaatatttactagattttatgaagggggggaagagtaatagaataaatgtggtggagcttctcatggaaagagtgccatactgccatggagattaatg

SEQ ID NO: 11435 - DNA, 509 bp, Cannabis sativa
taattaattaagtttagtttcttgcaacagataaatacataagtaaaaattttgattctgttcatgttgaagttattggagttaaggaggtgttgagttggttgaaagaattggggcaacatgatgtgatggtggagtgagacagtttggtcacgatccaagctagtcatccaaagttcgttagatatgatttttatttttgagttttacatttcagagtgcatacagtttttctagtttgaataatatttttttaatttttgttaaacgatctactaatcgtgttatttaccatttaactagagctttataattaaatgctagttgtacatattcaaattatacgattttaagtaatttacgtgataatattttaattttaaatgatttgagttaataaaattacatatttctatttaaaaagaaggatgttattgttttccatattctttaattttattttttaaaaactgtatttttaatctctaatttatatttagtgatttttt

SEQ ID NO: 11436 - DNA, 649 bp, Cannabis sativa
atcgtattgataaaattttatcaattaaattcgagtttaaggaactaaatatttatgactttaaaatataaagtactaagtattattaaagtacactatacaaaatctatatgtggataaaacaaagggtatcaaatgtataaataccctttttttttctaaaaaatatatacaattttaataataaatctacaacttaattaggacatcttaaaaacataatgagaattagaataaaaaaaagcgccaactaatcaactaggattagtagctaatattctttttttaatgatacattcttcataaaactcgcattggttcttcgagatccacaaactactatagtgtcaattctcctactatgataagtatagatatgggatattaacaacttgtgttttttcataagtatcaacattattaatttttataaattgatcccaacagtaaaatttctagtaaacaacttcattggatggaagttggggttagcttatagtgccagcatttttcatcatttaattaggtaaccctttaaaacacaaaaataatatattgatagggaattaattatcacattcctctctatctatatatataaatatatatatccctcccatatacactatacaagtgtaaattcaaaaaa

SEQ ID NO: 11437 - DNA, 508 bp, Cannabis sativa
taaacttttatgaacaaaattgatactttgactcccaaattgatatgctaagtacatgcatatagttttggcaaacacattgaagaaggttttctcttaagtggtaagggatacacgaagtgtttttataccaaggagatttttttgaataattataccaaggagattaagtgctaacaatgtactatttgaagaggaagcataaaaagtaagtggtgttttatggctcttaaatttgacatgtgcaaatgttaaatgtgtgcataaattgatccaattaattacaactgactacaaaatgttagatattcaattattagattagatattatttttgaatatctaattggattggatcagatgttgaatgtagtgtccaaaaatctattacatcaaatatctaatcaaattaatatgtattttcatttaatttgaattactaattaaattttctagtgtggtacttaacatatatacactaagattttctattgttatgaaaactaag

SEQ ID NO: 11438 - DNA, 610 bp, Cannabis sativa
tctcggcggttcgaaccgccgagatagggtactttaggatacaatagtactatagggtacgtattctttgttcatattttggattcaattcaatccgtattgtaactcaaattcaatccgtaaaagtgctgattggataagttattttagattatttactttttaatattaaattatttaatatttattaaaaatatttttttttttcacataactaactacaaaataaaataaattttgttgttttatttctctaataataatatttaatatttcaagaacactctactaatttgaataatatcttttgatttttctcaagcaatccgttaattatattgttcactatattggctagagtttcttaattaaatattaattgtacctattcggatactataataatttcgagcagtttaaatgatgtattttggagtgatttgtgttaatgaaattgcatgaaacactttgtacgtaaagagaatctgtaaaaaaaaaagataattttgattctttcatcttattatcgacttctcctttttagaatctttgttatgtatattgttttgaattgcatataagctctgatttttctacctagaaaattata

SEQ ID NO: 11439 - DNA, 554 bp, Cannabis sativa
ttattattattatttatttttcctaaggaaccaaatagttcgatttaaaaaaaatgtaataaatttagcttaattaaaaataagtaaatgatatagggtgattttacaatgacatctttaaaaggatgtactcatataccctctactttttcggctttaaaaaaaaaaaaatagtttaatttgttttgtatttatgtacattatatttatttaagatattttacaaaattttgagaaatttagaataatttataatatagaaaataatgttcaaacaatctattttacactcatataaaataaaatagtaacacgtgcaacacactgtttgaacatagtttttgacgtgttaaacttttctaaatttcttaaaattttacaggatatcctgataactataatttacatgaccgtaataaaaaatttgactaaaaaattatttcagatactaaaagataaagatatttcaatacatccctttaaagggatgcattatagaattttccaatgatatatttacataatatttgtaataattttccatcgtgtaataa

SEQ ID NO: 11440 - DNA, 879 bp, Cannabis sativa
atattatcacaaaagtgacatgtcgaatcaaatcagtaattaaaatttatgtatttactcatagattcaatataaatatatatgtataaacacatatattttttcttggaaaggaggactcaggtgggctcttgagtcttgtctattttaatttttcattatcaattttaagtaaacaaaaaaaaaaaaaattatcacaaaagtgatatgcccaatcaaatcaacactattaaaaaacttaaaatataataaaattggttaaaataaatgttgaactgccaagttttaacaaaatagcccaaaaaaatttttaataaaaaaatacagtatacagtataataatagggtagtaaaaatgtaattttatgcatataacagtaaaattataaaaaaattgggaaatgagtaaattacactctatactttttttatattgtcctcttttatttttaccatcttttttaaagtttatcatttttacctatttttttaaatattgtaccaattttgtccctgtcacttcaagatactctctatgtgactctcttatgtcggggtattttaagtataatacatatgaaagaggtatgtttaaattaaatataaaattagaggtaaatttaattaattgattaataaaaatgatatttttcaacttacacttacgcatgtaaattccccttattttttccatatatatagggattaccccttaccataaagcccagttttatttcggcccataatgagaaatcaaattaacgggcttggtttctctggcccattggtgaaatcacgttcccaaatttcgcagtctctcctttcagttccaatttcccaactctccattgaagccggagctctctctctctctctctc

SEQ ID NO: 11441 - DNA, 615 bp, Cannabis sativa
ctagagacttcagtaattaaccttaggctacaattttgtgttattgagagtgattcaaaaatcaccatcaatgcttttagaggaatttcacaaagatgggagattgatagctatgttagtaggtgcattttttttttctaaattgttggtgggttgtaattttgttaagattcctcggtattgtaattttgtagcctataacgtggctaattagacgtatgccaacaaactatctagtttgatcgaagtgtcaacaattccaaaaaatattttatgtaatgaccatgaggtctaatttttgtaatttatgaaatgttaattttcaaaagaaaaaaaaaaaaaaaaactaatttggaacttcggtaagtacttaactattaagtatcaaatcagtatccacgtatcattttcttatttggatccttaaattctattttaaataaaaaataaaaatctaacaacttggactaattaaagactgtcttgcaatcattccaaaaatataatttatgtattattaccacaaaaattaaagttaaatattatttgtaaccggaagttaaacttaagtatttacgccgtaaatcactctaatctaaaaatataaagtaaaat

SEQ ID NO: 11442 - DNA, 546 bp, Cannabis sativa
aaaagttaaacattagttttataacttttctttgagccaattcatttccaaacgttctaatacccatttaaataacatataagtgaataatatatcaatttctaacaactagaactagaagatgccctctttgatttcataacctccacatgtaataaatctcttaatatcatatcattaagtatgtttcacgagttgcaaattgctaaaagtggtcatatattttcaagggtgatattttcaagggtagttatgagagaggtatttttggattttagataaagtggtcatatattttcaagggtgatatgcattagtttaaggataaaatattagatatatgtaagtataaaaaatcaaatttcctaatttagtttcttaaagataagaatttatattttgtggggtcttcataataattattagaggcactgtgtatatagctgtggtggtgtgcccccactcataatttttaaaaacacatgtgcattagttcatagttccttacaaagaaaagtcaaagaaaaagttaaaaaagtaggtaaa

SEQ ID NO: 11443 - DNA, 506 bp, Cannabis sativa
taacaaccaattgcaaatcgttcaatacttctatcttttgagctcctacaacttttgatagtcttaacccaaccaatatagcttcgtactctgcctcattgttgaggcagggaacttaaattgcaaagctatttggagcctcaagcctttgagtgacaccatcactatccttgctcccaatccattcttgtttgaagccccatccacatatattttccaagtgaaggaacatattttaggttcatgagaagttgcctcaatttggttgcattccacgataaagcctattagggtttgccctttaattgagatgcaggacatactgtatgtcgaattgactaagctccattgcccatttgagcagtctcccagaagcttctggcatttgtaggacttgtcgtagtggatggttggtcaagagcttagtcaaatgtacttggaaataaggtcgcagctttggagaagctatcaatagacagaaagccaatttctcttttaaagggtac

SEQ ID NO: 11444 - DNA, 646 bp, Cannabis sativa
tttttgtcaccagcctgaagctagtgaatcttagacttttgcttccatagaatttcatgcttataaaggaggcagaccaattaagatggaaggtgggaaatcctcttaagatcctcatgagagataggcaaattagaagtaagatcattgatggacctttctaaagcattgatacggtgagacaggctattaaatgataaatttgataggcattggcatattaaataaaaagggcataagtgtaattgtaataggggtattgctattatatataggactcaatagttaaggaaaatgtgtgtgaaaaatttggttttagtttgtaacttttgggagagaactagactctcgaaattctgagttttgatgaaaggcattctgccatttttatccaaacactactactctttatctattttctgcattgaccaaatcttgataggaaaattcttatcagcattccaacctttaatagctttaatgcagaactactgcttagagaagaatttgccaagatgattatcagaagggtaaggcttattctggacccaagaatccttaacactataagaaaaatgctttagtaagctagtaattttcaaacatgaatctcttagtcctggtaacacgcatactatcatcatct

SEQ ID NO: 11445 - DNA, 1433 bp, Cannabis sativa
aaatttcttggaaaaatatatgattggtctaggatttttgtttgtaagatgtaattgtagcttggaattatttgttatctgtctaatatagcaaaataattgaatattaaataagaatttgtttagattatgaatgtgcaagatgtattgattggtattacataccttttctgttcaatttcttttttttttcctagattttttgttcttcacaacttcttggttatcctctgttcttgtatattcttgttgatagatattctctcttgtcgatattagtgattgcagtgatgcatttagcatttgctagttcgtgcaagctctaaggtctgaatatttttcatcaatggaggtttttgacgaaggagttgctctgcgattagtcgacagagaatcgcaaatagttgtatgatattttttttgttgtttgattatgttctgattgaggtaatgaaccaatggttgctaatttgatgaaggtttaagctcagaagatctcatcaatggaggttatcgattatggtgttttctgcatttggcgatggagatttgcgactgtcgaagaattttttaggtttttttggttcgaatgaactttaaaatgaaacttgaggaatttatatgttctttgtagattgtgaatcacgcgcttgattcctgctttttaggattaccagttgatttagtttgaaggttcccttgaagaagatgatgacgtgtcacgtcattttgtgtttgttttatatttaacgttatttttgttaaaagtttcctaatatagtatattcctaaaaaaatcccaaaacaatatcctataagtttaggaattttcagtaaagtaattcatagaaggaaatcgccaaaacaataaccaccttgtctaattctaaacaaaaataatgtaaagagtgtttcaaaaaaccaacaataaaacaaataaatgacaataagcgaatttatggcaaagattagtggcttacaagttttggagtttttttgaagcgtttgaggtttctaactggtaatcttcggtgacaagagtctggaatataacaagaacgaggataagaaaaaatggtgttggtcacacgaaggaagaaagtcaaggacaagctgggcatgcaaaagcttcgtgagtaaaaagggttttttactgtatggtttatttttcgaatgaggtgaagaagagggcaatgataaaaatccttgctatatataatggaaataggagaactattaatcaggcatcaatttgaatcaaatgactaggattcaatcttgataaagcgaatgaatagttgaaaagtccgtcagttgaaaagacacacaatttaattttctcgagaagataaaattgccaagaaagtactcattgttgaaagagaaaagaccaaaatatctatttttaacttctatataaaaaaaaaaaaaaa

SEQ ID NO: 11446 - DNA, 859 bp, Cannabis sativa
atattaatcaatcaatatatacatatataaaagaaagtatataaaagagtttaggtgacatctttttttgtattattctaattttttttttttatgttgtgacacattctcttatttaattattttttttgaaaaatacattagacatataaattaaaaataccacattatttaaaaattgtttaggtgttatttatataggttacaaataatagctttattatttactttcttttctctaagaaatattactttttatggatgattgattaatatcttaccaaataaattgttttatatatttatataaattgttatttatcttctaacaattaaatttataataataattttaaattttaaatttgatcaacttagttttatctgttataaaataatataaaatagataagaaaaaaagaaaaagaagatgaagagagaaagagaaactgaatgagagtttctcagttgtttaatccaatggggtgaactacccctatttatacaaaagtattgactaaagaaatgagaaactaaattaatatgtaataaaagaaaatacaatcaagcattaatggtgataattaatatggtgatttggacatccataaataatatttcataacacttccccttggatgtccataaaaactgtgtctcattaaaaaccttgctgaaaaacttgatcaagaaaatgagtatagtgtaatctaactccccctcatttaggcattcgtggagatcttctaattgacgaatttttgatcttgtctgttgtcttcttaaatgttgatgttggtaatagctttgtcaataattttgcaggattcacacttgattgaatttgttgaacaccaat

SEQ ID NO: 11447 - DNA, 501 bp, Cannabis sativa
aatcactattatgatgcaactactattacatttaccaaatatatttttattgttattttttcaaaaaaaaaaaaaagaaaaaagaaaaaatgtatgatatttctaaaaaaaataaaaaagtattataaaattaaaagtattacggttaaactaaaattataattaataataaattttaaatattattatatttttatttttataaatagcgcttaaattaaatatttttttaataaaaaatgatgtttattgaataatataaaaaaattaattatacaactaaaaatatacataaatgatcaaaaattaaaaatataactaaatatatacatacattgcacgtaatattaattaacctggtatgtatatataaataaataagaaaaatgattggatagttataattacttttaattactatatatcaatatatagtatttttaatatattttaataaattttaactattataattgcatgtagggtattttttataatttt

SEQ ID NO: 11448 - DNA, 858 bp, Cannabis sativa
gtcaacgatatccccagcacctcatcgatggctttcaatctgtcttagacgagtgtggtttggaggatatgaagctggttgggcacccgtatacatgggaaaaaggcagagttagtagcgcctggattgaaattcgactggacagagcattggttaactccctttggtctcaggttttctctcttgcaactctctataatcttgacttctcttcatctaaccactaccctttgtggctagaaattgaagccaaacacaggtgctgagtgttaataaaaaaaaaaattcaagtttttgaaaatgcttggttaaaggagcctatgtgttttgaaatcgtcaagaattgttggaacttggctgctactgatgtagtctcggataaactcaagttgtgtgctgaaaacttgagtgagtggggaaaagaagtgacgggaaactttaagctcaggattcggaggtgtaaacaagagttgaagactttaaaaaaataaaagagactctctctctgttcaacgatatagtgaggtgaaaaagaacttattcaaggtcttggatcaaagagaggctttctggaaacaacgatccaaacaactctggttaaaggagggagatcaaaatagtagttatttcataaagtttctacttcaaggagacgccataatcaaattgagaaactgaagaacagtgatggtgagtgggtggactgggacaatggcttaccaatggtggtatctaattatttcaattctttgttccaagcctctggggtttcttgtcgtgaagtagttgattgtgtgaaccataaagtccttgtttttgcgtgtgctaaattctaacaacaagtaactgaggaagagg

SEQ ID NO: 11449 - DNA, 1172 bp, Cannabis sativa
atcattatttagaaacaataaatttcttcaagactaagtcatcaatatagcattctagtattaatgtaaaatacttttttaagattaagtaatctctaggtgaaccataaagggtttcataaggaccagaaattatgcttaagtctttcgaatagacattgaaagatttcctatcttatcgtcataattttgataagttagaaatccatgtgaatgggtagattatctttctttatttttattttaaagctcctttcttgaacatattatagtaagtcatcactagtgtcatccaaataataacagactagaaaaatcctcccacaaagataaggtacagtgattctatatctggggactttagtggtatctatgactattggaacatgtacaagatcataaataaggtctactagtttgctagtttgtatattatatctatgtctaattaaaatatgtgtgttacagagattctgtggtattttgaatacaatctacagttcaatgtcaaagatctttgaatttgtaataatatcaattaaactcacccctattagatcacaagatcttttattaaacaaaatcttaataattttaagaattgacaattattcataaccctttaatttaacttcaagtgattataaagtattatctctttgcagagaatattataccatagattttgtattaataataaatgtaaaatacataaaagcatgataaatatataaatataaattggtatagacatacaagttatagaatataaaattcaatttcataaagttaattcctaatgaaattcttttaaagtgaaaaattcaaattaatactctcaaaaatgtcacaataaattatctgcaataatatgaaataggaaataaattttctaaactaaaattgaaattaaattgttcgagaaataaaataattaattcaaaaagatagaattcaagattcatcttcaagcttggacaatctccatccctgtgtctaactgtccatctcaacgcgcgctaggataataacccaagtctacgtagatggagctaaaataagatgggatattttaaggcatgtttaaaaatcgtctcctatacctccaaacagtttaaaaccgtcaagaataccctatttttcctatcggttttaaacacccgcttaatttt

SEQ ID NO: 11450 - DNA, 503 bp, Cannabis sativa
tactcaccacatcatcaccagcattactttaataaaaaaaagcaacagtattttattttacgattttgttgcagtcgtacttatttttggctactaagtgtcaactcagaaacacgtaacgacatattattagactttgtattaaataagctaaagaaatatatcgctacgtatttttgaactgtcacataacgggtttaattgtcacttaataactaaaaaaatacgactccaacaaaatcgtaaaataaaatacttttgctactactttttttattaggattaatgtgtaacaattacaaataataaagagattttactgcaaatatctcttataatattcttaagttatcatgccctttagtgtctaaattcatatatttttttttctagtgttatacttgtattttttgagctcgtgctgattttgtgttgtgtcataaaatttgacccgtatttatacccctaaacttaccaacatatttgttgaaaaaccaaactaa

SEQ ID NO: 11451 - DNA, 2220 bp, Cannabis sativa
tcgaatggatgagtcaaaggaatttagaagacgtctagatgattataacagaattattcttgatttgaataatcttgggggtaaaaattgatgatgaagaccaggctataatcctattgagttcacttcccaagatgtatgagcactttgttgatacgatcttgtatgacaaagaaactctgactacgacagaggttaaggctgcattgacttctaaagaaattcagaagaagggagatgagaaagatgagacagatggggaaggattactcattgttaagggaaaattccataagaggaatacaagggaaaccataactcaaatggctacaaaggtaaccattcaagatccaattctagaaactccacaggagggccaagctctaattgagctgtaggaaagcaatgttattattgcaagaaggagggccactttagagaggattttttggctttgaaggccaaactgaagaggaaaaatcatcacaaatctaggaagcatggagttactgatgtagttgatggctatgggtcatctgatgcacttgcaatgtcatctgatgcacttgtgatgtctagatcagattcaggtggagattcgattttagattcagggtgttcatttcatatgacaccaaacaaaggactgtttaagactcttttaaagattcatggggtcacaattcttcttgggagcaacaaagtgtgtgagatcaaaggtgtgggaacaatcttgttaaagaatcataatgaagtcatgaagaccttgtagcgggtcaggtatgctccagatctcaaaagaaatcttcgctctactggtatgtttgataaagtgatgtacgttgtcaaagttgaggaatgtgtaatgaaaattgcacaaggcacaaaaactgtgttgagagaaagattgagtaatggattgtatgtcttggatagaaagacagtaacaggtagtgcaacacctgttatggactcaactgaacacagtcaagtaaggctgtgacaccttagattggggcatgtaagtcagagaggacttgaggaaatgaacaggcaaggactgttcaaagagaagctaatagaaagacttgaattctgttatgaatgtgttttaggaaaggcttgtaggttgaagttcaacaaggcaaaacacaccaccatagagaggttagcttatgtccatctgacctttgggggccatctagaattctaacgaaaggtggaacacactactttatgagtataattgatgattacagcaggaaagtctgggtttatttgttaaaaagaaaagatgaggctctaggaacctttgatacatggaagaggctactagaaaaccaaactaagaacaaaatcaagatactaagaactgacaatggtcttgagtactgctcaaatgagtttaaaggattatgtgccaaaatgggaattaagagacataactgtgatctaaacccttaacaaaatagtgttactgagaggatgaatagaactttgattgaaagggttaggtgcatgttactaggagctgatttagacgaaaccttttggggagaagctcttaaaatagcttgttacctaatcaatagatcaccatctgtgccaaataacttcaaaaccctacaagagttagagacatgtaaaccctcaaacttagatcacttgaaagtgtttggatgtactgcatttttgcatgttagaaaaaataagttgcaacctagagcattgagatgcatgtttctaggctaccctggaggggttaagggatatagagtgtggtgtttaaaacttggattcaaaaagtgtttgattagtagagatgtggttttcaaggaagatgaaatgaccatgaaaaccaagagcacttccaaagatagtgaagctggtttagatgagaatgtcttgattgaggcggagcaggtttctcctacaacaccaactaatgttgttccagatggaactgaggcaacagaaagggaagacaatgaagatcagcaggaactaagcagctatcaattagctagagatagagagaaaagatagagaaaatctcctaatcgttttggttatgttgaattcattgcatatgcacttatgattacagaagaggttgacaattcagattccactagctttcaagaagctatgagaagtaaggatgctgcagcatggctgcaggccatcgaagaagatatgcagtctcttagaaagaataga

SEQ ID NO: 11452 - DNA, 749 bp, Cannabis sativa
tgggagactcataactgataatattttagtctctttcgaagtacttcattacctgaagaggaagaggaagggtaaggagggattcatggctctgaaactggatcttagtaaagcttatgaccgtattgaatggaattttctagactctgtgctacggaaaatcagtttttatgacttgtggatttctctagtgctaaagtgtgtcaattcggctaaatacaatgtggttcatggtggtagaacgatgggaccgattactccttctcgtggtattcgtcaaggcgatccattgtccccatatatctttatcctttgtgcagaaggtttatctgctttgattaaacactatgaggatatgggacttcttcatggttgcaaggtggcgaatggtgctccgaaagtgtctcacttgttatttgtagatgacagttacttgtattgcaaagctactctccaagaagctactcggattagagaactcctccatcagtttgaatgtgcttcgggacagaaggttaatctggggaagtcatctattttctatagcacaaacacagtgagtcaggttcgggaggagaacaatatgttactacaaatgccacaagctgatgatagaagcatgtacttgggtctccctagtactatgggccgcaataagtcggctgttttgggctttctaaaggatagagtcaggaaaaaacttcaaggttgggactcaaaagttttgtctcgtgctggtaaggaagtgt

SEQ ID NO: 11453 - DNA, 783 bp, Cannabis sativa
caaaaaagaaaataagaaaattaagtatgtacaaattaaaatatataaaaaatttgaccacaaattatattatccaaattaaaaattgaaaatttgtttaagtaacaagaaaataatgcatattaaagtaattatatattggtttgagtttaggtatatttgcagttctcaatttctggtacattctaattaatatgccatgccttttattgattgtttacaactttgcataacattttttttattctagaaaaaatgatgaaaaacattattagtgtctaatatttttattaagtgtcgtattgatattagtgtaattaattattgagtctaatataattttatgtaataattttgtaagtaatattgctaaataattatagggtgccatatttaaagtattggatactactagtattcaataataattttttttttaaaattgctaaaacacactattaatacctatagatgttatactgttattatagtgaaattaagtattaaattttatataacttaaaaaaataatttttaaaaattatgaaagtgttgggcactatttccaataacaaaattttttttattaataatttattttaatataatgcatcctattaattctatatatttaagaggagagagacgggtatgattatgagagagagagattaaaaaaacaatgcgaataaagtacttatttgtagtgtagtattaaatttccatgaagtatagttagtaaggcaattccaatctattacgtattaattaatgcaaaaagag

SEQ ID NO: 11454 - DNA, 935 bp, Cannabis sativa
agtttggggtgttacaaggctgttctggttcaagatttcgactgcctttagtgagcttattttgtaactggtgtgaatcaccattagtgtgctttgtgttcttgattctccattattgtcagttgtaatcttttccattcaataataaaatcatcacaaccaatagagttatttctacccagggattaggtcctatccaaaacttgcgactgaacctcgttatttcttgctatcaatttacttttctagtttataatttctggtttaatgttctaagcctatttcctttcttgcattgagttcttggttgtgcttgagtgcacaacaagtaatgacatattgcaaaaaaaaaaaaaaaagtaattaattaaaataaaatttagataatgcgcatattacatgtcttatggatatccatgttctctttctatgtttttctcacaaatattagaaattaaaaaaatcatcaagctttttacacttgagaatcagaaaatggtgataaatagctcttgttctgaaaaataaaaagaagacaaatagcttgatttatctttaaaaagaaaagaaaataaaacaacaaaaaataaaaaattaaggatttgagaaatatatagagcgagagatgagttgctgggtttttagaataaaagtgaaaaaacatggcaaaaaaggataaaattagagggatgaccggagagatttgcagctgatggacaaaagaagagtgtagagagtgaaggtcctgaaggatttgttggctaagctattgatgataggtttgtagtagaaaaagagagcgtaggatgaagagtctacacaagatgagagaacaatgggactaagaaagtaaaaataaaaccggaaacgaaaaaaagttaaaaagataccgccaaaacactttttgagttatcacccataatttaatcattaca

SEQ ID NO: 11455 - DNA, 549 bp, Cannabis sativa
atgtcattcatttttcacagttaaatgccattatagactgcttatgtgtacatttttgtacatgtgttatatttatattagtacacttaatattattatttaaaaaatataaaaattattttaaaatttataagatttttttatttttttaaaatttttttatttttataatttattcaatttcaaaataaattttaaaaataatttttcaaataacaatattaggtgtaccaatatgaacgtatcgtgtgtacataagcagtccatagtgacacctaaccagatgacaccttaaatttgctaccagttcaatagtttggagaattttaacgctgaatttagagagttaaatgcaagtaaaatagtagttggaaaaatttagctgccaaaacctcaaataaattatatgtatttatatataacgagcactaaagaattttgcgtggtctaatagttaaatctatttaatctacgagtcaatattaattttgaaatcttgacacaattttgccagagtgttcgtaccacacttaagtattattttttttt

SEQ ID NO: 11456 - DNA, 769 bp, Cannabis sativa
aaacataatagggtaaatagcccattattatatgggcatctttaaaataggttatccaatattcatatatcctagaatatttgcctaatatagtggcagaagactcaaatgaaatttattatgtataaataattgtgaaatttacacattcatttatgtgttttaattatacaatttgttcaaatatatatttttttttcaaaaaaacttagcttatggagtgtttttttttttaatttaaaaaaatgctaaaaaatataaggtaattaattatccaaagaaagtaactagttaccttaaacaattttccccataattttagcttattttttaattgttcctgacaaaataaaattttcaaaaaaaaaaatgatatatataattatttttgtagactttacctaagaaaaacataaaaatgataatttcccataaaaattggtttggattgtaatgtgtttagtcttcaatcattaaaaagaaattaggctagatggcttcttatctttattattatttgagggattggccatgcttaaatctgcaagaacaaaatctaatgagaaaaagctcaatagaaaaaagagttcctatagaatatcattaataagagacatcaaattataaaaaaaaattcctacataaaacacatgaagataaaagtcaaaagtaaaaaccaagccaaacaaacttatatttagtcctcaaatttgctactcttatttactccttcgtaatagtacaccatcacatagagctaatgaattag

SEQ ID NO: 11457 - DNA, 508 bp, Cannabis sativa
ctggtatgaagtttatctattctcaagatgaagtatataaggatcactcagttaactttttagagcatgtatagtgacaaattcaggatttaaattgagtggtgttatgaaagagagaaatggaaagatagaaagatgaaagagagaatgtaaaatctgttgagaagctttgttaagaaacagagtgagaagctgatatttatatatgtaaatataacagaaagagtacaaccaacctaatcctaactaactgactaaccccttaacagaaaaccaataacagttttaactaactgtgtttggtatctctaacatcccccctcaagttacactcatttgctttgagtgttcacttgtcccttaaataattgaattgaggattgtgaaggggctttgtaagaatatcagcaacttgatagtttgagtcgacatatcgaacttccaacttgttttccaacactctatttcgaacaaaatgaacattgatttcgatgtgctttgtgcgggc

SEQ ID NO: 11458 - DNA, 570 bp, Cannabis sativa
tgttgccgacgggccacggcatttctcatgcctcaatttagagattcacattttcagcaaaatatatatacatataaattaataatagtgtgaacataaaaaatttaaaggatcatcttattattttgttaaatcacgcatatatatgatacatatagatagtactattattagaagacacgttgtgtggaatgaatataaaccatatatatataatatttgtagtgacttcatgatgggttctaataaatatataagcaaattattaattacttctaataaatattgcatatttatatgatatcaaggcctataatatgggatacaagaatattaaacaaatgataaatttgatatgatacataatatatattgaataaagaatgtggatggcatgtggctgaacaattagcaagcttaattaataataacttcattttttttaattattaatttttttgcaatgatttttttaaattattattatttttattaccacatgagagggagcactttatatttcacaacaacaaatgtgactttccataatacatcaatgtaataaaaaaa

SEQ ID NO: 11459 - DNA, 586 bp, Cannabis sativa
tttcaatagttcaagagaaaattttcaacagccttaaggtgcataattttgtacatgtcaaattttagaggacaaaaatcttaactagccttaataaaaatatcaaattttatatcaagttttgcaattgttcattggagcataaaactataaattaatagcacaaatacattacaaaattattttcttatatgtaaaatatagcacaatttttatattttccattagagatagtcttatatcaactatgaaagtgaatgagatcaacatagctaaagtgatagtcttatataattttcatttatgtatactgtttcttgagtcttcaatttttgtcacttaaatatcttagaacaagagaccaactttaccaaagaatgtttttgataaattttaatcacactcataattaatatttaattatccaattttataagacaatgtttacctatattgtgtgatgaccccttttgttacaatataacaacaaattagtaattatacactcatttaatttgtgggttaaaactctcgtagtgtaggcgatatggcgccataccatcaaagttgggaagttttggtaaac

SEQ ID NO: 11460 - DNA, 530 bp, Cannabis sativa
tctacaatagcaaaattgttaaatatatcatcatcattaatactatgacgaagcatgaatgtacaattttttttaagacacactaacacattaattgaaaaaatatacaaatgtttcctgataataaattgatttcagcatcatgtaattaacttttttaatttgttttttcaatagagtttataaatagtttaggtgacgtttggttggagttaatgaaattgaatgaaattgaaagtaaacaattttcattcaattcctttgtttagttgcattttaaagtattggaatgacattccaatggaatgctctttctatcattttagtggaatgcctattccattttaaaaatgaaggaaagaccattccaatataataaaagaaaaaatttaatgttttttaatcaattttttttatgcattttaaattttattctatttattttcttattctcattcctatttttatatttttattcctcccaactaaactccaccttagttggccaggttatttattacgtcaatacg

SEQ ID NO: 11461 - DNA, 826 bp, Cannabis sativa
tgaaaagggatgacgaagaggaatgaagtgtccatacttggtgaggcgatccacaaccacaaaaatagaatcaaagctggtagacctcgggaggcccttgataaaatccatggatatgttttcccacacttgctcaggaatgggaaagggttgatgcaaacccgccggtgattgagctatgtatttattttgctaacaaactgagcattcaacaacgaagttttggacatctttgcgcataccttgccaataaaaattagcagcgagatgctggaatgttttgaaaaccctagaatggccccccattttactgctggtactcctgcagtaagagtgggatagatggagaggaaactgacaatactaatcatccatggaaagtgagacagccatgagtgatagaaaaacccccacaatcttgatcttgagcgatgtctgacatgatcttagcgagatcgggattggctataatagtagcttgtaaattagtagtagaaaacacaccacgaattgaaatagtagccaagtataccttagatgaaacacgagatagcgcatcggtggcgcggttctccaaaccaagtttgtattgaatatcaaagtcatacccccaagatcttagtgagccatttttgatgttctagggagacaacacgctgttccaacaagtattttaagcttctttgatcagtacgaacaagaaatttacacccaataaatacggtcgccatttcaggatggctaggacaatggccatcaattctctttcgtaggcggactttgattgggcccgagtggacaaagtacggctgaaataggcaatggg

SEQ ID NO: 11462 - DNA, 1222 bp, Cannabis sativa
atattgtaggaaaagaacgatgacgcctgaaaggggggtatcaaagaagttcacccaacattaattggattaggggcaattagtccagtcaagcaattacatggaagtattgcaaagaaattaaataccggctcatgatggctggtacccgatcatcttcttctcaagttgctacaaatcctccaaaacaaccccaaaaaaacaaaacacgatcatcaatgagcaagaagagtttgaaagataatcctcttagccctacttccccagtgcttgctaaaagaaaattaggtgctggtactttgaagaacactaaatcaaaacgccatcgacctatcttggagaatttcaactctgattttgagttggagccagaatttttaaagtctcccaaatctgataaggtatttttctattaattttgtgttattttagggttttttacatgttgatattattacacatttctttgtatgtgattttttttgcatgtttctgtttgtcagtcctcctattttacagttttgtgtttgtttgactatgtttcttgttgctgtttttgttttgttttgttaactcgtaggggaagggtaaatccccagtgaagaatgttcaatgaactgattatttgaggagataattaggaaaagggttgttgaggtgtatgatttcattattttacttctaatattttttatgcttgattttgttattctttactttttgtgttattttaattttgttttagtagttttttcttctattttttataagattgggaatacaagtacactcgatcggaatgctaccattccagagttataacctctggttattattctgttattaatgatattaaaattattcttactgaaacccaattaaaaatattttcaaaaattttgtttggccattttcttcgtatgccagagtatagtatctctttccaactcatttatggtttgctgttgaaggaggttcaacatccaaatgagttggaatttaggatttctttgcaaggcaaatgtctgaggtttagttttgaggagtttttatttattaccggtttggattgtcatattgattctgacattttcaagtacaagcaagatgataatatgcttgttaattactgtttaaagggccacaaaaaaattaccaagatttctattcaaattgcttttattgctaacaatattaagaataatgatgatcttgcagtcaa

SEQ ID NO: 11463 - DNA, 526 bp, Cannabis sativa
  modified_base (107)..(108): a, c, t, g, unknown or other
tactaataatttgaaatatatatatgttgattcatgaaaaagtttcatataaccgataaattttgtctaattaattaattattaagtaataaaacttcaaataccannataaaaagttaaataacataccagaaaaactatatatacatattttaaaaatataataatgagtctgcaggagaagcgctggaaaattgtatggtgtaacaacacaaagagatcagaggtctctaaaaatgaaaaggacagtcaatgataattttgctattggcacaatgcgaatttgacatttcataaatgtaaccactacatatatatatatatatatatatattttgtgaccctcagatagccaatgtgactagcagaaaattacactactaaattaaaatgaaataataaataatcactaaacaagataataactaacccataggctagaaaccatcgaagagcactgtggtagaagaatctgcattacagaaactaattggtgaaacactgtcatgacccataacaatgcaga

SEQ ID NO: 11464 - DNA, 558 bp, Cannabis sativa
gttttggaatttgcctaacatatatacgtaaatatccagtgcgactctatttacactaatattgctcttactgatatgatatctgataggaaactacaaaatatgtactctaaacatgtaaatatgtatattattatactaatcttaactcaattatgaattcaaatatattggtcaacttgagtagaagctattattcaatgatttaaggtcataaatcacaaattacctaaattggtaagtgttatccatgttcccgaatgaagtgtacatggcaatcacgaaagcaagccatgtcggattacggattgtattgtacgacctcagatttttgggattatagaaggcgctgtagtacccggaggttctccctgctatcaaaggcagaaaggactccgagattctttgtaataatgcgctgctaacagaagggaacagaagttacatgttctctagaatgctactactggaaggccttagccagacgttcctggaatgccctagcgcctaatacggagctaaacccgacggtttcataacttctaacactgaattaaa

SEQ ID NO: 11465 - DNA, 917 bp, Cannabis sativa
atagatggcaaaattaaaacttgttgggcccattataggttcggccaacaagtgtttaattaagtcattattttataattttttttaatccaaataatttaaatcccaacacttgatgaaattctttataaagaatagatgactcttattttcataaccttcattagactttgtcagacaaaatagaaaataaaaaagagtcaccatctattttgaattctctcttcttctttctcaaaattttcgaagccttggtgaattgagagtatgtccattcatgtcaaagcaatacctagcatagtgaggaagactatgtctaatcaaattaaaggagagaagatccaagtttagatgttgataatgctctactacaggcaggaatcaagggctaagaatctgaatggaaggagtcattatattctgttgtcatcaatgtaaggatttcttaaactcttatgtgtgttatttcattgttttaggaaattcatatttgggatgttaggttataaaattataatcaaaatatatgttagtaaatctagatcctagtaaaataagctctaacaactgacctcagagccatggtaataatttatttcatgaaatatggatttaaaatgatgtttgattgatttggatgtgttcatgttggtttatgtattatttgatgattgaatgtgaattacaaatttttttttgaaaaataattttatttttattctgaaaatattttattttaaattcttattaaattttaagcaagtttagtttttacaaaactcgattccgattaaaaacgagagagttatgaggttatgaatttttggtgcattgggtgccattcgttgagcctcatgcgcgaagaaattcggacaaggagggtcatttgcgcacatgatccctgtctcaagctcctc

SEQ ID NO: 11466 - DNA, 598 bp, Cannabis sativa
aatcagtttagtaagccaaacgtatcaacaagagccagttcaaggagaggaggtccaagtttgactgtgacagaacctaagcctagcaatgtcatatcaaatattacttcctttattccacttgttcaacaaaaacaagcagttgcagctataacaggttatttcccattttagtaaatggttttcctgctttaataagtgaatgaactggtcttggtaagttagcagaagttgattggtggatattatgaagttatctaatctgatatatcgttttgtatatttccttgatccatttttaactttgttaacttctagtcttaaaattttaatcatttccatttattttcagcacttaaccaatatactatttatgcaagttttcattaatttttacaggaaagagagatgtcaaagtaaaggctctggaggctgctgaagctgctaagcgtcttgcggaaaagaaagacaatgaacgaaaggctaagaaggaagccatgaagctcgagcgagtaaggctcgagcaagaaaatctgaggcgtttggcactgcagaagaaacagaaagaagtggaaaagaagataaaagaggctggtat

SEQ ID NO: 11467 - DNA, 781 bp, Cannabis sativa
taaattactttttatgctcattctacatcaaaaaattgttgcataaattttgggtattactaattgggtagattttggtataatttttttaatttcttaataacattattgaggaaaaaagaaaaaaaaatcaatattattgtttttgtagcttatgcttgtgatttttctttgttgattataaattataatcctaatctagttaaataaaaatgatcaattctcagatgcagtttatatattggaaaaacttttagaataaataaataaataaatccctttctaaaaataaaataaataaataatttaaattagtaaatattgtttttaaacaatcattttcacaaaccgaccttagctcagttggcagagcggaggactgtagttggttattaagccattagatatccttaggtcactggttcgaatccggtaggtcggatttttttctttttaatttttttttattttttttttattttcattaattgttttttatttgtatgtatttttttcatataaataatagaaaaattctacaaatcaccctcttaaataggtttaccgatgcagtcttttttggcatttggaacaaaaatttagtctagttttattcatggtgatctatgttttagttattaaagacatcctgtaaaattttaaaaaatttaacacactgaaaatagagttcaaataatctatttcacacacgtataaaataaaaaaaatatcacgtgcaacatactattttgaaccatgtttttggcttattaaatttgtt

SEQ ID NO: 11468 - DNA, 565 bp, Cannabis sativa
  modified_base (374)..(374): a, c, t, g, unknown or other
cagttaggtgtaatggctcctaatcttaatcctgtttacatctatgttatgattatgcttttcttactgagtctatcgactcacatatattatttgcatgtgtaggtatgagtaaggctaaggttgagcagccgtgaaagcgagcggataaagatattacacgtcagaatggttagacctggagcatacaatctttgggacaacatgttgtattttaaatcatcgttaggcgacaagttttgtatggaatatttgtaaccctattgtaaatattttaaatatgggattccggttatgtaaaaggtatttattttcatttagagagtaattatttaaaagttttaattattcacgatttttaataaactcgttgnttagcaacgagctgcacagttaatataaaatcacgataacatgcctaaactagtaaggtgttacactggtctagcactcaggttgacatattgtcaacttgggcaatttttaacaagttttctggaaagtgttccaggaattttttctagaatcaagaataatgaatatacaagtaaacttggggagaaaa

SEQ ID NO: 11469 - DNA, 554 bp, Cannabis sativa
ggttgtgcaaactctggaacctctagttatggtggttctgcaccaagttctgtatgtagtgcttctgtttcaacttctggctgtgtctctggctgagtgtcaaaaataaattcaggagctacttcaacaggttgaggaggggtccttggttcagcttgtgatgtaccctgaaatggttgaaaaacaaacacaatgaacattcacatccaataagagcaaaatgcatattgtacttaaaggaatggtgatacaaaaagagcaaaatgtcaggctccacactaaacaggtttcaaattcagcagtgggtgtactagacattaaaataagtgtgcttgtcacttgtcagcaaagaattaagaaagcaatcttaaaacatggtatttaaactttcagaagattataaaatcatggtatatatattaagaaagcaatcttaaaacatggtatttaaacaaacttctgtaaaaaaaaaacagaaatttactgctacaattgaagctaaacaagtagctgcataagaagctaaaagggctaaatttgttgtagaaaaagct

SEQ ID NO: 11470 - DNA, 960 bp, Cannabis sativa
accatgcagcatagtgggaatgttataagcgtgaaccgtggcacaagtagtacggctgtgatggctgagggtgatgtggtccccgatcctacaattccaaacgtgtattctatataaatagagaaatatatatatagttctctatttatatatacactgaaattgtatatatagagtttaattattaatttatttttctttaatttttcaacactgtaatctcatacaatatactttatagaagatgatttcattattattattatttattatgttttttatttaaggtttcaaccataatacaatatatattcttgcagaaaataataaaaaaaaattgtattttatttacaagaattttattaattcttttaattattattcattttaattttatttttgcttttcaacattattattacataatgcatgtatattgttgcagcaaaagtgtgacagtcagtagtcccgtgacatgtaaggagaaatactggataaactgtgcagctccacattgcctggggaaggtcaagtgtgatgattctgagactttgtaggtatgggactacacaattgaagagagcttaaatagattgattggtactacctgtgcatcttgttttttgtagcccatcataaaagaactccacaattaagcgtacttgacttgaggtaattttaggatgggtgatctcctgaaaagttatctcaaaaagcgtgcgagtaaggacaaagcacgctggaaacactcgtgttggtttaatttgtaagaccattcgtcaattcaagaagtcggcagagtggtatactcgtgtataagagccattcaagtgtgacccaatgaaagcttgaagtggagacattacaaaaagacaagatttttgtatttcatttacagaatttcttagtaatttaatgaagaaaaaaaattcaacctggatgggttttcatgttttgtta

SEQ ID NO: 11471 - DNA, 509 bp, Cannabis sativa
ccgcttgccatcagtttaacacttaacacaatttcatttcccacttaaataaaataaactttgataggcctaaacttaaaattttaaattggaaggactatatgtgtaaaaaaatttaggggaaattgcattttatacatttaaatactttatctttatttttggaggcaaaaatacccaaagataaataaaagagatgcaaaactaaattaacataactgagtgaaccagtgcattattatgagaacttaagaaaataagtaacatttagtttctgatattaagaatattaagttttaaaatcaaaaaaaataaatgtaatgcatctagaccctccatgtgtccatatttatgagttaacagaagtggtagtaatagatgtaaaaaaattgtaacattaagtatttttaccttaaaaaataatatatagagtatttaagttaataaaatctgaaacattaagtatttatacgacaatttacttcaaaatttaacatgatttctacaac

SEQ ID NO: 11472 - DNA, 736 bp, Cannabis sativa
gaacatgtctcctattaggcaatgccgtccctaacaatcccatatagtagtctaaaaaagctttctgaactccttctggattgtctctccagatcccagcttcatcttcaatggagaatattttgttttgaattctcctagctttcaatgaagcatgaaaaattgctgagttctcatctccatatttagcccaattaagcttagccttctgagagataaagagagaaaaggctttatgtacctctgtataatgctgatgagctctgatctcttcctctatcaactccatgttcatcggatcattactcaatcttgtttgtatttctgaaagggctgaactagctaccatatcttccttgtgaatttctgagaagccctctctatttaacttctttaatacatccttcaatcttctcaacttaatgaccacctgatacattttcgaccccaggacaccagaactccaagaatctgccaccagcttttcaaattggggggcaagtttccacatattaaaatacctgaatggtttcttccctgggttgctatctttgtaaatagataccaaaatgggagaatggtcaaatgacatttctggcaagaaaaccgcttctgagcttgagaaggagttcatccaacaagggttgatcattgctcgatcaatttttgaataaattctctcctccggcttctgtttattattccaagcgagaaacgccccagaatacttcaaatc

SEQ ID NO: 11473 - DNA, 628 bp, Cannabis sativa
acagtatactatataggggccatggcccccccacaacatctatgtgcttaatttgttttgctaattattgtatagcactcctttaaaaaagtcaaattaatttgtaaatgttaacttctttttgtctttttgttgatatgtatttaccatcttttatttatttatttatttcatatgaaaaatctttgtttttttttttctttaaaacatttatttcttcttagtaattgatttttatataccacttcaatttttttttttttgaagtactactgcaaaatttttaattgtgtatagtgataatttttattcttccacttctagaactaccataaaataatttttttcagttataaatatactaaaaaatacactttgtaacaagatgaaaaataaatatttaagtaattatttgttagtattgtatattaaaaaagaaaaattgtcaaaaaaaaaaataatatataatttttgtgatatgcaagaaaaagattctgcattttaattttaattatgaagttaataaatgtttctcaaacatttgtcacttaaatttataaaataatttgcccccccctaatttctaattctggctccgcccctgcaagtgaggccattgatttatttg

SEQ ID NO: 11474 - DNA, 576 bp, Cannabis sativa
tatgctttcttaatctattatgtggaatgtgaaattcattttgtcaaggacacttgtcctcatggtatagtttgaagttagttattgtttgttatgttcggttatagagttggttagctacttcttatagctgttacttatatataaaccatctctgtacgtaatccttaccacttaagacaatcaatataaaatttcttcttctttttgttctctttgttctttctctgctaagattgatcttcacacattttgatcaagatcttgcctagctattaagatttattcagaaggaagttttgatttgcatgcataattaagaatatataaatgtgcaaagcttacatgtggtatcaagagccatgtttaattaagaactaatgattttatttcatgaatgatttatttgttttattccgtgcaattttattttgattggaaaagttgacaattcattgattattatgatatgggttattttgatatggtgatcacttaaaaatttcttttgtgtttatatatgtatgcaaattggctttctattgaaaacatataaagttggatttatcttgtata

SEQ ID NO: 11475 - DNA, 506 bp, Cannabis sativa
tgggcaaaatcaggggcaacagtctaattaactaagcaactatattctaaaaaaaaaaagacactacgcaataagagaatactaggatactttttaattatattttaaaaggttatttgcggcaaaacctctaatacttttattttgcttgcacttaacctctaaaactcaatttttggcggtaaaacccccaatactaatattctgttagcaatttaatatttccatccattttagttgttaagtgctatgttggactgtccacgtgtatatctacgtagacataatgtccacatgacacactttaattggtcaatgtaaaaaattatttaaaaaaattaaaacaaaattgatttgaaattttaaaaattgtaaattataaaaaagtaacaattttttttcttttcaattattaaaaagaaaaaaaataaaaatattaattaaaaattaatacaccaaattaaaaccctaatttccttttctcctcaactctctctctctctctc

SEQ ID NO: 11476 - DNA, 525 bp, Cannabis sativa
gggcataaaacccaacaaatggaagagctgaaagaaaaataggcacatcactgaaacgtttttggttttgctagcttaatctggtctttctttgtcatattggttgtatgccttcctaagtgatgtttttacaattaatagacttcctacagctgttcttgactttaaaagtccctatgaatgtttgtttagaagcctacctaattacaagattcttaaaccttttggttgtgcttgtttttcacacttgagaccttacaacaatcacaagcttgagttcagatcagatcagtgtatattccttggctattcctcccatcacaaaggctatctatgtgagaattcgaaaggaagaatttacattgcaaggaatgttgtgttcaatgaaagttgttttcctgctttcaaaacatcatgttcttcacatgtatattcttcaacttcattaccttgtgctacatgtatttttcctattactgtcactacatctaacacatgctctagttgtgctactgctccatcaca

SEQ ID NO: 11477 - DNA, 2867 bp, Cannabis sativa
tgccataggcctagatgcgagctaattcatatcgacagatagtaaatacagaaggaaagctcaaacgtcacaatagacaaatcaatctaggtcctgctgttcttggtcctatccactatataattctcgatcatttcatcacaaagttcaagagttacatccatgtttccttctttatagttcatatcaacaaaaatttcatatatttctctatctgcaaccaaaccttgcctcctcatttcttcaaatagtttccttgcctcttcaattttctttctcttttgaaaaccctttattaaagcagtgtatgaactcgctgtaagaagaaaacccttctcaatcatttcccttcgcaaaaactcagcctctttcatattccttgctttacaatgtccctttattaaaatgttataggtattgctatcgggcatcactccttgtgcacacatgttcctataaatctcagttgtgtaactcatgttatttctgctggcgtactgcttcataagagaattataagttgcggcattaggcattatacccttatccaacatccatttaattagtttattaccatcttccaacattccagacatgcaaaagccattcattagcacattgaatgtaacaacagtaggttgaatcccactatccaacatctcttgcaagagcatgtgggctttagacatcttccctgtcttgcaatatgcatccatgagagtagtataagtaaatgcatcaggatgtggcccagccacctttaattcttccattaatttctctgcatctactatgtttcctgatttacaaagtccattaagaattgagttgtaagtgcagacattcagttgaagacctttcatggacatttcttggagtagttcatttgcagtatctacctctccttgtttacaaaggccatcagccagtgcagtgtacgtgacaatgtttggcttaagtcccattttgaccatctcattgtgaagaccgaaagctcttttaatctcacttactttgcaataaccatggataagcgctgtataagaaaattcatctgcttccaaacctctaataaccatttcattaaagagcttatcggcttctatcatctttccagcttgacaaaacccatctatgatagctgtatatgctacagaatcaggataaatttccctaatctgcatttcctcgaacaacctgcatgcagctgaaacattgcctgacttgcagaaaccatctattaaggtagtgtatatcacattatcaggtttgattccctgcgacattatttccctcaagaccttctcggcttcagagagttttccactcttacacaaaagaagtacaatgctgctgtaggtatacaggtttggttggacactttttattttcatttcttcaacgagcttcaacaccttctgtaggtcaccaacagaacagtatctgctaattatagtactataacttacaacatcaggtacacagcctctcaactccatctgcaagagtagatggtgggcttctttgatttttcctaattcacaaagtgaattaataatgatattatatgatgcagtattccagcaaatacccacttgaggatattcattgaaaacttttatagccatctcaattccatcaagattgtttgatagacgagtaagaaataaattacaagaatcaacagatataaccaatccataattcaacaatttcatgaaaagttttctcgcttcattgagcatcccaatttcgacaagcacttggaaaaaaatatcaaatacatatggatctgaaccccaatctttgtatgtgtatattaatctatcggaaaaatgaatgaatgaaagactaatatccaaattgggttttctccaaaaatcaataataaccccatgtgccattttaagatcttttgatgctgtggcaatttgagcaacaatgcaacgagcctctagtgttgattgtctacgaagacatgcccaatcaaatagatccaaaactaaattataatcattcctaatgttcataagaatccaaattagatggtcagacctgaacttagattcacaagacttcaagatgcgacgcaaaggctcagagcgacgcagctttattgtggtagtaatatgatgaacaagttcagcatctctgatagtaggtttcttaggtgaataatcagggaaaggtctggtatttgttgagattactgagagtacttggctcaagtttcttctcaatgagaataaaggagagaaatataatccaaaacttaagcaaggctgaagagaaaagattcgggaacagtggaccgaaaatatagtgagcctcttcatgtctgtgagaggcatccatcaaggaaaattttaagattgcttacctccaatgtagctgctctccaccattgataagaacaaaaacaaagaagttttcacattattccatcacctgtacaaatacagtcagtataacagtaaacaaatgtccaactttatttcttcaaacattatgcaaaaacctacactattccgtttagggctgcacatggattggattgaacaagttgagggtattttaatgtaccaacccaattagttcggcctataaaattataactctttcaaaatgctttcaaaatataactcaacccaacccaaaatctaatgtaaaatttgagacctagctaattcatttttccatatcataatattaaaaaaataagttagatcaattttaaggtatttacatgactagaacttaaccaccctaattagtaattattaggatcatgcaaaataattattagttattacagccatccataatcacaaataaaaatctgaacattaaaataaattaaaaaagtt

SEQ ID NO: 11478 - DNA, 533 bp, Cannabis sativa
ataaaaataaaaataaaaaagcaaaggcagaattacaataagacaaagaagaaaccgacaagaaaggacaatcactccaaaccaaaatactaattgtactacacacgcccgcacgtgcggcacgtgggctgctgacccacccactacgaagaacagttgattgatttcacttccacattcgcataacaaacaactcttaatcatttattaaaataaataaataatactcttaatcaccttttaattatttttatgattattattattattttgaaattgaatgaacataactgctttcttcttcttctgcgagtactactgcatttctgatttaaaaaggcctcatgtacggtaatgaaaattaataattatgcatttagaaatagttctaactctaaacattattattattattattattattttcaatgaattattattatttgttcggtagttatctaagaacattattattatatgtatataatttaaattttataattattagttagccatttattaatatattaaag

SEQ ID NO: 11479 - DNA, 535 bp, Cannabis sativa
ttagacggttatgctgactaagaaggctgcatctcgttaatcatgagttctccctcttatccatgttaatagaaaaaaaaactctaagtgttaaaagtatgtcatctcgctctatccctttatatatattggtgatgcgaaacgatcaatacattatgtgtaacgcgaggcgattgagtgtagttactttactctgctcgtgtgtgagaggcaatgtttcacaagatctttggacatcttgtcttgtacattttattactttatcccgagatggacacaaatctcatcaattctagtttaatagtttttattcttgtcttgcgtaagactaagtagtcagcgagtttgaacatttctatcaaacttgtatttaattggaacgagttatttgaattgcatttgatgatataatattattattatattcactgagttgattcatattccttctataggacacgtgtcagcttctggtacataaccgaattttaggtataacaaactcatttattttatgtgcacatattactcaatg

SEQ ID NO: 11480 - DNA, 564 bp, Cannabis sativa
tttcaggaaagcctgaagtacagattgcagggctcagaaggtgatattggttcatggggccacgaatatgtcaggcaagtttcaattctttgaaaagagttgttcggatttggtgttcgctgttgtgtaaccagtttgtttagtacgatatctcctatgtttttactgttggcatattaaagttggtttcaactttctctttcaatagaaataatatcagattgccagtcataatggtttattttatttaattaggaatttggcaggagaaatttctcaagaatatgctaagcgacaggtttgaaatctatcttataaatgtactcaatgtttgttagtaaagaaatgaaatcctgtatgttttgagaagttcctcaaatcttcttttcacttgctattgcagactgatgaggaagctattgatgatctaatggaactcgtacagcaaatcgttgcctttcacatgaaagtaagtccaatgatgaattttttatttaattgtttccatctttcacggataggaagaaaaacaagtctttttgtgggttaatacagatttttggt

SEQ ID NO: 11481 - DNA, 513 bp, Cannabis sativa
tatcggtcattttaacggaaagataaatgccacgtggcagatttttgaacaaggtatatcttttgtttctgaatttttgtttgttgagtaattagaggcaaaatttgctatcttttaattttgttgcacttaaattacaatactccttaattgttagttatatttcactgataaatgctgattgggattgtcattgtaaacatttgtttataagtgacactaaaatttcgaatctaatgaaatcatgtcacatagatgtacacagtgataattcaattgtcaataaattgtaaaacaaacttgaagcctcaaatttacaaataaaaataaatttaaagagtattgtcacaaaataattaaaaaattaaatatataaaattaaagcatatggtatttttgctgccaattattttttttaattgaaaaaaaaaacatattagtggtgtactcatgcttgaaggccagaatatcttttacaaccacggctagtgtgctgatgacgtgcgatacagg

SEQ ID NO: 11482 - DNA, 671 bp, Cannabis sativa
catcatttaactatttctcaactcgtatatatcaaatgattaagaatttagaaaatttccaataatttataatgataaaaataaaatttaaataattatttactttaaaaaattgttacttttagtgatgattttttggtcacaacataatttttttgtgactaaatatgacttttaatcacaacaaaatattattgtgactaaaacatagtctttagatacaagttgtcactaatttagttttagtctcaataagtattgtgcctaatactttttgtcacggacttttagtcacaacataagaataataatttatgattagtcacaactttttcacttttagttacaacttttgttatgactaaaagtaatattttttgtagtaatttactaaatatttaataaaaaaaagtagtcatgataacacaagtgtaataaaatattttaattttattatcgtcattgtcacagtaaaatattcagtaattctaaatataattacaatgtaaaaaaaaaaaacctaaagaacgaacagatagggaataaaatgtacccaaataatttttttaaagggtgtattatagaattacccaccactttaaccaacacactactatttttggcataggagtgttaaaaaaagttgcaaaatattttgagttgaagatttg

SEQ ID NO: 11483 - DNA, 610 bp, Cannabis sativa
aggggacttggatccgaaactgggctgctgaaccaagaacgagaccaaaaactcgaccccaaactcgagacatgggacctgaccctggactcggaacccaggacctaactaacaggacataaccccaaacttggacctaaaccaaaacttatgactaggcccaagactcgggacctgaactgcaacaagaccaagatccaagaccaagatctgaatctggacctgaggctttaggtcctgacccatagtcagtgtttgaatcaaggacccagactcagacccagatctgtaccccgacccagacctagacccagactggatccaaacccgatctcggacttggaattggaatcggaccaggtctgggactagaacccacacttgggacagtaataggacccaaacctaaacccaaactcagaccaaaacccataccgagactttgacacagaatgggacctgtgacttaggacctaaactaatattaggacctagaccaagaccggaacacggacccagacccagacccacactcaaaaataggggccacacctatgacctaagaaccagaaccaaacatgggactcaaaactcaggcccacactgggac

SEQ ID NO: 11484 - DNA, 535 bp, Cannabis sativa
taagaagataaccaggattaaagatcgcctggtcatcgcacaattcatgacaaaaaaaaaagtaggattaaacaatagtaatgttcaaaaaatgagtgtgtataggctaagagtacgaacatgaaggccctggggctgaaaataagtaagtgttcaaaaattgaaaggcccaaaggccatacagaacatgaaaacaatgtttatagtataaaacgataatgctaaaaattaataagatgaatctacatgtgtctaggtgcatgtggggctgaatcgagagctacaaagtttggatcgatagagtgtgggctggtcggccacttggtgaaattcctggctggccccatactcaacagatgggccgaccatatcctcatcataatgccccgaggatgacccctctagcttgatggtggcctagtctacttaaaatcagctctcaaacaacacttttttagccagtgtactctctaggaaagtcgtgtcacccatgtaggaaagattagcgtttgagttgtgcagcttgaactcataa

SEQ ID NO: 11485 - DNA, 587 bp, Cannabis sativa
attgcacctttttatcatatcatattataattaatttattaatttattctttcccggcctaagaagggaagggtcgaggaagttgcaaaaagatcataaagtatagagttcacacacacactatattgagaaaaatggttcatatttattataatttgccactggaaattgaattatttgaaaaatatagctaattgaaatagtctatatatatgtttatatattatatatatatattaaaaattaacggcttacataacaaaataaaaaagaaaagaatttcctaagtctaacatgatctaataaatatcgaaccagcaagtggcgtgttagatatatactcttaccgcatcgcctatacattttttttttatatatacatatttcattcatcagttttcgaaaatatcatatatatatatatatacccatatataatatataaaattaatcattcttttatatttcaattcagaagtaaactatatacaatattatataatgtgccataaagaaatttcattatatatataataacgtaatactttttcttagcatgcatgcataaattatatattatattatta

SEQ ID NO: 11486 - DNA, 562 bp, Cannabis sativa
taaaataagaaagatttaaggtgacgtttggttgagatgaataaaaatataggaatatgaatgagaataagaatagaaatgtgaatgaaatagaataaaatttaaattgcataaaaaaattaataaaaaagtcattaaattttctcatgttacattggaatggtgtttccttccatttcaaatgtaatagtcattctaccaaaatgatagaaagagcattctaatggaatgatattctaatactttaaaatacaactaaatcaaaaaatgaaatacaaattatttcatttccattctattctattttatcacctccaatgaaacgccacggcgtttggttgagagaaatgaaaatagaggaatatgaatggaaatgagaataagaataggaatgaaataaaatttaaagatataaaattattaaattttttcttatcatgcattggaaagatgtttccttcaatttcaaaatagaatagtcattccaccaaaataatagaaagaccattctattggaataacattttaatactataatatgcaatcaaacaaagaaatagaa

SEQ ID NO: 11487 - DNA, 582 bp, Cannabis sativa
aacatcacgacaactataaattaaatataaaacagcaaaaaataaccagaaaaataatattatgatagttataatacaactataaaacaactaaaaaatggtttattagttttattgaaaaagtatttttataaataaaaaaattcaaaaggtaaagttaaaaaaaaattctgtattgatgtatctttgtaattttatttttcaaattttgagtctattatgtaaatttttctttaaaaattctgaataatttaacgtgtttaaaataagattcaaaagtcagctcacacgtaatttatttttatacgcttccacaaattattattttaaattttatttttgacacttaaattatttgtaatttttaaaaaactaatagaatgtctactataattaaaatctaaatcatcatataccaaaaattttatggaaccattatttaactataaaactctcctagatgtcgaaatccataggaagtctactaacaagtaatgtaaatcaatgataagatataggcattctcttatatttgttaacttatattattagaacaacaaaagagagaatttgattaaataa

SEQ ID NO: 11488 - DNA, 527 bp, Cannabis sativa
caaattggcaaatttggctttgggattagatgaagtttttatttggattagagatgacccttgtaatctcaaagctcttctctttccttaagggcatattttcctaaaaaaaagaaaaagaatgaatatgcatgggttgtttaatgattttcttctttaaaaaaacacttatagatgagaaatgttaaaaaatactattataaagtgtcatattactattggtaaaattttaatatcagatctaatttatttaattttaataatgattatagaaaattattaactgcatgtctggccttaagtataggcgggttaaacatgtatttaaggctcacttagcctaagagccccaaaaaaaaattcttctttttaaaattatatatttttctttggtttgaaaaatattacattttactttaaataaggacttaaaaatatttttttcttatgaatcattaaattttagggtgggccctgactaaccatttttagaatatcaactcataaaggtgatatgtaacataatg

SEQ ID NO: 11489 - DNA, 502 bp, Cannabis sativa
aaattcaaaatttaagtttggttacaaatttaaaatagtaacagaactgaaaaaaaaaattataattttatttgtatttaatacttgtgctactaaaaaagctaattaaatttatgcttcttacaaatacaaattagctttaaatatgcaaatatgttatagtttgaacgcataaaaattaggaaaagtttgtaaataatagcagagttttataagatatttttgtacataaaattcacataaattgaaatatataaatcacacttttattaatattgagcgtttatattgttaaaaaaaattattaagtttatgttgtttataaatacaattttaaatatttatgctggtagtattttattataatttgaacgaataaattagaaaaagtttgtaaacaagtgcacctccaaaaaaaagagtgtactatgcactctttggtgtttttcacatcctgacagttccaatcttaattatcttaattaatttttacacataactt

SEQ ID NO: 11490 - DNA, 734 bp, Cannabis sativa
gattcttcgagcctctttcttatcgacgggaaacttcccttctcgaatgtactcaatgtatggcgtcatccaggagggttcttcctcttccactctaacactagatcacactcgatagttggttgggctaagaactccactggtacagattttagaacattgatttcctaggttgatgcaagcttagctagggcatcagcgttgacattcctttcgcttaggatttgtgcaatcgtgaagtgttgcaactactctaggtaactcctaaccttggtcaagtacaccaccatccttggccctttcgcttgtgttattcaagttttcattaatcagacatgtggcacgatcagagaggggacacagtctctacataaggcatctaggggaattaaaagaaatggctcccgaatctagaaggcagtgagaggcaatggcttccaggagtaacatccttcactaaggaactcggaaagcggtacacgttctgaagacatatgacacgtcagctctttgcaaaatagtgccccatagacgactatacctttttctgacacaggatcagatcttgtgtcctgtgccaataatgatagtgcgcgtacgcatccttgagcatactttttgcccaacagcctgggtagagactatttcataaaggagagacctttggacgacacatgtccaaggtcatacgaaagtcctcaacaactccgcaccgcacgatgaagaaggttccc

SEQ ID NO: 11491 - DNA, 872 bp, Cannabis sativa
actatattatataagatgagtttgtaatttataattttatacttaaaatataatctacatttaaatattttgaaatacttttttgtaaacagtattttttactttacataatcttttctttttattctaaccattcttttaatttttttttaaatataattattatttttttaaaataatgtaatgattaattatttgttgatgatatgtataattataaattataattagttgttattgcttatcaatataaataatataaaaaagtcacgtaggttagctcatcgtctcagtagtgagagagagagaggttggaaagaaagagagggcgagttctaacttaaaactcctaacttatttattttattttttttttattaatgaaaccattgagcagaacaacaaacaggaggcctaacggctaaaagagcccagcctagctgggacagaaacaccacaaacaaactacaggaaatccaagaacactaacaaaacaaagacaagtaaactgcagaaagcagagaaaaaaccagaagaaaaaacagaactaaatctaaaactgaaccagtaggaaaactaaacagataaatgaccatctgcagcaatcatctgcaggaaatcatcaaaattgggtatatccaaaacaccaaagatgttgtttcggttttcccattgagccacggagtgggccacaccattacacgagcgaggagtccatataatctcatgaatgttgaattccgccgagagatcgatgaactttttaaccttttcttgaatgttgaaatgcagtttttgtatatccgcagtgttgcttttcaacgcactaactgcattcagtgagtcattctgaaaaatgacattcttgaagc

SEQ ID NO: 11492 - DNA, 609 bp, Cannabis sativa
cctgaaaaggtcagtccattgtttcgtgtgtcttgaccagtgactactcacaagaccaaaagagattccctctcgtaacaaaatgacaactagcgacaaggaatcattcagacaacagagattcctctggtcctctgaaaatgtcatttgtttgtagttataaaaagaagaatctggaatgccagagattccctacctaaggaaagatataatttaagtctttaacgttttctgtctttaataattaaggtttgtaatgttttctgtttgttgagggcctatatatatggcctctcatttctgttaaggggatcaagttttctaataataaaaatcttatctatctttccaaatatgtatttctaaatctcatctctgggctatttctctactacgatagatcataaggatattatcagtagctctacgactaccaccaagaagatatataaaagcaaagatagtaggtgtcaatctcaaaagcataacctacaaaggctaagaggaaaagccaatgttagggaaagcttgagtttgattctgactatatggattagcgttatatctctttctactgtatttcactcatatctactacacactaaatgg

SEQ ID NO: 11493 - DNA, 617 bp, Cannabis sativa
catcaatgcattgagttgacggttataaacttttcatatcatcgtatgtgctattgttttatgtgcaatttgaataatttggtgttaatttagaaaagtaaagttgttgtcaaaaaaaaaaaaaaacattaattaaaacaatatctgatatctcaataataaattagtttgacgtgatatatattgtggctttttttattttctaattattaattaagtccaaaattttcaaatttagttaacaattgttattatgaattgttggttgtgtgaatagtagacaagaacttgaacaattcattactcttgactagcgtatttagaataggtaaaatacttttgtacatgattataagctcttctccgacaatatggttagtgcttggaccataaactatctttgaaagtatcaagatgctaatcctggtgggtcagcttctatgggtctgtcctctgtcgtctagcaatgtgagcaatggaaagtcttattctaagactgatctggttcttggcgagttcaatctttttgtggatgttgggattcgttacaataggaatggaggccttggtttacaatcacattaggcatgtccttttttcgagtgcagctccatgcg

SEQ ID NO: 11494 - DNA, 1155 bp, Cannabis sativa
gtgacatgattttgtttcgttgtttggttctttgttgttctttgatagctcgctatcaaatcactggtagtggttgaaatccgatattaaattgtatcaatattgatattatactttataaaggtgctaagtttcatatgtgcccttttaacatttctaaaaaaaatacttatttcatataccaaaaaaaagattcaaacaagtaactgatttgtatagagttgtgtactaatttaaaaaattagagtttttcgttcttaagtttatatctataggaggttgccttattcttcggtcaggcccgttggggttgtcttttattattgtgattcgatttttgctactatgattagtcttgtgtttgtgatatgtttttgagtgttttatagtcttatctctgtgacatggttttgagtattttagtcttgtctgtgtggtacggttttgagtattttagtcttgtctgtgtgatacggttttgagtattttagtcttgtttatgcgacatagttttgagtgttttagttttgtctatgtgacatgattttgtttcgttgttggacgttcttcgttgttctttgatagctcgctatcaaatcactgttagtggttggaagtaacaagttctttgtaattgaaggagttattagtagtgtagttacgtactcttgcaaaataattgagtgctcaaactacgaaatttaataaatttgttgcaataatttttactattgtattttttgagttagatgtaactaatataagtgtttttaaggtcaattttgttattgtaatctttttattttaattttatttttatttttttatcaaatgatttgtgaattagatagctaaatattatttagttcgtttttttaattaaattagtggctattattttaacggattggtttaatatagttgtatgattaatttattaaaaaaaatatgccaaagaaaataataaaaaaaaaaaacttatttaattattattatttttttaagtaaaaataaaccgagatctccccttctcctttgacactctctctaatcactcctcagtctcacggcccaatttcccagacggacagaccacactgactgggacacgcctgagagaaacgacctgcgggaacgaagcttcaacttcaagtc

SEQ ID NO: 11495 - DNA, 813 bp, Cannabis sativa
agaagtgaacaagaacaattgctgagagctactgctcaatacaaaagaaccctctcccctctatttattctaggttaattaggatttttggtctttaaaaaatcttcttaaactattgaaattattgaatttaaggatttttgtcaaattttattcaattttactaattctatgatgatttatgtactaaatcatgtttttcaaactttgatatctaccaaatcatacctctcaaactctgtcatgtattaaattatgctctctgaactttcatctatgttagactttctttactgaaattagattttagtcattaaatctaacaatctcaatagttcaagaaggattttaacagccttaaaagtttagattgcataatttgatacatgtcaaattcatgggacaaaaattctaattagccattattctaattccttactgttggcgtatcacataattaaatgcaccttactaacactcatacccctcctccccttaactaaccagatgacttggaaaatacctatcacagggttatgaaattgtcaagcagatacttaaatcaattgctgaattgaggcatcttagcaatttggacccctcttacattttacagtcattaggtgctcatgcaaatgtgtaatctgaaaagccttaagaacttgagtgcatttattgtgggaaacaattgtagagccaaaataggagagttgggtgagctttcagattttcagtttaaagattgtagtgaaagcttatgatggactttgagatgaggtgaaaaaactaatgtagcagaacatgaaagagatt

SEQ ID NO: 11496 - DNA, 512 bp, Cannabis sativa
  modified_base (384)..(394): a, c, t, g, unknown or other
ttagttttattatttagggtgcttttaaaagcatctctataaaatataagcatagatgcaatttcaaattgttttggtatttacaataatttttttatagtcgtgtgtagattatagttattttaaacattcggtaaaattttgaaaattttaaaataatttattagctaagcttccatttttacttatagcaataaatagagatatttacggcgaacccttataacatttgtaattgttacacattagatcttaataaaaaaatgtggcgacaaaagtattttatcttacgattttattacagtcgtaccttttttggctgttaagtgccgattaaacctattaaataccacgtggctacatatttctttagcttatttaatnnnnnnnnnnntaatatgtcaccacgtgtttctgagttgatacttaaaagatcaaaaaagggtacgattgcaacaaaatcgtaagataaagtacttttactactatttttttgattaaggtcatatgtg

SEQ ID NO: 11497 - DNA, 640 bp, Cannabis sativa
gagtaaacgctctaattggccatcatttcatctttacccagcaacagaccttatctaaccgtgcctctctccacagacctgagttaggccacttttccagcaataagagacctccattaaaaatccatggctgcttattcagaatacccactacttcctctcgggttttaaatgtgattcctgcaattgagtcttcctcatcttcttctaaaaccttaacttcccaccctccaattcctttccacatacggttaaaaattgttgtgaacagagattccttaatctccctcttggcaaccagtctgcctaccagagaatgttcaccaaaagaggaggctgcctcctcattctcctcccaatcctcctcactactaacccccaatttacttgtcattggaacaatgtcatccacagtctcactcaaattccctccaccgccgccagttgccatacataccagtaaaacaaaaagatcgatcattctgcagttcagaaactatagcacagaagagggccctttaaactattatttgatataatttatcatcaaacaaaatatagctaattttcataaaaaataaataaacaaaataaactgtcttcataaattttgggattgcaaacaaaattaaaatgaata

SEQ ID NO: 11498 - DNA, 609 bp, Cannabis sativa
ccgtaatagcccacttctctcctccaagtcgatggtaagtgttgctggtttactctagaatgtctgcttcaagcggagccagatcactgtcaacattggtttggagcctttctgaagccactagatggttagtgactggtttggattctttaggtcccaaaaccaaattagctagttcaactttgtgtttggtggcaatcacagtggcccgttgacaaaaatcatctatctcaacctcaaatttccttaaggagaattgacttgatgcttcaagttggacacatgcttcttgtagcatctctaatggacaaatagtcaaaagtaagttggatggaggtagagaagaaagagatacctttctagactggttctaaaggaatacaccaaaactaaggtttgtgtccgatgacatatatttgagacttccttcccagtacgggaacttctcctaggtttcaaccccttattcattttctcattcccaaagaggccaaggataacagcctcttgcaccacagccgtaggtgctaattccttaattcctgtctgagaagatgtccagacttgcttttctcctttaatgatttgatagtctccttggcctctttg

SEQ ID NO: 11499 - DNA, 541 bp, Cannabis sativa
atgtaagaattaattttaaatatttaattctaacaatttgttcaaattttttgtaagtcaaaataattgagattcatgaaactcaatcagcgccgaccaatgtaatgtcccccaacagtacaatgttaatcccatccaatttttcgcagatatgcatgttatgacacaggtattgggtgagtggtcacaccacttgagagagaggaatggaccggttaccgagatttagggtcggggctaagagggcaactcctagggaaggtccctctggacaacctattgtcacccaagagggagatgaggctctgaagcgaagggtggaagagcagaaagcacgaaacaagtggcaacaacaaatgattaacttagaatcaaatcatgagcaagtttcaacaacaaatgatgcatctgaccgacgccgttccaagattcaacatgcacctgatgccttcggttccacagattccaccatttcagcctcctagcgttgtgttttcttcacagactgtccctcttgatgatgacgatggcgacgatgacg

SEQ ID NO: 11500 - DNA, 699 bp, Cannabis sativa
tgctcaagtgtgcaaggatttgggaaattttattggtagttttgttgaggcagacaaaaagaattttctgggtttatggagagattaccttcggatccgggttaccttggatgtttctaaacctctcaaacgtcgcaagaaaattctcacagtagatggaaaggagttttgggttaattttaaatatgaacatgtgcctactttttgtttcatatgcggaatcatgggacactctgaaggtttctgcccccgtctgtttgatactccgaaggatagtatagtgaaaccatatggcttatggatgaaggcgataacaaggaggaagaatgttactatgggttcgaagtggttgcggtcttttcaagatttttctgatgagaagttgggcggtgatgctagtgcaggagcgacgacggtggatgggaatgataatcacgtccctatgatcatggaggggatcgtgggtcaatctgctactgcccataatcgtggagaaaatatggggtttaatggtaatgagacaattgggggattagatattgatagtcagagtgatgagttggctcatgatgtattagtcattactgatactaaaaggaaaagaattgaaattgaattgaatggtcttggtagtccacgtgatggtcaattgggcttgaataataattcttttaccactcaagaattcggcccaagtgg

SEQ ID NO: 11501 - DNA, 591 bp, Cannabis sativa
acaatggtattttagtaattctctaaaaaaaaattgatattatatactttgtgaagctggagacccttaattaattagcataggttaattaacaatattttagatattgtattgtgcaaaaattattgattcaactttttattttaattactaaacgacaaaatagatcttatattttttagaataatacaaatactacaaaaaaatcttacttgtagtcacaataaaatttgtaacaaaaagtaataaaattatgactaattataaattattatttttatgttgttaataaaatatacgtagcaaaaggtatatattagtcacaaaaatcacgatttgttgtgactaacatttagtcacaaaaaaattatattgtgactaaaaatattgtcactaaaggtagttattttttacagttaggacactgaactcaatttttgacaatttttttaatataaccagcttaaagataactcctagcatgaacaaatgttgatcaaatataattagttttatcataacacctttagattaggttattattaggatttactttgacaaaaaattaatttagagtactatttaatacta

SEQ ID NO: 11502 - DNA, 752 bp, Cannabis sativa
cctattcatccatccatcttagaaatttgcgtctctattgtgtgaaggcatcataaccaatattgtgtggttcttcaatttggccaacttggtagacaacttctctatgtctggccaattcaaagtcttctccaaagtccacatgaggctcaccaatagatgattcgccaatccacggccacatttccccagcataatactagggaccagagttagtggtgttcgggggttgctccacattggctaaaccctcagtacaaggtgccaatggaaaatctaccatgggcagtagaggctggtcattatgatcagccgagttagcatggttgacttgaccaattatgttggtcaagtttgtaatgcctactgagttggcagggttggccacatctgtcaaatttgtggtgaatctattggtggttggaacatgaaaatcaagattaggagtcatggggtcttgaggaagacttgatgaggcaagagttatagacgaagttctccttgttacaaccatggtgatagatcaagtcaatcgacaactctcttaatgaaagcaccaagttgacctcaaatttggccaaccgaaagtcgagtcgtatttatgactgatatcaccacgtgtacacaaaaagaacaagtaaattaaagggacacaatatttttatagaggttcaacccccttagttagcggataatgacctactctctgttaggttgtattgatatttgagataataccactcatatcacaa

SEQ ID NO: 11503 - DNA, 980 bp, Cannabis sativa
gcaatgtatgtgtcgttgctgcctctggtgaagagagtgtagtctgcttgagactgagtgaaaccttcaaggatgagagcatcggtcaactttttataccattgtctagatgattgcttgagtccataaattgacttgtgaagtttgcacacgagactggtttctgcagataaagaaggaggaagggtaagtccttgtggaatagtcatatagacttcctcatggagatctccattgaggaaggcattatttatatcaagctgaagtgtgtgccattgtttaatggctgatatagcaagtaacatcttgaatgtgaccattttggccacgggagagaaagtttcaaagaaatcaagtccctcttgttgtgtgtatccttgtgcaacaaggcgtgctttatgtcgttcaacagatccgtcactgttgagtttgatcttatagacccaacgacatccgatggcacgcttatttggagggagtttgacataggtccacgttttgttgttgttgttaagaagaagagctaacagttcggtggccatggcttgattccaaacattatattggacagcttgtttgtagtgttgtggttcgaaatgggcttgtactgcacaaataaaagctttgtgagctggggacagattagtataagacatgaatttatgtaaaggatatggtgtggaagattgatcttgaattaaagaatggcattcgtagtcacgaagatagcttggagtcttgtgaattctgttactctttcttggaacagtaggattgtcattattagaattgacaatgttgtctgctggtgtggatatatcagtttgtacagcagtgggaatttcacttgatgcagcaggtgtatcacttctttgttgcacagcagtgggaatttcacttgctgcagcaggtgtatcacttcttcgtgttgcagagtcattattagagacatcatgtgttgattgttcctgcataagact

SEQ ID NO: 11504 - DNA, 508 bp, Cannabis sativa
atgtcactaattcgtattgctaaattatacttcactgtgacttgcatagttcttgtgtgtgttttttctcttctttctatgaccacaaactgatattaaaagtaaaagttgatgaatgataatattacaacaaggaccatgttcttcagggttgtctattgttgttttgtcaaaaactatgctataactccatggccaatgtgtaaaggtgtttgttcggccaaatccgaagttctttctacttttaggaggcatcagtattaatagttttcatatagggttgttatgaaaggtgacaacaactagggggtaatgtagtgttcttttaataataagcccaagagataaacttacattacacatccttgtgtggtagtctatgaatcacctctaactgtaaatgggagtatttactggtttttaaattattaatatgaagattggtgggtttagtggcaggtgagggtgaggctgctattgaaggagacaaatccccatagaaatgcaa

SEQ ID NO: 11505 - DNA, 826 bp, Cannabis sativa
gtgaggtgaatcggccctgcaaagtcttacaacaaactgagttaactgcctctactgagtcacttaggaagacaacattagaaatggccatcctatgagctgattcagcaccccatgtcaatgcagcaacttcccctggtagagattcagagtaatggaagcgcttagtgaatatatgcgagactaccccttggtcactcctaaaaatggcagctccagcagacattgtatccccaattgcgatatcagtgttgcaaagtgtccacccaggggggggctgcaagacgcaatggttcgtagagatctccagggagtggatattgatcatctccaagagcctttggttagtgtgaaacagaacagtaggcataggagtttcaattgcatggtgaattctgttgttgcgctctttccagattttctcaaatataatagcagccccttctaagaatgcgttgaaagtgagaccacttggacggttagaatccaccttgaaccaactcaaccacgcatcccaatctaagtgtgttgttgtgtcagttctccaatgccaaatgcacccaaaccacaaggcccttgcaaaggggacaattccagaaaagatggaagagaatcttccactaccaaagtacacatagggcatttagagtccccaatggagaacatggaactgagcttgcttcgggtgaggaggttgttggataaaatcttccaccatagcatctttagtctactatgcatactagccccccagataattcgccacttagcatcactagtatcattaaccaccacatttttcactaccctataagcagatttgata

SEQ ID NO: 11506 - DNA, 813 bp, Cannabis sativa
aaaaaaaaaaaaaaaaacatccatatagtcagtctcaaactcaggcttttcctaacgttggcttttcctcttagtctttgtaggttgtgtattttagattgacacttattatataaattttgcttttatatatcttctgggtggtaatctttgaactaatgataatattcttatgatctatcctagtagagaaatagtccagagaggagatttagaaagacatatttggaaagataaataagatttttattatttgaaaacttgatacccttaacagaaatgagaggccatatatataggccctcaacaaacataacattacaaaccttaattattattaaagacttaaattacatctttctctagatagggaatctctggcataccagactttttttttttttaataactacaaacaaacaaaattttcaaatgaccagaggaatctctgttgtctgaatgcttccttgtcgttagttgtcattttcttacgagagagaatctctattagtcttgtgagtagtcactggtcaaggcacacgaaacaatggacaaacacgtcataaacacagatgagtatttttgcagtggttcaggagttttactaatttttgttaatgggctcatgtgagggactaagactcatgtactcctctgtgtcttttgttgccacttgttgatgcaataggtttgttgttgacaggtggagaaatagacagtcccctacatatttcttcatcaaggtcattgagtttttcatcctaggtctgaaatcgggttaagattcgagtttgagatcgcctttgggattga

SEQ ID NO: 11507 - DNA, 699 bp, Cannabis sativa
tgcactcaatcggtttgtgtccaagtccaccaatagatatttaccattcttcaacttattgtgaggaagcaatatgattgaatggacagaagattgtgaacaagcatttcaatcattgaagaaacacatagtagaaccccctatcttgtcgaaaccaattatgggggaggtgttgtatctatacatggcggtaactgagcatgcattgagtgccgtattgatgcgtgaagagaagaagattcaaaagccagtgtactacattagcaaacagcttgtgggagcggagtcacgttatcccaccatggagaagttggcctttttcctagtctattcatcaaggaagttgtgaccttacttctaagaacatcatatccatgtcctaaccaagtagcccctacgacaagtattaatgaaaccagagacatcatctcgacttcttaaatggcctatcaagttgggtcaatttgagataacataccatcctagaacaacaataaaaggcacaagcacttgctgatttcatcgccgaatgtactgggtttccagtaaaagacagtgcaagagaattaccagagtgtgtatggtggttgtttgtcgatgggtcgtctaacgagcatggcttgggggcaggaatcattcttgtcaccccagatgggtatacgattcattttgtcctgaggtttgggtttgaagcatcca

SEQ ID NO: 11508 - DNA, 811 bp, Cannabis sativa
  modified_base (424)..(431): a, c, t, g, unknown or other
  modified_base (688)..(699): a, c, t, g, unknown or other
gaatggtgtgggcaggactataatgcacctgaggtgaaccggtaggggtacccgcgagctagctgggctcggggctcctggtgagagcgttacaatagcgcgcgcgcatgggggacaatgtgcggctcgctcggacaaacccccttcagacaggggtatgtgcggctcacactgaggttcctcggccatagaggctgcatacaacctcctgtctcggccatcacccagcttccgcgcgggcaagggtatgcaatgcatacctttgtgccccaatcttattttcgtcatatcttttgattcaaaaattatttttcattgaaataaaattcaaattttggtagaattttgtgtagaatctgaattttcatttaaaaatctaattattagaataaaattaattttttattaattttttttaattaannnnnnnnagttttagatattagtagccttttaatttgaaaatttgatttttccacaaaatatcttatggttaattttgaaatttttgattatttttgtttattttttttcaattatatgatcagatattactcatttaattattaaatttgaaataatcttattttgatattaaaatattaataaaattaacaaataatctagtttaaattttaaatttgttagccatattagattttccaaatttgttatttttgaaatatannnnnnnnnnnnaaattataagattagaaaatgtttttataacattttatcttattagatatttattttaattaaatttaatttttggcaacattgacagtctttgcgaattcaccagagacaa

SEQ ID NO: 11509 - DNA, 863 bp, Cannabis sativa
tgattaattgctattttagtttttgatcaaaattctccccaatgtatccacattttgtgggattatttggatctaaaataacctcttccagctcttcaataggtttgagctgattattttcgtcttggattcatggatctagatcttcatcttccttctcgccttcttctgttatgactaccatcaattgatgattggctcttctattttaaagttctatgcaataaaattcacgagatagtaattggtcgccttggactactcctactcccgcttgtgtttggaactttagggataagtgtttgatcaagcttactgtccctagtccaattaatgcaggatgacccatcaatacattgtaaactgatggaagatcaacagctaagaattcctacattagcgtcgttgataatggtggctctcctacagttaatggaagttcaatgatgccctggatgccaacactatcacctgtgaatatacataaacttaccatgcaaggcttcaacttcatattctctaaccccattttcttcaatgtatccttgtaaaggatgttgactgaactctcgttgtccaccaatactctcttcactctctttggcaggctgaactgttacgacgagaggatcaacatgcggatactgcacatgttttgtgtcctctgagaaaataatcgaaggttcatataattttgcttttttcaatggttctagagcaaacaccgatcgtccattatttatttcattgatatatcttttttgggcatcattactgtttccagcaagatgcggccctcccaaaatgacaagtatatcctcgccctcaatagagggaggttgaattctctttttatttgggtt

SEQ ID NO: 11510 - DNA, 648 bp, Cannabis sativa
aaactaataaaataagtttagaacatctattataggagcgtatttaattaaaagaatattgctattaaagcactttctctattttattctttaaaatacattactaaaaactctatcaccatatattaacttctttaaaatacatcaccaatttttttttttaattttaatatattttattaattttaaatatataatactaatacatgcacatatccccatataaaaataattattaagacccaaaataatttataaaaaatgtttagagtaatgaatactattctataaatgtagaacatgaataataaattttaaaaatactttaacatgaaaaaagaggttaaagcatttggtgtacttatctttagtatgatttttttttaaaaaaaatatttaaaatttttctattttagaaaagttgttatttttttttttatgaaatattttagagaagttgttgtgagtgctcttaaacaccttaagttgtccagcaccatattgatgtggcgtaagtggttaacaatttcttatattatttattaaatcaaaatttataggactcgatcaggcccaaccttgggctaaggcgaactaagctcgtagctagggcacacccgaactaggcccaaaacttttatatagtaa

SEQ ID NO: 11511 - DNA, 757 bp, Cannabis sativa
gaattaataaaattttggaaaaagcaataccgtatatatcaaaagttgtaatgacacttacccacaatgtaattatagcatgattgttagaattttttttatcacttataacatatatgtaataataatatttaattttatgaataaacatattacatataattattacaaatgtatctgtaaaaatttaaagattttagaccttgtgttttataaaagttaccaattacattctttgtttggttaagtgacaaaattaaccctgtattttctaaaatggtaaaaataggatcctaagcttaatttttaatttttttaattataaccaacttgctgacacgaacaaatatagaaaatgtaaacagttttgtcataacacatttagatcagattattattaaattttattttaacaaaaaaatcaattcagagtcctatttgtactattttaaaaaatatataatttattttatcatttaacaatatatataaaatttaattcattttaaattgtatcatcttttttaatttaaattctatcatatatttttaaatttaatttttttttctaaacggtgtcagttaaaaacaccccaaaagaacttaaattaaatttaagtttgaataaaaaagatatatacatgtaaaaaagggacacgtacagggaatcctaatcctattattattattaaaagtaataattaaaaattaaagagagattacgtgtctcatgatctttttattcatatatatatat

SEQ ID NO: 11512 - DNA, 631 bp, Cannabis sativa
atgattaatttgccggtctgcttcagcttgttccatgatcattctacaggttgtttctacatacccgagccactggtcctcgaagattcaagctccaaaatcgttgattgtggtactttgcctttcaacttcatgttcatcgatcataattcctctttagccgcacgcatagacccccacttgcctgatcttctcttttccaaaaggcctcatctctagaagcccggctcgcgaggcgtccctctcgcagtagggttccaaacctcggtcaaagaaataactcaggtctaagctctcaacttcaaggaaggaaactgaaagagcataaatgtcatctacctttccaacggcaagtcactatagtgactcgtcttcgtcttcttcctttggattattgagccaaaaatgctagagtcgactcagcgactcactacagcaatcatcatgctcacggaagcaaatactacaatcctcctgctgcgagaccgtcaccgagtcactatagtgactcgtcttagccgcacgcatagaaccccacttgcctgatcttctctttgccaaaaggcctcattctagaagcccaactcgcgaggcgtccatctcgcattagggttccaaacctcggtcaaag

SEQ ID NO: 11513 - DNA, 703 bp, Cannabis sativa
atatattgattgatgattgattgacagaataattgattattatagtttttttaaatttatgtatgtatataaataaaatttacgattaattatatttgatttaagttttaatatttttttttggaattattttttattttctaattttttttaagatattttatatttttgtagaaaaattattaaaataatagtaaaatattaatttatagatttatgatttttttttatagtagtaaaatattgatttatagatttatgctttaataaaatattaaaattgagaattatggagagaagagaaaaataagtttagaatgtcatgtcatcgcctcatacttctcatttatatatatatatattaattaaattgatattttaatgtgatttcatattttattaattaaataatcatcttataattaaaattaataaataaaataaaaaataatgaaagtttaaaataacccagataatatcaagtttgttgacaaatcaatattttaaactcaaagcctattaatatctaaaatcaatttaaattaataaaaattaattttaatctgataattagatttataaaaaaagtaaaataagattctacacaaaaatctactaaaatttaaattttatttcattaaaaataatttttaaaagttgaaaagattgaaaaatggcgaataaaattgccctttttcgcgca

SEQ ID NO: 11514 - DNA, 663 bp, Cannabis sativa
ctatttccccgaaacttttaatataagtgtacctatgataatacctgataagcaagaaaatatttaattgtaatacttaaatgagataatatataatattatttgattagttcaaaaaatatatagatttgaatggtcagtatccaaatctaacatttttctcttcatccgatccaatttaattagtctttgaattcaaaaaattatcatctgattcaattgaattagactttaaaattcaatctaattattagttagattggatcgatttttaaattagatatctaattacatacttaaaatttaatattaatttaaaaatataaaaaaaaaatacataaactaaatatcactatttatttaagtttaatactccaaaaatacaatctttacaagtttaatacaactaaaagtttaaaataattaaagcaacaacataactaagtaataaaatagaacaaaacatcatgaaaataaatacacaaaacaaccaatagttacaaattcaacacagaaaaaattcaataaaaatataattaatatatattatattttttaatattgtttcatttttacacttcaaaacttttttttttttacatttttacggagttctacatagaaagctctattgcaaattacggagcaacctaaatcgcaacc

SEQ ID NO: 11515 - DNA, 856 bp, Cannabis sativa
  modified_base (562)..(571): a, c, t, g, unknown or other
tcgtgtcccacttattttacgatattttatcgtggtgctaggcaccatgaatatctcatagcaatgctcatataaatatggagggagctctttttctctctctctctctttttttttttttttgaatgtaaataatgcaatttattaataagataaattaataataacaatttctatcaattcatgaggggggttgtagtcataaaaaacacaaattcatgaaaaataagaatgcctcgttaaaaaatgcgtcgccttgttagtagaacgctgtacaaaattaaaattaagacaattcatatcagtcatcgaaagctgaaggtaactggactgagctcttgatggcttgaacagctaccaaacaattagattcaagggagacatcttgctaacctttgctctaatccaactaagtgcatatttgatattagttacttcagctactttaggagaacacgacccaccttgtctattgaggcaactgtctctctctctttgaaaaaatcatacaattttattaataacaatcaattaaaagaaaaatctgcaattcaattgagannnnnnnnnngttagaaacaacaccaaaataagaaaaaacgagctaactaagcttgattcataaatctgtttacaaaaaaagaatattaaaaatcagataaaaaaattacaacatcataattaataacagacacaacattagatatattagagcatgttcattcaactctttaactaataaaataattaaaaattaaatataataaaaagaaagaataattagataaaatattaatttttttgtaaaatttttacatttatatttttgattattattttttatatttttacggta

SEQ ID NO: 11516 - DNA, 787 bp, Cannabis sativa
gacagcgactcactaaaactccactggaagttttacaaggagaaacttcagccaataaggcagcattcagataaggcaatgcatttccgagaggtctaggtgcagctcgataggtttcaaacaataagacagaacctttctgctgagaaacttttcctgttgattcccagtttggaattttaatgcttagaagtatactcttgaaatctagaggtggcctttgaagaaactcttccaatgtcaaagtttcacatctggtaccactcatcacctctaccatggaatccgcagctagaagaatggtagcaatgtctgaaggaaaatgcttcctttgtgccatcaccaaattcccccctatactagctatatttctaataaatttgctagcaattttctccatatgattcgaaatcttattgaacaccatctcgcctcttgagggaaatccaacttgtttagcatcctttagaacttcaattacttttgaaattgtaacagcagctccaaatttgaacccttctgtatccattcgaattgttgagagttcaggtatgccttttagatcaatgtactggtcatagtattctaattccttgtagtaaccagaccctgtgtttccaatcactaattttgttttggtcccttctccaacatcaataaaattgagcaagttttgtagctcttgaatactagaaggacggagccaactatctgttttagaatccaaagacatggcagacctgatttcctctttcaggaacttaggaaatgtacaaatctcattgtt

SEQ ID NO: 11517 - DNA, 1599 bp, Cannabis sativa
  modified_base (233)..(235): a, c, t, g, unknown or other
gtatcaccggaaagttgccggagtagttgtcggcaccgaaaagtcgccggcagtagaaaagtcatcaataccgaaaaaagttactagaaaagtcacagtcgtcagaaaagttactgaaattagatgtctcatatataaattataatagaaccgattctataacataatgaataaaaacaagtaacacaataattctaaccgtttataattaaaaatagaactggttctataannnaatgaataaaaacaaataacacaggataattcaaaccagttataattaaaaaaaacaaagagaattagttcctaaaatactgaaatatagttttaagacataactagttccacaacaaaattagtaaaaatgaataacatataatacctcataaaaccgattatactttatttttgaaaaatgtggggatcaattccaaaaatactgaggtataaatataaacaaaatcggttccataacaaaataaataaaaaataataacacacaatgacacaaaatataatacaaagaacctgattatatttatcaactagttaaaaatttgaaaccaaaaaattagttctgtaaaacaaccacgataaaaacttatacacaaaaaccagttaaataaaaacaaataaatcaaaacctagtttctagaattaactaaatcaaaaatcggttcccaaaatgactaaattaaaaaccagttccttgaattaattaaataaaaaaatcgggttctgaaataaataattcaagaactgttttctgaaataacttaaataaaaaatgaggtaggacataaaataaaatagaatcagttctacaataaaatgagtaaaagtaaataacatacaatagctcagaaaatcaattctaattaaaaaaaaaaaaagaatcaattccaattatactaggacataaattaaatagaaccgatttcacaacaaattaagttaattactcatacacaaaattttatcatcaatacatttgattgaattgaataccttaggttgaaaaatctttaaagtataccattgtgtaatgtgatacaccccaactaaccaaactatgaatatttgtgttttacaataatttaattttacttaaataaaatcataatgaaatattttagtttttattttgggccctaaaaaaatgtagaccataagcacgggcttagcccaactatgtctagggccggccctagagcctaattaagtactgcatgatatatattaaaaattagggaagtttataataatgtatagggtaaattgcggcataaatacctaatgtttcaaattttatatacttaaatatattatctttatttttagaggtaataatacccaatgttacaattctcttacacccattactaccactttcgttaactcataaatatcgacacgtggatggtccaaatgcattacattaatttttttattttaaaacttaatattctcaatatcaaaaactaaatgctacttgttgaaagaaaaaaactagttctcataacaattttcacatggtatgtgacacttcaattcaataaccatgtttcatatattacactgagagagagagagagagag

SEQ ID NO: 11518 - DNA, 804 bp, Cannabis sativa
  modified_base (476)..(476): a, c, t, g, unknown or other
  modified_base (576)..(582): a, c, t, g, unknown or other
tatacctgtccctgtgtgaggtctcacccctctgattcagtttttgtggcccagtcaaacggagattacattgcactattctcttcaagtccccctttcaagctaaacaagtacaagagatatcaatgccatggggtatcagggtttcccatcaagttggcattcgttcttggggtgactttatgaaactttttgcaatataataatatgccatattttggattataaactagatactatgtaaacttttagaatttaaatttttaatcaatatttggattatactattatgtgttaaagagcttttattgttgtttaaattattgattcttggaaaattattaataaatttgcaattattggtgtgacaagtatatatataggaatggtaaaagagacatcgtgtcgggccgggtcaataccaggttgagtccgacccggtccaattgacattcctatatctattctatataaantgtgcctatataactgaaatttttgatttatgagaaattcatgggtgacttttaatttttgtttaataaaataagaaaatattatttatatataataaannnnnnntaaaacaaatcctattaatatttgaacagatattaaatattcgagaatcacacacaaaaacaaccgacgattaatctcaaaaatagctcttcccctttcaattcaaacctctttcttctcttcttcgtccatcgacgaaaccctagcgaggtacctcaggtccatagaagtatttaagcatcaaaattaccatccccacccaccgtcaacggcagggagatc

SEQ ID NO: 11519 - DNA, 660 bp, Cannabis sativa
agaaatgaaataaaataaaaaacacaacctcaattggtgaacacagtacacgactcaagtgatgagatgaggctagtgtgatagtaccaaataaattctagtgttataacaaaaccaaaattaattttcaaactgcaattaaacctgatatcacatacatatataccatcttaagttggaaggttaaattcaacttaatacatgattgagtggttggagagaaaaatatatttaagagaattttcgtccttgacacactacaacaaattttatgttattgtttagtcacaataaaatttgttactataaataaaaaaggttaattaacgttaaattctcaataatttttctttgtttacaattaacccccaaaatctaaattttagcaacaaaactcccaaaactacaatactgttagcaaattacaactatccaaattttgttgttaactgccagattggattgtccacatggacacagtatacacgtggtacaattttattggcccacgtaaataattatattaaaaaaaataaaataaaaaataaaaagagatataattttttttcaaccatatcatatttttttcactaatatttttcttttattcttcttcttcttttgtctatacactgtcaccaacaccaccattcatagtca

SEQ ID NO: 11520 - DNA, 1009 bp, Cannabis sativa
tttttctcacatcttataggaagactatcaacatggtcaacaaaccaaagcgactataatagtatctaaacaatgctcttttgttagggacaagattgaaaacgtattggttgtgcttcttgtgagaactaagttggatatgcagtagacttcaagtgattcatccttctaggaaggagggttgaaaacgtattgaaatccaagcggtgttctcaattcatgactaaaggtgaaaaccaagttggatatgtaatagacttcaagaaattcctcattttaggaaggagggttgaagacgtatcgaaatctaagcaatatttttggccagtagtttgaaattttttttaaaataaaatacaagtaaaaaattaaatgaaaataatgactgagtacacacaataagtaaggcatctgtatgttttttagggcacataaccaggtatactacccctcaagtgagctaggaagtttgaacgtcttcaaattcttagtcacttatttaaaacatagcttgtgtaggagacaaaaatatgaacttttgtgtaaatatcttcaattttcatttcattacacttggaggtttacattaagaaagagaatttacaaagaattacatacaactttagaggaatgttagacccaaatacccccaacctattagtaataacgatgcaagtggtctgcattctaggcacgagggatctctgatccatctattctcttaagttgaaatgttccatttcccactttgtgttgtatttcgtagggtccttcccaattacgtcctaagacccccactcccgattctttcaaagctaggaagattcttctcaagatatgatctccaacatcaaatgtgcgactcctgactttaaaattaaagtgccttgcaatttggccctggtacatctcaagttggacttgtgattgttccagagctcttcaattaaatctaatgattcttggagcaaagagtgattctgaattgggtcataagtgtctcctctgt

SEQ ID NO: 11521 - DNA, 686 bp, Cannabis sativa
tgtctaccatctttcatttatcatgcaatcatgttaatggaacatgttttcgtgatgtacggccaaccaacattcactagctatgactttaatatatattgggcttcactcagggccggccctaggcataggcgggctaggcccgtgcctagggcccacactttccgggggcccaaaataaaaaaaaaattaaaaaatttattaggcttttatttaagtaaaatttaagtgtaatataagcaaaaaaaatgcatagtttagttggttgaggtggatggtataatgtttaaggtcatgggttcaaatcccataacactctttttttttttttattttgtttttatatatttttgagggccccaaaatttaatccgtcttgggcccatatatttttagggccggccctggcttcactcaatgcaaaaggcccatgcctcagtccaaatgacaacaacaacaactgaattgctacacataagaaatatgtcaatgttatctccatctttccagtgcgtggctcacgaagccacttcctccaggagctccacgtttttgagctggtcttcacttcccacaatttgatgcaacatggccatcatgttctcatattttcagcttttcaagccacttcccctactacatagtatatgaatttttacttgtttggagagcaaatgtgcactata

SEQ ID NO: 11522 - DNA, 562 bp, Cannabis sativa
tcttaatcctgactttaaatgaacatctatttttgttcattgagttctttgatttactcattaatgtttctcagataagataattcttacaacttctattttgagagcttaataacatgagtggctgggaacatgttatacaataatggaattcaagttttcttaacggatcgaatagtagttcccttatagtgttaattctgggagtgccaacagactagatccaaatctataataagttataaattaactgtcatgttgaattaatgatacataaggagtcaaaagataattagaagggtaaaatagtaattttgaccaactataattatgaactaataattagagggcaaactacttatattgattatatcaatgacaagtaagaattctgtaaatataattttatattgtcaaagagtgcaattccatatttatagtggaataataataaaattaataaaacaagttattctattgatgagatcgataataattaagtatttattggagcttcgaaatataggttcatggttttcaagttacctctatacaacactgt

SEQ ID NO: 11523 - DNA, 586 bp, Cannabis sativa
  modified_base (322)..(329): a, c, t, g, unknown or other
  modified_base (356)..(362): a, c, t, g, unknown or other
tgtaatctccaccaatattctttaacatttttctattaattgttattctaaaattataaaatttgattgtttgatgcaaaaataatgcctatggtggacactttattttgtaagaaagttgtgtgtgttatgtgtattcttgtattctttttagaaaaaaaaaatattgtaaattgatcaaagttagataagtttaatcgtatagagaataatatatgagatgcatacatgggtaaaaaaataggaaaacttacaaaaatactggaatttgggttaacttacaaaaatactgtcacacggaaatcttttcaaaaatattgtnnnnnnnnaaaacaccagtagaacacaaaacagannnnnnnaaaacaacagtagaacaaccgtgaaaactcaacaaagtatactgtagtatgaaactcataaaaaaatacagtaaaaaatatcattcgtctggcagtatttttgtaaaaaaaatgacaaaaattagtataccatgtaaattttctaaaaaatattgctaattaagtactcaaaaaaaataactaaacaaagattacaaacaattgatgtaccaaaaaaaaacaaa

SEQ ID NO: 11524 - DNA, 642 bp, Cannabis sativa
tagaaaatgataaacaaatcgatcacaaagcatatacttacaaactatacagataaatatgtgatatattggggtttacttgacttggccacttaatttaatatatatgagagaaatttctttaatggccacaacaaaagttacatttcccctgctatacaaatattaataaacaaaaatatagactaacaacaacaaaattaatttcattcaaatactataaaataaaaactgtctttagagtctcatctaatacttcaggtgctaacgaaactattttagtaaaatttaattgacttatttatttgattttctctatttttttgataattttttatggtattttgtatttcaaaatattgtgtacatttgttctcctaaagttaaattttatgaataaaaatttattatttccaccaaaacattctcagctatatgtaatttaatagttgaatttaaattaattaggaactcatataattaaagacaattgatcgtaatgataaaattttaccttgtaaggtgtaatattgctattagtgtaacttaatattagatttcatttattttattttaataaatattatataaaattgttaattaattacatggcgacagttcattatagtgctagatactatg

SEQ ID NO: 11525 - DNA, 1094 bp, Cannabis sativa
acatcacctgtagacccggtattttcgtgtcgtgcttgaattcgtaccgtgttttactcatatttttcaaacaggtcagtctactttaatattcggatttgaattcgtgctttaattttttatatttttttttacaattactaaagtatatgtatattttatagcttaattagttatatttatataactttttaacaatattttataaataatcatataaaaaaattattagcattattaaaattcgaatatttacttataaatactcaaatttttatatcccaccttataaattaatgtataaatcttatttttttcatatttaatgattttaactacaaaattataatttattattatatttaaatttcattattattttaattaacttatttacaatcgataaatgctaataataataataataataataaattataatatttttaatcgtgttgtgttttttgggcttgtcgcgtaacgtgtctttcgagctagtatatttgtgcttatgtgtcgggcttgtttgattttcattttcaaccgtttatattagggtgctagtatgttgttactagccaaagggtaatatctttggctagttattcttagaaattttgttgttttttttttttatttttttagtaatattgagctagtgatatgagttgcgtgttaatttttaagtttgtatattaattttattttgaagattgtcattctaatataattgtattttttggtttggtgttgcattattttttcaatttcgctagctctggagacaattattaataatgggaaggtgtttttcaatgtgatgtggtgctgttttgaagacgttatagcttgattgtctaaattttcaggggcagttttgtctcatgtggctcgggattagaattctccagcacatggtttggcaaagcatgcccttagattagacgttgagctatcttggttcaaggaggtgcctccgccgtttgtgaattgctgctttattaatcatgtgtgattttgatcaccgtgtcaaaaaaaaaataccaaagatatttataccttttttctcacattttttggtaactgatcttatg

SEQ ID NO: 11526 - DNA, 801 bp, Cannabis sativa
ctggagctggtgatgggaggagttatgaaggagctttccaaggtaagtcatttttgatagtttctttttgtccttcttcacttaatttggattttaatattctttctctgtacagaccggtctgaagatggcttatgcttattctcgagctaagttggctgcctctaagaatgctgccatttccaacactatgcggacggaagtggacttggccaggaaggatgccgaggaggcccgggttcagcttggggctgttcggatagagctaggagaggtcaataagaaacttcttgctgctgagaagaaagttgacgaactgaccaaagatctacaagccatcgatcaacttgaagccgccattgcaatccttatctaaggaagtgaccagccttcaagaagaaagggaggttctccggagtgttttccgtaggttggaagaagagaagaagaccaaggaagaggagcttagagctgaggttaagaagtataagtcagaggtcgggcagcaccgatccgaagtggagagactcgaagggaaaatgaatgccttagagacaactggtctcaagattttttatgacttttggaaggccaatccccaggtgaattttgaattatacttggacgattccaaagacatgtttctcgagtactgcactgctcaggcggcctacggggaatttgaggcgaccactcccacctctccacttaaccaatgtgttgaagtgcgccctgctcaaacaaatgatcctccagctccagctgacccagccgacccgtacaaaaagcctaggacttcag

SEQ ID NO: 11527 - DNA, 678 bp, Cannabis sativa
tgacactaatgcgtctacaacttgcattcgtgagttatggcgtggtctataaattatttaggcatatttttttaatttgtatgatttcttattttgattttgggcaaatactattttgaatttagtgttttgcaaaaattaccaattaaactttctgttttgttaaatgataaaatagaccctatattttttaaaatagtaaatatagagaactcaattttcaacaattttatttttttaatataaccaaatttaagataatttttaatactaatagatatagaaaatgtaactaattttgtcataacatctctaaattatattattattaagttttaatttgacaaaaaatcagttcattgtcctatttgtacaatttttaaaaatatccaagcctgagacaaagaagaagaccttgcagtagagccaccacctccgccacatgagtagtaaacccaactgttgctggagaagtcgttgagcaaaggaactccctagcccgattcatcaccaccgccccaagtctaatctctcaatcttgatcttaatgctggcatccacaaatagatcgacatcgcccaacaccaaattagtgtttgagtttccatgaaaaggactactcgctcgtgaaacaattggcactacatccagaaaaaaaaggagtttgagcatcttagt

SEQ ID NO: 11528 - DNA, 863 bp, Cannabis sativa
catacttcgtagaggtcctggcctactttggtattgccccactccaacttgggccaataagttatattgtcctatcgagcttttcctgtgctttaaaaggggtgaacgaccgtctgttggaatatattttataagaatttaaatttactaacaagtatgttcatcataaattataatctaacaccataaacatgaattcctaatacagtgaaaataaacatatataaatttaagaaaccttatattgttggtagcggaataatatgtctccttttattcagatctctaatccttgttcctttctgttatagagtattaacaaaatctgagcttgcttctccttcaagtgttggattcttcacagttttccacactataattgagtacttgacttgctatgagtgggcatgtactctttcattataggctctaaaattatgaagagggagagagaggatttcaaaattagtaaaggaaggaggctcttaagtttttctagttgtctgacaaaataaaaaattaggttaaatgcttgaaagcttggatgagaatgatgggccatagaatgatggccctactagtcacaatttttggaacaatatacttattttttttttttcgtttttttaaacaagatcaatatactctttttattggtataatctttttcttttattatagattgaaaaagagtgaatatattttcaccctataaatatataaaggcagtccattcattaaaaatattatactaatttgttttttaaaatttatttttaatacttttttttttaatttttacactaataatttcttttcgtattatatatacgtattttaatttatttttattttataatttt

SEQ ID NO: 11529 - DNA, 980 bp, Cannabis sativa
atgatacattatgaaaaagaaaaattgatataaattttgttgaaaaaaaaaagagttagtgttttttatttttatataataacataaaatattacatatttattataaaaaaaattaaaagaaaaatgcatagtagtacataatatttagtaaaataaaatatgagaaattaataaaatagtccaaaaaaataaacaagtaaataagataacacattttaattatgaatgaaaagtgaaaaaggtataattgtaactatttttcaacatactttagaaagttacacatgtcattcaattaaaaaaagagtgtaaaaaagagtgcaaaagagaatttacctagcactcctcttcttttaatacagtataaattaagtagagattaattaattaaatataaaaatatgtatatttatattgctaccgacagttcatagaccctagaacataatcactagatataattgaaaattggagacaaaatacacacctagctaaaaatatatatatttatataattataagtaggagaaatgaaacatcattaagaccatttctaatagaccatttgctatggaatattaaagtgcttaacactttaacattatgttttataattaataaatttaaaataattatgttttataatttataatatttattaaattaaaataaataaaattaaatattaaattacaccaaataataatattacaacttataaaaatactaaaaaaaatatgaaccgtataaatgtccattaacatttctctttccaatatgttgtagaaagtaagtgggcatctgaaaatatcatcttttgtttattgtatatggcaaagactttagccaatggcctctaatttttaactatagttgattatattatagtttatattcgctcatattaaacaaagatactaacttaaatcgatgtataaaatcgcgtaccaaaattaattacttataaaatttaatgat

SEQ ID NO: 11530 - DNA, 690 bp, Cannabis sativa
gaatatttaagatattcaaactttgttaagaattaataataaaagttagtaaatatataccccaggctagctagaaaccgatcaacatcaaataagtcggatatttataaattgacctcacaacctatagcataaagagtactacaaaattaaaaatttatttatttaactacttagtagttgtataatttatgactagttaatttattactaattagctactaatgattactaattagttactaatgagtaattagttagtaataaaaaggtaagatcctactagtttaggcctgttatcgtgattttatattaattgtgcaatctgttgctaataaacgagtttgttgaaaatcgtaattaattaaaactttccttaattactttttaattaaaaacaaatatccttcgcataaattagaatcccgtatttaaaatatttaaaactgtattacaaaagatattagatacaaaagttttcgcctagcaactattcaatattcaacttgctgtctcgaagatcgtacgctccaggtctaactgtcccgacatgtacaattttcatctcctcgcactcacttctgttcagccttagtctgtgacagtcagagccccatgatgtgaaggggaaagactggtagctgtacaatctcacattccctgaggaaggtcatgtgtgatgatttctga

SEQ ID NO: 11531 - DNA, 957 bp, Cannabis sativa
ctgcacaactttgcaggaaatattgagatgtatgggattttagatgcaatagcttctagatctattgatgctcgcacaagtgaaaactcaaccatggcaagtctttttataattgatcggcttttctttcataccacaaggttgcagtcacatcattgtcattagccattatacctttccgagagatataattaatctgaattttctaaaatagatgtggtattaaaatctctatgaacattacttgagtagatgcttgctaccatatttaaataatttttgttctcgaatcttttcttttgaattatgtgatatgaatcatgtatttggtccatactctcttttaggttggtgttggaatgtcaatggaaggcatagagcagaatcctattgtttacgatctcatgtctgaaatggctttcctacacaagaaagttgatgtcaaggtaatctcaagttctattatttatttttattaatattttgatagttagaatgaaaacacaaatagagtttttagaccagaaacatattaattcatccaagaaagctgttctagctgaatctacattgttcgttcattaattctacatgcatggatcagaccatttgtttttttttgacagttttccataatatacatacggagtcatacccgtaaataaatttactttttatttatttagtgtacaatgttcttagcttagaacattgcaaaattatattgcttttaagcttggatttttgcattttctcatagttacaactcacacctttgctaggaaattatgacatagtacaacagccaaagaatgttagtgacttggcaaggaaaaatgttcatttctacatgtttattgatgaagagacagaaacttatttgaaaattttcagtgtcttagaaagtggtaatcggattggattgtggagaatattgtagttcataatattccatac

SEQ ID NO: 11532 - DNA, 578 bp, Cannabis sativa
tataatgtttgtaaaaggatatgttgccctagatgacaagttgtacagtttgacagattgagttatataaattttttaattcataaaaaatataaatatgaaattgcagtctttgacaatatagaaacatatatttacaaaatatttatttgtagtctattaatataatcaatataagtagttcagcctccaattaataatagttcataattagtgttggtcaaaattaccattacccttttaccgttctgattatcacttgattccttatgtaccaaaacaaagaattttcgatttcagattatagagaaagaagggaaaacgaaagggttgaggaggttctaccccgtggaaacgctctttaatagagctttagtgttacctggtcgtgaccaagaaaccaccggtttcgcttggtgggccgggaatgcccgacttatcaatttatccgataaactgctgggggctcatgtggctcatgctattaattcaatgtgaacaattaatctataacttactgtacagatttaaatccaactattatagatttgcacctaatttaaatattattaatttaa

SEQ ID NO: 11533 - DNA, 591 bp, Cannabis sativa
tggtaaaatatttccaacagtatacatacatatatacaatacaatacatatataattataaaatatatacgtacattacatattcaataaaatataaaatgcataaatatatactattaaagtttatatttttacctattatcgaaatccgaccactaatactgaccaaaattcggccaccacacaccaccacaataacacaatcttaaaaatctagaaaaaccctaaaaaaattgacaaagtcaaaaataaagcaatgtaagttgctaaaattattagagattatatttataccttaatagacattgagattcaacgatttctctaccaaaatcggagctacaatcaccacaactaccacaatcaccacctctaagctcagtttaccctgaaaaacaaaacaaaagatgatcaaactctcagaatatagttttgggtatgaaaaatgcaagatttttataaaatgggtgaaaacggataaaaaattgagaaatgggggatgggaggcggtggttgggctagggtttcgtgaaggggttgttggctattttatttggggagaagaagaagtgaggaagacaaatagctaaa

SEQ ID NO: 11534 - DNA, 680 bp, Cannabis sativa
ttcaataattcgtaacctagaacctgctttttccaataagaaatctaaggttaggattacttttgaagatattgaggatgagattgaattctggaaaccttcaatagtgtgctatgtgcttggttctaatcccccattgcacatccttgaaggctttgctaacagaatctagaatggtaaaattgacagagttaagctcttatcacatggtatctttatcattcgatttcatagtcttactgttatagatgagatattgaatggagggtacatattcttcaacaaaaggccggtgattatgaaaccttgggaccccaataccaatttcaaaaaggaggacataagaacagttcctttttgggtttacttggaggagttggaactcaaatattggggacaaagaagcttattcaagatcattgggcaaataggcaaaccggttatgattgatgccgtgaccaaagaaagagaacgattgaactacccccgaatactcattgaagttagtatgaagcaagaactccctgcaatggtggaatttgaagatgaagatggctgcaatgttttagttggggtccattatgaatggaaaccaatcacttgtggacattgtttaggtctcgggcacaccactgaagtttacaggaaaaaaaaacgagactaggaaggaatggattgtt

SEQ ID NO: 11535 - DNA, 621 bp, Cannabis sativa
ttttttttttgatccatctcatttttttctattcactatcttttctctttgttttttttttaattatctttagtctctttgttttttctcatttactctaatagttaaagtaataaaaatgaatataaaatggacataaaattatatagaatattagaatactctacgaataaattggagctccaattaggactttgacactttcaaaatctctcaagaaattgaaaacgcttgataaatgaaagtgagattataaattcaataaacgaagtagattaatttgcaataattcaaaaagaacatcataagcaattaaaagtacttgcgagctgaaggtgagattaatttagaatagtgagaatttttttaaaagaaaagtaatatgtatatgttctcactacagttaaatgacagagagaataaaattagtattttttgtctcacctcattttttttcactattttttttttaattagctttagtctctattttcccatttatcatacatacataagcttagtttattttacatattatttagttttaacttacaccaagaaaggcaatttgcaacgaaaaagttgttaaataaagttgttaaattcgacaacattttgaaa

SEQ ID NO: 11536 - DNA, 740 bp, Cannabis sativa
catttataatcattgccaagcccttgattcactggttctccgctttagcctttcccttacctacacatggtaaacaacactagtgagtcaataaactcagtaagaaaaacatagaatctacaatgtaataccgatttgtacttaggctcccatatgcctatttacaagacttatcagatgctcaagaacattcttaacaaaagtacgacctctataccatatgcactaaagtaatcattctgtactagtgttggtagggctaaattgtactcccaggtaccattgagtgttgtaccacatgcattatgtactcatcccatactagtattggtaacactgtagcataccaacatgcaatttaaatacatacacacatgcatatacatcctttatgccaatcttacctcattttcaaattcaagcgtgttggtcgacccgaatagaaaacacgtgctgaacggaagcccaatgtcacattcacaaaaatgggtaaacaacttggataaaccttctcgaggatctaaacttaaaactagaggtttccttattgataactagcatggtaatattccaaatactgaggaaaaacaaaaataaaaggtctaaaaactgcacaaatcggtaaactaaattctcaaactggtgaactagttccttgggccctgcttgaagaaacagttaatcggttctacagaactggttaactggttctctgtaggaaaaggtaaaaacctcaaaac

SEQ ID NO: 11537 - DNA, 759 bp, Cannabis sativa
ttttgaaagttaaccttttgcctcgaggccctttcatacatcttaagaatttccttaatgatattgcaagactggatggatgcattacaaaagaggaaactatcatccgcgaagagcagatgggaaatagcaggagcgcgtctagcgactttgtagaccataagtgaatgatttctctctttctgctggataagggaggacaggccttcagcgcacagcaggaagagataaggggagagggggtctccttgcctaatgcccctggtcggaataacattgccgaccactttcccgttaaagttgaattggaaggtggctgtggacagacaagccaagatcaaattgatgaaccgctggggaaacagaaatttactaaggattgcagctatgaaagcccattccactctgtcgaatgcttttgccatatcgagcttaacggccatccaacctttcctcccacgagtcctgagctttatggaatgagcaacttcctgggctataataatattatcggagatgaggtggccagggaaaaaagcactttgattgggagaaattaggttgttaagaaccaatttaagtttattagcaatggactttgaaatgatcttgtagacaatgctgcaaaggctgatgggcctgtattccgtgaggacagtgggatttttaaccttagggatgagggtgatgagagtggtgttcaggggtgctatatccccatctccattaagaaaactgagagcagcattaatgacatca

SEQ ID NO: 11538 - DNA, 633 bp, Cannabis sativa
  modified_base (455)..(455): a, c, t, g, unknown or other
aagattatatataacaactgatataaataaagtcgtctttattaacatgtcatttatcataaagacctaattcatatcataatgatgatcaatactagattggcctaaatccttagttatcaagaactcatgttcatgttattagtttatttaattcactcgttaaagtttctcagagaagatgatccttacaacttctattttgggaatcctaataacatggatggctgggaacatgatatataattatggaatcctaacttttttaacagatcgaatattggttccctttaagtgttattctggaactggaatattatgcacaaaattatatgggatcttgaattatacttccactagtgaattattgaaactaaaggataaagaagtaattagaaaggtaaaatggtatttcgatcaaaacaaattacaaaccaacacatggagggctaatnactggaattgattatattaatggatgctgcagttaaactcagtaaatataattctataattactattaagaatgcaattccatatttatagtgaagtaatcatgaaattagtaaacaagagattatttgattgatgagactcaataaataatgaagtttattatggtccctgaatcgt

SEQ ID NO: 11539 - DNA, 784 bp, Cannabis sativa
aattatttacaataattcttagaggcaactacgtagacaaggatattcagtaaatatatcaaggtcatgtcaatggcagtcagactaactgtcatgagtccattatggaaagaaatattaaaacctaaaataattagggaaactttcaaaagtatcttttttttcgttttatttaaaattttacggtatgaagtttttatttataaaaatacgcttataaagttttaaaattacaaaaatacactttgtttagaaaaaaagtaagaaaataactcaaaaaaataagaaattaacctcacgacagctataaattaagtataaatacactagaaaattatcaaaaacaaccagaaaaataaccttatgacaactataatacaactataaataaactatataaaaataatttattatttttattgaagatgtattgttataaataaaaaagttcaaaggataaaataaaaaggtttctgtattatgccttatacgactgaaaagtaacttataagacttaagacttatgcctttgattttgaaaactattctttaaccaaaaaaaaaaatacccttatttgtatattattttttatattatttttctgttacttttatttggtttttttttttttattatattttcattttttttttatagaataccataaaaatatataaaagaaaatcattcaaagaaaaatttaaaaaatagtattttttgtataataaatactaaatgcacataaaatgaattgtcttaaaatttggagtgatttttgtaatc

SEQ ID NO: 11540 - DNA, 1072 bp, Cannabis sativa
gaatgtattttcacctgtaaccccaaaagaaaacaatgagtaagaaaataacaaagtgaaggcaaggataagagcatcaacaaaaagaaaggggactgatatctttcaggaagctttaaagagatatgcttttctcatatctttatcattttgctgctacacttcttgttcttccttcttcggttcctccgcctctgtttttgctgatgagcttgcctcgtcgactagggcaggggttacagatacaacaaattcttctattgcttccaaaatcttagtgccatcgtcatccacagaagtaacctcggtcaccacaactacatccttctctttctctttctctgtttcaaccttcgaagcctcttgatcaacagtttttacctctgttttgcctcttcctcatctttcttcttctcttcctccttgggaggctcttgtttgtcagttttctcctctgctcatcaaaccaaaaaacaaaaacattcaaaaattattagattgaaaaatttagattcaagtggaaacattcactatcgattgaaagaaaaactcaccactaagagttgttacctattaaattttttaaaaagaatgactgcgatttttaggatgatgaatactgagaaataatatagagagtcgatagcaagaatgaagacaaaaaaattgacagtcccataaatggcggaaacgacaaattaaggttactcagaattgtagttcacggccgcaagttgagttagggtttaatttatattttaggagctttatttatattttttaatagttaacgatagagttaacagtagagttaaatttaacggaataaaaaataaaaactcccttaaactaagaatttctgtcagatagtcacttttaatatataaagattatatattattatttttaatatattatctatcgaataaaaataaaatgattagattttagtgtttttttatttttaatatattatatatgtaataaaaataaaaaataaaaaaatgaccgggttggaaggtaggttcgggtctaacctaaaacccagtgactataaaaaattaacccgcaa

SEQ ID NO: 11541 - DNA, 521 bp, Cannabis sativa
ctctctctctctctccttctctgtcagccgcacacagctctcaccctagctctgatgagccaccatcatcgagatcgacgaacacaagggcggacccacattgtagcgagaatgggcagtcgcctccctgaaaaagaatcgggaaaaaaatgtatagatatttcagttagttacaacatatgtttgtaataaaagatgatatttataaatataatattagtgtaatggtaaggtaagttacatatatgttagatgtcaaatgttcaaagcccactaacaacactttattttttttctttttaagtttacttttgctctctgttttacaaaaaaaaaaaaaaaattacactccccctcactttaaattttgggtatgccactccccacccagaaaccccaagaccctctattttgtctcttctctctcttcatggtggacctcgctagactcgaagctccacagctccgattgagccatcttcgagtcccaatgagccattcgatgggtctaaatctgatca

SEQ ID NO: 11542 - DNA, 527 bp, Cannabis sativa
tattctaaccctaaacttagagagtataaaaggagcctaatgactttgattcagtgaacagtttttttggccaaaaatttagaaaaactaaatcagaaaaagctttctttttcctttataattttcgagttctctttctctctccctttcactctcaaatttcaagttttgtagtattgagtaattgtccacacaattcaagacaatacttagatatgtgtggaagagtgtgtagaagaaactgttcattatattaaggaaagttatctagattcttattactatgtgacagaaaggaacaagggttagagtactaaatagaatgagtcacattatattttgctgccattaatgtaaatgaacctaaaatttgaggtgtttatttattattttaggaacttcatattttaggatattagattatatattgtataatcaacatacatgactagtaaattaagatacttgtaaatcaagtttcaacaactggccttagagtcatcgtagcaatttactttcatgttatg

SEQ ID NO: 11543 - DNA, 589 bp, Cannabis sativa
agaaactaatttcttggtatttttccgacgactatgctaattccgatgaattattttaaatttgttgtcggcgtcagaaaaattaccgaagtagttgccagtattagaaaggtcgtcaaaattggcattgtcactgaaaaaattaccaagaaattggtttcttgatgaagaaaccactttcttggtaattttttcagtaatttttccggtaacaatgccaattttgacaaatttttcggcatcggcagcaactccgacaacttttttagcaccgacaactactccggtaatttttcggcaccgacagtaaactctagtgatttttccaataccagtgacaaataaaactacctaaataaataaaaacattaaataagagatttgaaaacctagtttacgtatatatggcatatcaaataccataaaaagacttaaaaataaaataataccatataaattggtaaaacttaaaagtgtcacattttacataagaacttttaaaatctcatagtaagtgtaatttcctcttaattaaaactataggatttgtagttataattatttggagatatttaatatcaaattgtat

SEQ ID NO: 11544 - DNA, 522 bp, Cannabis sativa
aaatgacctaaaacaggtactaggtgccacctcgagacaaaacagaactcaaagaaaactcgagattttatacctgtagggcaaccagtcgaccggttcgggtgcaccagaaccaactggtcgaccggttttggcagaccagaaaattaaaggctttatcccccaaactcgaaccaaaaccaaaccatacctgcccaaacattccaaaacaatgtaataccacaaatacaacatattccaagctctaaaacacaacaattcaaccattgaatcaaaatcacatactcaagtgaagaaaactcaattttaggcatcatttaattcaatccaagttacgcaaccctatttctaatcaattcaaactcaaaaaagcataaaaacaatcctagaaacttaccccaaccttaatttaacttcacaacccctaaaaacctaaaaccctaacgaaaacctagtctaatccttaaaaaaaacaagaacaacgtggtaagaagcttacctcaagaattggataccactagg

SEQ ID NO: 11545 - DNA, 544 bp, Cannabis sativa
tttgagtgtcagggtcttcgttggctcggatactgacttggccttccttttagtgagttgtactaccatgtggcacatgttctttccacgtaagtatgcaacgtcatgatgacaaaaattggaataacaaaataaataattaactaaccttacatttaatcaaaattttgttgccacttgtgaaacttcattcagttaatcaaccagattttcaacccaaacactctaacaactaattcaagtgtacgtaatctattgtagcttaatactcacacaagtgaggtcgatccatagagaattgatattgaataccactaaattaaatttatgtttccatttggtaaaatcgataataatattgagtaattaaataataaaaattaaaagatagtaaaataacaataaaaaagatgtaattaactatggatgaataattaggaatataaatcctgttgtttcagttacacaattgttaatgtaaattattaattctctccctttaagtgatcacagattatacaaataaccctaactctactcagat

SEQ ID NO: 11546 - DNA, 523 bp, Cannabis sativa
caagaataatggcttctttgaattttttttcctgggaagagagtatcgaaggtgtctaagatgatgacaccatattttatgtaatttaatttgttaccgtatataagttcttttttttttccgtgtagccgtatatgtgttaaatttttaccgtttttgtacacatgtgaaaatttcccaaattgcaatgtactttataatcactttgaccatgaaaattgggtgtagtccaaaataacactatttttactcttctaaataaagaaaagagtagcagtaagaatacttgtataaatcttcctccatccttgcataatcttttactttttaagctttgaaatcatggaatgtttcaagtaagctttccagtcaatccatcttgtaacttcagccaacactttttcactataacaataagagaataaagatggttatgaagacttatctttcccatcacaaatcaggcaagtttgattattcaccactccaaatcgaaaaagtttaccatttgttgggagttttt

SEQ ID NO: 11547 - DNA, 575 bp, Cannabis sativa
gagcgtaaatatgggttgagctttctaatttagcacgaaaccggcatgagtttgggaggcacgaatacgatctgagacggaaaaatatgagtttggacatgacacgacacgatactgcaaattggataacatagtacaaagaaaaaaatgggcctaaacacaacacaatatgacaagcccaaagatacgatacgtaagcacgaataaactaacctgaaaacacaacacgttaaaaattcttatcatttaataaaatacatatttactaataaattcaaaatttaatcattctaattaattttttatatgattatatgtaaagtattgttaaaaatttatataaaaacaattaacactataaaaaatatatataatatattgattaactcattaattgtaaaaaaaaaagtgaaaagtgaagccagagtttgacccgtgacatatttataaaaattggtcggtccgagtaaagcacgacatgagtctgagcatatcacgaaaatatgggcttacatgtagtgccaggcttatcctttaaactattggcacaatacgacacgatcatatttttttat

SEQ ID NO: 11548 - DNA, 686 bp, Cannabis sativa
acttattacaaaatatagaataattcattgtagatgatgtggactgtaattactaatttaacattgattgattctattcctcatcaatttatttctatatttataataattattttcgttaaaatatttatatttatactttataaattgaataattaacattttcttttctatgaatgttccacactacttaatcttactcttaaaatatagattttgttaagaaaagttgtctaaaatacaacaattacataattaaaactcttttgttaaattatgtttctttttttttatctaaattggtttttagtaaaattaattcatttttaattcgcataattatttttaatattttgatttcttttttaattttcttaataattcaaataattttttaaaatttaaattaactttctaagatttattaaaaaaatgttaaatcttttttattttcgttttgaggaggttcgattcaatagttatcaaagtttaggacaacaaaatagctaattcacaaagacttgccaacatataaatggaataatgagacggaatataacagaatgactagatttctataaatataaaagtttacgaggaactatgtcattttaaatcataatgtacattgttgacctcaaaaattgatcaatcaacagtggggccgtataaatttgatgtttgac

SEQ ID NO: 11549 - DNA, 616 bp, Cannabis sativa
atatatcatatctatagctacctaaaacaaccaaaggagttgaaactgggaaaatataagataaacaaaacaaaacaaaaccctaatataattaattagtcgtgttaattacttataactaattctaatcaagttctaatactattattattgtaaaccattggagctatattacttatattactaaacaactgatctggtgacgtcaccaccgacgaacacttattacgtctattattattattattattcttactaattcccttcgctttgtttcgccttttattattataagccgaagttgaagaagaagaagttgacccagacgacgtcgttttgggtgatgacgtcatcatcactagtggaaaaactgatggtatttcaaagttagtccttgcctttgaacctctcagacgcctagcagccgcgtcgtaagcacgcgccgcatcttcagcagtgtcgaacgtacccagccagtgccggcaccgcccgattctgtccctgatctccgccgaccaccttccccacggcctcttcctcactcctctgtaactcttaacgttactcttcttcaccgaatcggaaacgaaactcgttgattcgacagttttgggct

SEQ ID NO: 11550 - DNA, 544 bp, Cannabis sativa
aattttctacccagcttcacttttcacagcacacatatatatctataaataataataataaaaaaacactaatgtatatataatacaatacataattaatcattttcttatatatgcatatacagtgatcaggaagattaatttatatatattaattaattatagtcggccacattaattaaaatatatatacatattataattgggaaatgtttttgtttatggttttgaaatgaatgacaaatttcaggatctcttaggtgtagatagggaccccattattatatgttaccatttttcaattttctatgattatactccttaactaaccaaaattaatgggtcaattttggtcattttgatgcatatatattataatacacatatatatgatatattattttcaagaaaaaaagattattattaagctatgttagtgtgtggctatcttattagttttcaagatagctagacaatttgacattgaataaattgaatacttgttcaatgatatatgttatcacttattagaatgtgtatatat

SEQ ID NO: 11551 - DNA, 586 bp, Cannabis sativa
agaatactgctatacttattgctccaatttattgtaaatttgtttcaagagatagtcaaactaacaagattattaagtttgtgttttatttgtattattgtttgaagtagcctaacattattatctcaaagataaaatatttttgttcatttacttataacatattatggactctactttatgcataagagtgattgccattttatgacttttgtaaaggtactcatagaattcgtgtgttttaatttgaaagtattgctattcaaaacttaatttgatatgttattttaatttgatatatacttatgactagttttaatatggatgtaaattgtcacagaataattgcaagttaataatgtttaaggtcatgtttaatcaattttaagattttttattatttttttctcaagttatttatttatttatttattttgtaattattgaagaagaaacaaaatagaaggaaatagagtgaatgataatcataggatcgcatattcaattccaatgatcaatggtgaaagtgatcattacgtagttaccaaaaaccctaaaattcaaagattcagcgagactcttcttg

SEQ ID NO: 11552 - DNA, 505 bp, Cannabis sativa
aaggtggacatcagcaaggcttataatactgtcaattgggaattcttgaagaatcttttgaatgaatttaaactcccgggcagattcatctcttgggttatgacttgtttgaaatcgacttcctacgccatcttgatgaatgggcgagtccaagggagtttccaaggcaagaaggggttgagacaaggtgacccgctttctcctctcttatttgttctaattatggagtacttgaccagaagattgatgctagcagcccatgaaccacaattcaggtatcatcccttatgtaaaagtgttaagattgttaacctgagttttgcggatgacttgatgatattttgcaaaggagatcttgcttccattcaggttataaggagggtgttggatgattttagtgctgaatctggtttaaccattaatatcactaaatcccagctttactttggtggtgtgaaaggggatataaagaaagcaatagtgacagagctggcccttcaagaag

SEQ ID NO: 11553 - DNA, 908 bp, Cannabis sativa
tttttttgattgttatatgaagtttaatggcagcccaagcttccactttactggtttttatggggctcccgaggctgctaataaatcagattcttggaccttatttcagcggtttggtgatgttgctccacttcttccttggctagctattggcgatttcaatgagattttatccaacaatgataaatctggtggagggttgagacgtgagtcccaaatggaagcttttaggactaccttggataaatgtttcttgcatgaagtttcttttattggtgatccttttacatggataaaaggccgtactgctgtcaatcctcttaaggagcgtcttgattggtgttttatcaacaatggacaactcattttcaagcaccaacattggaacacctggacttttttcattctgaccatcgcgccatagctgctgatttttcctgcatcacgcaggttgatatcccaaagagaagcaaaagtcgattccgttttgagaagttgtggcttgctgaccctgagagtgctgaaatcatttccaatagttggatttatgaccgtgctactgaccccattgctgctgtgattcacagtttaaacacatgtgcaacaagcttgcaaagttggcatataagcaaatatggaaagatgaaaaaagcattaatactttgcaatcacaagtagctgatttaaataattcctctacccgtaccagcgaccacctccatcaattgcaaagtgttgaatctgtccttgaagatttacttgagcaagaagaagtttattggcaacaacgatcacgggttgattggctttctagcggagaccgtaatactaagttttttcacgctaaagcatcctcacggaagtcaaacaacaatatcaagttccttctaaattcttcgggacaaaaa

SEQ ID NO: 11554 - DNA, 874 bp, Cannabis sativa
tcctcgtcttctgtcccaaccccatcttcgcccaagtccaaccccatctctgcccaagcccaaccccattcagtggaaacccaataggatttgaggaaaacccaacaagattcgacgaaaactccaactcagtaagtcttgttctttcttttctattttcttcgaatctcatgggtgttttttttttgtctctcgatcagatttcccttcattaggcaaagggccgaggtcaacttcatcttcttccttggaccttcgaagaggaagcaactcattctcgtgaggcctaaggtgagtctttttctccttcattattcaaatctgtaaattatatcatgtttgatgattatttttacttttttttatttcaatttggaaagttttcttacagggaaatttgaaaattatgataatactaaaaagagggttagcgatagtcttgccagagatgtatgtgctgcggtcaacgatgtcaccctccacttccaaatcattcgtcttccaggcaggtccaacactacacgattctctctctctctctctttttttcccttactctggtagagagaaaagaaccgtaggccattttgatagttaaatctaaaaacaatgaattgggtatttcttttggtttaattttattgttgttgttgttttcttttatatatataaatatggagtttaattttgttgttactttttagatatatgtatggattggtttaattttattgttgtttgcaccatgcagcttgaacatatcttcatttttctctgttatttttgtaattgacacgatgtagccagcctggccaaacactcttagtttttaaatcttgtcgttgtggtatggaaagaataaaagtttgctacg

SEQ ID NO: 11555 - DNA, 838 bp, Cannabis sativa
ttggctaaacgccaaattaaaacacttttggtgtttaagaaaattttcaaagctttagacccaaatatataaagctattcttgcttgatttttaattaattatccaaaatgaattttgacctggttctttttctaaaagattatttttaggtctagtgaacacataaaagcagtccagttttggtggcttaaaacctaacaagtgaaaactcaaatttattataagggatattaatgacacttaaccgtataaattaattttttgatagtaaaactctttaaacttgacttttattagttatttactttatccgttcaaaaaactttattaagtaccacagtagacataaaaaattttaataggaaatattgacgacaaaattacctgaatgctataattagtgacacctgactacataaattcattttttgtggtaaagtgacacttaaccacaaaaatcataaaaaaaatcgatttatgtagttaagtggctaatcatatatcccctactaaaaatttgtcacgtgtacattgtggtatgtctaccgtggcacttaacagcgtcttttaaacgcacgccttttgaacaaaatagataaatagctaacaaaaatgaaatttaaaagattttactaccaaaaaatcaatttatataattaagtatcactaattatagaatttaaatagttttaccccaatattaattattataaatttaaaatcccattttcgtagatattgttgttgcattttaacaataatatatgtttagaatgtctcacaaaaatctcaagaaaatataatcgtatataatttgtgaaattaattcctcaaact

SEQ ID NO: 11556 - DNA, 614 bp, Cannabis sativa
tctctaataccaactagcattcactttcaagtcgtaatcttagatttcatattttggatccaattaaatctgcacaaaaactcaaatctaatctaattttgaattgattactcttttaatattatattatttaatatttattaaaatatattccttttcaccttacaaaaaaataaaaagttcttaaaattatatatcttcaacaacaaattaaaataaacaaataaagaataccaaattccaagaaagaggacaagaaattatatgcagaaaaaaagtttattaaagaatatatttagatataaatatatacatttcatatattaaattttaaaatatatatatatgtactatatgtattagtttttaatttttttttctataaaatatgaattatatatttataacctttttaaatatatataaaggtgcggattggttggatttaatatctaatccaattttaaatttctcaatcttattcaatctacattttacaaattgaattgaattaaatcgtgcggattaaattaaattgagtattttattaacacccttaaatttttgaagttgtattcatatggaatggtattatatcacattgttttgttttg

SEQ ID NO: 11557 - DNA, 599 bp, Cannabis sativa
aatttttgaggttggagactaatcagcgacaacatcaagtttttaaggatttttaccgcaattacccatattaaatatgttaactactttgttaacttagttaaatgtttaattttttaataaataaagaattaattaacgtgccaaacttagattagtttaacacattgtgggacactattttttaacagagaatcttgattccttcagtagtggacatttaaattgtgttatatttatcatgatgtagagtgctccggtcattattttattataacctcttagtcattagtcaaattttgtatcttgtatctgaaaatatatgttgaaatatttttttataatggtgttcattatactcacacatcattccagtaaatttttaaaatttattgaataatttacagtgctaaaaataggttttaaattttttaaaaacgcgtggtcaactggaatatcagaaactctattttcggtaccgtaaactattcaaaattttaaaaaatttacaggaatgatattataattataacgaacatcgctataaaaaatatattctaacatgtggtttaaggcgtggaggttgattaagaggttgt

SEQ ID NO: 11558 - DNA, 1385 bp, Cannabis sativa
ataaaagttgctgagcttgaaaatgattgaaaaattaagggtaaataccattttggatcctgtgttttgtaaaaattattaattggactttatgttttggtaaataacaaaatgaatcctatattttctaaaatagtaaaaatagactttgagctcaattttaaaaaattttattttttaatataactaactttcagctcacttttttttagggatatttttatttttacattctaaaatagtttttttttttttacgaaaatctacatagcaactaacaaaataacttaaatcgcaactaccataacagtttaaatcgtaaaaaaaaaaaaaaaaaattaagaaataatacatgagatgattttccaaatataaaatatcattgtagttacttttaacataattatgtgttattttacattttattatatccatttatacataaaagtaacacataataaaaatgcatgattattttttaggggtttttacaccttatacgttaatttttaatttttttattttaaactgtggatagaattttttttcaaaaatattgtgtaagttttattccgtgtatattaagttttcacggttgtttttagttgtttcactgttgttttaattgttctattttattgttttacggttgttttataaaaaaacagtatttttgaagaaaaaaaattatgcgacagtaaaattatacttttgaagaaaatctagtatttgcgtagacatacctatttttaaatcattaaaaaaatacactctcaattcattatttaatatgactttatctacatttataaagtattcattattaaaatcaattacaatgtaaatgctagttttggtacgcagtatattagattgattgtattgtattacattaaattaagttataggttaaattttaatttatactaaaatattatatatttaagtgtgtacataaaagtcaatagtagtaaaactacatacaaaattattgtataaaatacaatttaataatactatataatacaaaaccaaacgaacactaaagttgtatttggttgaaggtaatgaaatggaatagaattaaaaagaattattttcattttattcatttgttttgttgtattttaaagtattaaaatatcattctaatcgaatgttcttttttatcattttggtagaataactatttcattttgaaatgaaagaaaagaccactctaatataatatgagaaaaaatttaatgatctttttatcaatttttttatacattttaaattttattatatgcattttatttctatcctaattcttatttttatgtttttattcgccatacctcacataagtgtgtaaatcaagagtgaatatatatagcaaaacc

SEQ ID NO: 11559 - DNA, 798 bp, Cannabis sativa
ttggtatttggatataaaagatgtttatttttaagctcaagagacattataagcaatttgaatgtgaagattgaagcttaaatgcctagaacaaaaatttctatttttgacaccattaatggcggtacactgagataagaaagacgatttctatctgcggtgttaagactattttcttgggttggtttgggtcgtgttgagtttctggccttcatggaaacatcttccaattaacagaacatgtcaaaagcccttggagaaggagttggcatctcgccgacgacgagatcgacaaagcttcgatttggtacgttgttaaacttgtttttttggctttcaatttttttttgcatgttatattgatgtgtaatgacatttgtgtttaattttaattatttttatgtatatagattgatgtttatggtggtatgtactcatgaagaagatgaaggaaagaagaagaagatagaaccaaaaaaaaaaaaaaagagtcagagtacgtgagagaagagagagaaagaatatatgaatttttttttaaaaaaatatttattttaaatattaaaataattttttataataattaaataattaaatgttatggaccaatatgaatgtgccatgtgtatatgaaggtacacgtggacattccaacatggcatttaactaatgaaaatggatggaaaactaaatttggtaacagaactaaagtttggtaggtttagccaccaaaatttgaatttggatggttaaatgcaagtgaattgagagtttggagggtttatccgcaaaaaactc

SEQ ID NO: 11560 - DNA, 690 bp, Cannabis sativa
ctctctctctctctctcttcaaggtacggcattggggattggggctagagtccgtacccggtttggtgccaaggtttaggtctgtgtccagggctagtgccaaggttcaggtctgggtacgagtccaagttctaggttcgggtctaactctggggtttgggctggggtttggatctgagttaagtaccgaggtatgtgtccggggtcagggtcggggtcggtttggggttcagatctgggtctggtgtcgaagtttgcgttcgtgtctgggtttgatgtcagagtttgagtttggcgtcaaggttcaagttcagagtctaggttcgggtactgaggtttcgggtcaggttaggtccgtgttaggggtttggggtctgggactaggatttgggtccgagtccgggtccaggtttagatccaaggtcgatgtcgtgtcttgtttatatcggggtctcaaagtattgaagtattttttaaaaaataaaataaaaacaaaaattatttttagaaaacaaaaaacaaacgcgactgtgttttaaaaacttcaaaaagtatttttttttcttatttttaaaaataaaattttgagaagaaaaaactcaaactatccaaaaattactaattagcctacaaagaaattttaaatcagtataattcaatccctgtttcaaaatatatataaaaaataat

SEQ ID NO: 11561 - DNA, 1133 bp, Cannabis sativa
attattatacgtataataagaaagtacttttcaccaatattaatcatttctatctttttaatcaatatatatatacaattcaataataataaatataaaaaaaaaatatcattatcatccttaactataataataataaaaataataataataataaaaaaaaaaaatatcattgtacaaccaaatagtaagacatcaatcgaaaaataaaataaaaaataaattaaaaacatattttttaaattctttcataatcagagatataatatctcaacgaatttttgtttaattgacaatttattatatatttttattttatctaaatataagtttggtattgtatgttttcaataatacttatttggtactttgtatttaaaatcatacatacttagtattctaaacttaaaattatttgataaaattttatcaatgcattcaaatttcaaattgtcttcagttttataaattttgaattcaaatttaattatataattacatataactaagaaccgtttggtcaaattgattaaatcttattttaggatactaaatatgtacaatttcaaaatacaaagtatcaaataagtattattgaaaacacatggtacaacaggtactaaataagtatattctctataaaaattgataaatcagttcgaaaagattggacttctaaattcttgaagtaaaaatgtctctttagttaaataattataaaaattaaaaagttaattagataattctatctattttttcattattaattaatgaattatttggtatattttaaaaaaaattgaaaataaaagtaaatagtttaatttattatttaatttattttatatactaaataaatttattaagaattatattaacaattacaagtaagatacggtaataacatcgaatttgcaaataatgatgagtacaaaaaagaaagatgataacaaaaattctaaaatcatatgattagttttttatagatttattaattgtcatatacattttcttaatttcaatttaatttatttaaaccatatatatgacttatttattatcactaaataaatcagtctattttacagaaatttatattatagtttatttaaaatttaaacaaatttgtatac

SEQ ID NO: 11562 - DNA, 519 bp, Cannabis sativa
ttttgccaccaaaataattacacaggtattgaaaatacaacttattaacttgcgtgttgggttttgaaggctgtcatggaaagattcggtctctctactcacttcatcaacttggtgatgtgttgtgtgacaacattgtcttattccatacttctcaatgggaagcctcgcttcaagccggaacggggtatttgacaaggagaccccatgtccccgtatctttttcttctctgtaacgaagtgctctctcggcttctctctttcgaacaagacagaggtctgctacatggtatcaaggtggctcgcaatgttccagctatatctcatcttatgtttgcggacgataccatcatattctcccgagctaatctctgggacatagagactttgaatgattgcatccaaaaatttgaagagtggtctgggcagaagtgtagcaaacagaaatctggaatccttttctcgggcaattattcaaatttgctcagggaagccattgaaaacaagttggacatgagc

SEQ ID NO: 11563 - DNA, 645 bp, Cannabis sativa
tgggtatgggttggttccaagttcaggtctgggtccacgttagggttggggtcggggtcctagtctaggtacacgttttttagatcccgttctggtccaagtttgagtctgggtccaggttcgagtctcaggtctgggtcccaagtttgggtcttggtctgcgcctgggtttgggtccaggtcccgtgtttcgatcccgacctggacctaggtaagtattcaggttcgggtctaggttcgtgtcaatgtcaatgtccaagtctggatcccagtttggtgaggtgcttggtctgggtccgagattgagtcccgagttcatgtttgggtttaggtttgagtctcagtcttagtttgggtttgggatcgggttcgagactaggtctgagctagagtgtcggggctaggttcttctctagttccaggtcccaatccaggtccaggtcctggtcagggtcacggtcgtggtccaattccagggtcttggtcacgttttggttcaagtttccattttgggtcccaggtctgggtcttgttccaggtcctagtccagcttcgagtccttctctcagtcccaaattaagacattaactatgggtcttgtctaagcctggttcccagatgccgatacaagatctggatcccaat

SEQ ID NO: 11564 - DNA, 571 bp, Cannabis sativa
aaagggaagttttatggttttaagatgaatgctactgtttctttaaaatagagtctagatgatttgaatagaactatttgctcttacaaatatgggggaaacaattaaagaagaagatcaagttgtgattgttcttaatggtttgcctaacacatttaaagaaataagaaatgttataatgtatagcagggacactctcactttggaagatgtaatgagtactctgagattaaaggatgctgaattgaattggcaaaaggcacctaagcaagaattaggattttatgaagctttaatggatcgaggaagacaacataaaagaggtggttcaagatccaaatcaagaccaagggagaccaggaaagtatcaccattataccaaagtaggtcatctaattagaaattattgggaattaatagccaagaaaaagaagaataaggaagaagaagacaagggcagtgatttcaatcttgtggtagatgacaactacagttgagatggagatgtgttcatagtaattgaggttcaagatgaaacttcaagccctggagatgcctgcactagttcaga

SEQ ID NO: 11565 - DNA, 954 bp, Cannabis sativa
accgtattccaataatgtttaaagaagagcaccgacatcccgtcagggccaggggctttatggtttcccatgccaaaaagagtattcttaatttcttctggggatgggcattttactagttcctctttttcctcctcctgaatccgctcttgaaataggtgagaacagttgagcacttggccattatctgatccattaaatattccggagaaaaaattcataaactcaagcccaattgatgccctgtttgaaatccactccccatcctgattcaaaatgctttcaatggcattcctcctatggcggatggtagcagagagaaaaaagaacttcgagcacttatcaccttccttaatccacgacactcgggccctttgcttccaatacatgtctttcctatggagggcctcattaagagagcgacggagcgagcattcagaattccaatcacgggagcccgcaggtaaactctgtatccagttaagccgtctttcaagatcattaatggttgtgtccagtttaccatattgagttctattccaatgcgaaagagcgaccctagtagcacccacccttttaaaggcacgagcaggggcccaagagtggacgaccgagttccaggcctggtcaaccaccaagctacttcgctcgtctctcgtccacccctcttcgaacttgaagtctcttttaacccttccttccatcccattagtaagaagacacagcggtcggtggtcagaattacaggtctgcaaagaataaatgacagagctttgggaaagagattgagccccaggcaccattaacaatacctttatctagagcggatttaacatggttacgaccggctctgtgattatcccacgtcatccgatccccctgaatattcaggttaatcagacctcgagagtcgacaaggttggaaatgaacggaatgaattggtccgtcccaga

SEQ ID NO: 11566 - DNA, 598 bp, Cannabis sativa
taatactaaaagatagagaagtaattaaaaggttaaacggtaatttgaccaaaacgcattacgaactaacacatggaagactcactactgaaattgattatatcaatggacactgcagttaaactctgtaaatataattctataattactaatgagctgtttagaatgggttaatgctagcaagagaatgataatgcgaaatattactttgtttgtttttagggtttaaccttacaatgttattctcttagtaatataagtacccttaaaaaaaggtgatgttgacaacttaaaaaagaatgagattgaattattcccttctattatattaatttgaaatttatttttttaaattaataaataaatttaataccatcaatattttgattattataataaaatattatgatatatatatatttactcaatgagattaattttttatttttaactgagttttttttatgttattagcaataatatatatgcattatacataaattttacgtggatagtgtacataaatgacataacgaataaaaataaataatatagtgataaaacatataaaaaaattcattttaattaataaaaaata

SEQ ID NO: 11567 - DNA, 536 bp, Cannabis sativa
ccttacaccattggtcaaaagagttatccacaaacataacaactctagtaacaatccattatttttactaattttttgctgaacaaaatgtattttagtaattttaaaactttacaagagtatttttgtaattaaaagttttaggttgtaaaattataaagaaaatatagaaaaagaatatttttaaaaattctccttaatattatatatttaaaataaatatatatatattctaaaatataatattttagtgatgtaaaagaaatagagactcgggtatagtataatataaaaatttaaggtaaaatagacaaaatgtaattttaatgatatattttaataaatagagtagaaaatcagtgctcgaaaatactaatactttttaatgacattattattattggtattgaatctcatatattttatattaaattagaaataagaaatctgattgtatcaaagaaaagatgatatttcattttataaggtctttagactgtaaaagaatgtcttttagcaaattcttcgagaaaagt

SEQ ID NO: 11568 - DNA, 665 bp, Cannabis sativa
ataatttagagtttatggaaaagcgaacacacatggccagttttacccaatactagtttacctaatttaccctcaaatagaggtgttcataaaataacaaatccgattcgcacgatccgatccaatccaatctgcaaagtacagatatccgcacttgtgcggatcagattgatcaattggaaaattaaaagtatgtacttgtgtagattaaatattgattgaaatgtaaaaataaccgatctaatataatccaatccatatatatttatatttatattttaaaaattatatatacaattaatattttaatgtaaaaaataataatttaaaattttaatacatataatataaatatatttcaaaacttaattgtataattcaattttatttataagaaaaatataatttaaaataaaattaaacatctttatacatacaatttttttcttcttgctttaatttgttatgtttagtttcatttagttaatatttattttcagaaatataaaacaacaataatttattttattttattgttagttatgtgaaaaaaaaatattttttaataattattaaataatttaatattaaaaagtaaccaatccaaaataatcaatctaaataacttgaaaatctaataaaaagtatcccgtctgtttcggacc

SEQ ID NO: 11569 - DNA, 626 bp, Cannabis sativa
tacagtcgcacaaacagccacaacaatcctatgaagaagattgcgatctcggtaatcattcaaccagacaagctaattcgagtaagacgatggccaaatggcattaccaagccaagaaaaaaataacatgtatgaattgcttgaaaaaagaaatttttttaaaaaagctaattataacagtattgaccaacctcacaatctatgtagctagtagaattaatggtgatacctcttgccatcatgtgatctcttgttaataagttattatgagaggcttgttaaaaaataaatctatgctttggtacggataatccacactaaatcattttgtgattatcaactttagcataaggagtaagaaaaatagttgtaaggcttactaacccaaaatcttcaccattttccagcatccaaaattgtcaattggtacggataatcgagtaaccatattcctaagattaagaagtttgcgctagtaccaactcacttcactcttctgaacaaccacccaaaaatctaagtgttttaagtttatggcattgatctaattaatccacaaaacattttgtttcgtagtaatagcccagatgtaatgagcaatcgaagccttgttccatttggaccct

SEQ ID NO: 11570 - DNA, 603 bp, Cannabis sativa
acataattatggggtatttgggaatgatcctacagtccgattgggtaccggacacttccgacaaagtcgatcactgcaaaagctatagtgcactaagttactactaggtcaattcaaaccgactatggagttatatatatatatcaggtccatcgccgcaataagttgtaaatcatgtatacctcacataattatgagttattttggaacgatcctacggtccgattggatatcgtacacttctgacaaagtcgatcactgcaaaagctatagtgcactaagttagtattcgacaaattcaaaccgactatggagttatatatatcaggtccatcgtcgtaataagttgtaaatcatgtatacctcacataattatggggtatttgggacgatcctacggtccgattgggtaccggacacttccgacaaagtcgatcattgcaaaagctatagtgcactaagtaatcattcggtcaaaccgactatggagttatgggtctaggttgatcgtcacaataagttgtaaatcatgtacaactcacttaattatggggtatttgggaacgatcctacggtccaattgggtaccagacacttccgaca

SEQ ID NO: 11571 - DNA, 697 bp, Cannabis sativa
ttacaaactaataacgtaataatgttgttcatcaaatttacaggcgtttaatattatcagtgcaagacaaatctcttaaaagaaacttctataacatggttagttatatgaatatattcaattagttgatattgaagttggtttacagatgtcttagagttgtttctctacatattgctattaatatacaattgattgttggtaaatgaaaaaaaatagaaaaaaaagtttttttaaagatgtccatttacaaatccttagttgcatttcagttgcataatagttgagcaacaaaaataataatgtataataaatacagggctcagaagtgacaatacatgacttgaacagaggaaaggaaatagtagtaagtttcttctattgcatacggattttttttattttttatgataattggctcgcagcatatataaaagttgcattatagctttattacagttttccacaagctgaattacaataattaaacctttatactcttatgtaggggtgttcgcagtgcgagtggtactgtttttgactattttttcaaaccaacccgtacatgcaatttttctaatttcccaaaccggacccgcaccgtgaaactaaaaaaccgcaaaaactatactacaaaaaatggtgcggtgcggtgcagtttttgcggtgtctgtggtttggactatcatcaaataat

SEQ ID NO: 11572 - DNA, 527 bp, Cannabis sativa
tcttaaaacatttttagtttcgatccatctaattaaagcataattaagacttaaaagtgtaagaaattagtaaaatttcataattaatctgttgggattgcaaacaaagtcccatattgactagaatgggaagaatcataggtatataaagatggacatatctctattagtatgaggtcttttaggaaggtgtccaaaaacaaaatcgtgagggcttaaacccaaagcggacaatatcatgcctggtggagagtagacgaattggagatcttgtttggtgtcttgtgttgaaagtcttcttgacaatgaaggtcaggaagcgtgttctgtttgtgataacagcggtgcaagatggaagatcgtttgaggggagactatgtagtcatgtgcttgaggagaggattgttgggaatgcaaacaaagtctcacattggctagaaatgaaaagaattatgggtatataaggatggatatatttttattagtatgaggcctttgggaaagtgtccaagaacaaaactgtgagg

SEQ ID NO: 11573 - DNA, 1502 bp, Cannabis sativa
accatagaatgtgttcttggcataggtggaactgctgggggagaaacatggacatctgaaactgaatgctgcagagttgcagcattgttattttcagcagtagcagttgctaaaatgatttctgcttcaggagataaagggacactgcctgaagcaataccaacagtagcaggttcatgttgcagaggagaatgaggcatttcagcatctcgaattgaagcaatatcagggggagcaacatcaggttctggtgtagcagtggaaactgaagtgctgttattatttgaagcagtgggagcagctgtatttgcagcaggaacagatggagatgctgtcgaaggaatggctgctgcagacctgaaatcatgctgaaaaccagtagaaaattgcatagtaggacaagcagtgttttcaggtatgttattagcaacagtaggtgacttgtgagtagcaggaaataataattcattaaaaacaacattcctagctatgaaaattctcccagcagcattttcacaaatatagcctttatgtttaggtgaataaccaagaaacaaacattcttccgatctgaattccattttatgatgatgataaggtcttaaatgtggatagcaagcacaaccaaaaggcttaagaatgtgataatcaggaagttcattgaatagagactcaaaaggactaagattatcaagaacaggagaaggcattctattaatggaatgagttgcaacattgaaagggcaaaaccaccaataagaaagatcaagaccagcttgagcaagaagggttagaccagtttcagtgatatgcctatgctttctttcaaccctaccattttgttcatgagtatgaggacatggttgttgaaaccgaatgccttgatctgctaaaaatctctcaaaaggtctgaattctccaccagcatcagcttggacagctttgatggggagattaaattgtttttcaacaaggctcttaaatttaataaaggtttcaaaggcttgagacttaagtgagagaggaaagatccaagaaaatctgctataatcatctatgaaaataatatagtatctatagttttctttagatggtatgtgagagggaccccataaatcagtgtgcacaagagcaaggggttgagttgctcgagactgagataatggaaaaggctaatctatgatttttacctaattgacatgctttgcagaacttaagatctttaaaggaacaagcaatattggcttttgtgaggattttccttagaatattaggtgcaggatgtccaagtttggtgtgccaaacattgatatcagtaagagtgtgtgaaagcaaagctgtagaattggacacattaggatagagagaaaatgagtctctattattatggtgattacaagtataggttgaagaatcaaccaatgtacaatcttgagtacaatttttatttgaacacaattggaaatcgacttgactatcagcagtagccaaatgcacctgaa

SEQ ID NO: 11574 - DNA, 1458 bp, Cannabis sativa
acttcacctttaagcaatctttaaatttaggggtataatggtcataattaattaccccacataaccccgatattctaatgtctataaatcttgccccactaaattttaaatactaaactatattaaattaacactaatggctaaaccgtgaattttttactgttaccggacataaaacatgaaaatattaaaatttataaataacatgcatgacacatatgagtgtgcagaaagtcatccaatccaattacaaccgaccgatctaatcccaatcgatctaataaaatcggatatccaatcataattagatcagatcagatgtaaatttgaaaatctaatcggatcggttcagttgttggatgagacattcgatccaatgatcatccaattatatttatatattttttaattacatttataatttaatatatttaatatattttatttaaacaatatgtttattgatttaatatatatttagcacatgacattaaagaaaaaaactttagatctaaaatattaattctcatcttcttaaacggtaataaaattgtcaacgcgtattaaatatgttatattttttagcagttttattatgtgatcatgaattaagttggactaaactaatatttattatgtatgttggattattaggttttaaaatattttttatatatatatatattctaatgaaattttatatattttatttaaaaaatatatttattgatttaatatatatttaacacatgagattaaagaaaaaaaactttagatctaaaatattaattctcatctttctaaacgctaatagattatcaatgcgtattgaataagttttattttttggcaattttattatgtgatcatgagaattaagttcgactaaactaatgtttattatgtatgttagattattaggttttaaattatttatataaatattttaatgaaatcaacttaaatggtagctaaaatagattggatggatccaatccaatctaatgggaaaaccaattaatgcatccaatggttagaaccgatccaatctaatacatccattggatcagatcaaatcggatgactcaatttgattatattggatcggatgatacaatataatatctaataaataattaaattggatcagttgggtccaaattcattggatgtgatccaatgaacaccccattgacacacatagaattcaataaaatcctcataattgagaaattatatcactaatgcctaaatctgacaataggacttattttctactaatgcataaataatcaagaaatagtaattaaattaataacgcactactaattttcatgtctaaatatgcgatcattacatgtaacgcactaatgctaaggcacgctacagtgctttttcacttacagtgctatctttgctatttaaaaaattttctttaaaaaacgtgtcaaattaaaa

SEQ ID NO: 11575 - DNA, 703 bp, Cannabis sativa
tgtcaatagatcaaagtagaacatcaaaaatcagcagggttattataaccattaacgctccctaagtggaagtagaacacatcacttctaaaaacctagcgtttagtgtaactctttaatgacttgcacaaatgtgttggtcactaaaaggttaggagtgatctttagagacctacacaaaaagactctaaaaacacagtgttagtgtcttacaatgtcggtcactaaaaatatgaagactcgctaaaaagtaactctcataattatttttagaaaaaaatattgacctatagtgacctacaacgtgtgattgggtaaacgtgtcccaacatgccttgtgtgtcactaaaattatttatttatgtaattttcaaaaataattagtctgtgtgtccccaaactcacaactgtgaaaacatttccaaacccgcatggagcgtcactatacgtgacagacataattaataataataaaaaaaaggacatgtcatacatactcggccctctctcttataaatcaatcacatatcttttattttaatcttcttttataaaaatcaatcatagatttaataatcccaaaaaaaaaaccctttcttttatttctctttaaatcctcgcctgtcccttcagcaaagaaaaaacttaattaaaaaaagaactaactgcatattaatataaatgctctctctctctctctctc

SEQ ID NO: 11576 - DNA, 554 bp, Cannabis sativa
attcaaaaaaaaaatgacattgtgctatgtaaaaattgggttatatttattaaaaaaaaaataatattatgatatatttgtatcaatttttagtattgtatttcaatgcattatggtaaaatttgatgtaaaatttattattttattatatttttaataaaatataaagaaaataataactttatcattaatataattatataaaataatataaatagtccatatttttatgttataactaaatatatactaatataataatataaataatttaaagtaaatagaaaaataatacatttatagttatgtaaatttttcatcacaataaatattgtgccaaatttaatacaatattaactataaaataaatttgtatcgtcttttgacacactattaaagtattttttttttataaatgaacgatttaagttttagatcactaatttgtttctccattagaaatactcttatttaacattttattaaaaaaaaaaacaaataaaactactattcaacctctcttactctctctttctcatcattacttaattagg

SEQ ID NO: 11577 - DNA, 508 bp, Cannabis sativa
aagttgtataaacattcatttctatttaaccaaatctagtatatgtagcagcaatcacagcatttattaccctgttttagaggctttgctgagttatagagcacctggagcagaggtctacgacagaggtaggccaatgtattagcccgagcaaagctttaattttgacagccacctgtttgagaagggacaatcagaaaagacatggttatgtgattcctctgtttgtgaccaaacaggacaattgacgttctgaattggcaaaaatctttttaaaatgtcacgggttagtagctggctgctaactaattgccaatatataaacctatgttttggaatcacaagtacttgctcttgtttaattttacattttggatggttttagatgactaattgtaatgaccgtcaaattagatataatgtttttaataattaattagaataatgataaaatatagattattatgtaatttatacgcataagttaattaaaacttgtttatagaga

SEQ ID NO: 11578 - DNA, 1356 bp, Cannabis sativa
ctcacaagagtgatgtcgatcccataataattgtagttaagtacgttaaaattaaacttttacttctatttggatatttcgaaattaaggaaaaattaaaactagaaaacaataaaaatagaaaccaagtaaattaatgtgtaaactaacaatgattagaactagggttttttattttaattgtatcaatctattatggcctaatataattcaattcttattaccaatttctatgcattagaaggtttactcaagtaatttatagtcttcttagatatataaatcttaattacatgcaaattttctactttcatgataaattagaacatgtaaagacattaaatacaaaatccctataagctatccaaaccacataggactctcgtcttatatcgaaattttttcctatttcactatagcataattgacattcacttctcagatttcgtatacaaatcataaacaattaattgatggtcacacaactaaaagaaataagtacgaataaaatagaacacatagaaaattggggaagaattaaatgataccataaacagatgtcaaacaatctccatcaataccctaataattgtttagctactcttgttcatcgtaacaatttaacacacatcaattaagaacataagaagaaaatagaaaagaagaaattattgaaacattctgttggaaagcattctcagtcactttgtttttctctaattgcttgatgaaaagtataaaaatccacttatttttatagccaaaaaaagataaaaagatagaaaaatatctacttttgcaaattcagggggcgggcctcgacactaggcccttagtgtcatggcccgtgttgtggcattaatttttcctttgatatttctagcacacgagcctcgacactagcagggagtgttgaggcattagaccccaaatttttggcagtaagcttcctgctgtgatgactgataatattttggccataactatttcaaaattgcttcaaattagatgattcaagattttttggaaagttgagagagatatctaaaacttttatgttttggctttttctaaaatctaatcagaaaatagtcaaattcaggcttgaagttcatctttattttttgacaaaattttctctattttacatatcacattttttcaaaattttaccaatgtatacattccaagtgtcaaacacataaaattaaagaaaacaaacataattctattccaaaaaagtgacaatgaagaaaaaaaaaattaactctaaaaatgacacgaattataggccacggtttagaatcgtcgactctgagaggaacgcctctttaaaaggagtatcaactctctaac

SEQ ID NO: 11579 - DNA, 573 bp, Cannabis sativa
cggatggctatcatgtccactccgggtgtggacttcaagaaagtaagtcctcttcagacagagagttctggatggctagatgttcttcttggaaggaaatcccggatagtcaactcgagctaattctttcctatccggatgctccttcagtgagtatctttggtccatgttctcagaagcacatttacttatgctaacatggagatctcgctcaaaggagagttggttaagttggttattgtctaactaacttaacaacctctcttcttgtggccacttactttaggatattgattctaagcagagccggccctgaattgaaataggctataggcgaaaaaaaaaaattggacctttactataaagataaatagtattttcaaaaattattaaaaaaaataaataaatgtttttaaaatgcaattttttgattcaggcccctaaaatgagtgggccctaggtgtgggcctagcccgtcgttgcccagagtcggcccctgatcttaagcctataaatactaccaacacttatcattttgagagacaaaatttagattgagagagagagagagag

SEQ ID NO: 11580 - DNA, 530 bp, Cannabis sativa
tatgtagcttgcatacaagatctggtgaactaggttgttcaaaaccaggaggctgcaacatataaacttgttctcacaattcaccatttaaaaatgcattattaacatccacttgtttgatatcctagtctttagataaagcaagagtaagaataactctgatggtgacatgcttgacaatagagctaaaggtttctgtgtagtcaaagccaggttgctgacggaaacctttggcaactaatctggctttgaacttaatgacattgccatcagagttttctttaattctgtatacctatttacatccaatggcagtcctaccaggaggtagtttgacaagggaatgtgctttgttcctttttaaggcaagtatttcctcagccatagctttgttccattgtatatgttgaaggccttgttgtagggatgtgggaacttaagtagctagataggctttaggctttctgatgccacttttttcacgagttcgcatgttctgtgtattgccagaagtaggtatgagaggtgtc

SEQ ID NO: 11581 - DNA, 599 bp, Cannabis sativa
agagactcaacttcagcgacagtatacgcatctttcctggtggacagggatgtaataaaaacagagtattcacgaggaagaccattgaagatggcttctatgtgatcctgagtcgaaagaacatgtccgattgaagccagggaatcaacaaggtgcttgatctttaagaggtaatcatttagtgaattggtgagtttagttttgcgaagttgagttcggaattggctgatcttggctcgattctgagcggagtaatattcttgaagattggaccagattgcagctgctgtattacacccaaccattcgtgtgaggatcttttcggacatggaagagaggagccaagaaaccagtaaactatcttgaatatcatattcaacgaagtcatcagagacattatttgcagcttcatctgcagcggagagaaactttgggggaaccgattcttgatcaagaaacttcaggagacgatggcctttaatggcagcatagacttgatgacgccatggaagaaagttgttgtcatcaagtttcacagataacgagtgactaaaggagatgctagttggtttaggtaacgaagtggaggaattacctcg

SEQ ID NO: 11582 - DNA, 1009 bp, Cannabis sativa
attaattggattatctgttttgttgaataacaaaatggaccctggattttctaaaattatacaattaagaccttgaattgattttttgtcaaaataaaacttaataatagtctgatctagagatgttatgataaaactggttatattttctgtatctgttgtgttagaaattatcaaaagttagttatattaaaaaataaaattgttgaaatttgaactcagtgtcttatttttattattttggaaaatatgtggtctattttgtcatttaacaaaacagagagtccaattaataacttttacaaaacacaaattccaaaatagtatttaccctatttaaaatattagttgatactactttttaaatgcttgtggtaagtagcatcatagtacttgaggtatttgtttcattatcattatcaagcaggcagttaacattatatttgatttggtttttgccactatatttgtcatttctcttttaagtagatgaagaacttgttggtagtaaaaagtcttgcaatttataatgtgtttcgctcatgttattatgaatattattagagaatatattaacattagtatatttattaattctatttttagtatatctaattgactaattttttattatttatttatatatatatctcggttgagttgtacattacttttgatatatattttatttgatttattcatttaaagaatatttgttatctaatttttttcactttgggaaagtaagacaaatatagtaagtttttaatgataaaatcaaatattttttagagttatctctttctagtcaagatttatatattattttgattttgaattgatattctaagtgatttgatcagatattgaattgagaaatttaaaatgtaaatttcattttctataaaaggaaatttgctcttaatgctcacgattctgtaggtacaaaaaaaaattataggttgactaaaaatttcttttagggaagtttcttatgagtcgtgaacgt

SEQ ID NO: 11583 - DNA, 557 bp, Cannabis sativa
aatatttgcataaattgtctttggaattttttaaattttcaaaattagtttaaattttttaattcatctctcttgaaaacctatcttaggttaatagtgtattttcaaagatatctaactacatcaacaatccgaataaaaattgcctgtatcaaatgacgggcattagtaaatcatactaataacctttgattaaaaattctattatgttggtgactgttttattcatagtacataatcttatttttcttaccattacataatttttttttttttgataaaatcacaccaaaattaaaatttatcccactaccaaaatattaacttgtgtactattacatagttacttcctcatgcattttataaataaataatcttttattgtaaattattatcttactattacatagttacttcctcttactttttataaataaataatcttttattgtcaattgttatcttgtgtactattacatggttacttcctcttacattttataaataaataatcctttattgtaaattattactcaatttgttatcaataggaagtc

SEQ ID NO: 11584 - DNA, 962 bp, Cannabis sativa
tttttttttttttttctgaatgtagaaaaatactggttaagagcattagatggagaaattgaaacaacaagattaaaagatgctagcgtaaatgttgtatggtattcattaaatttagatttaatcatattcagagttctctagaaaagaaaaaaaaaaaacgattgagaaaatcattttatatttttgacctagaaaaataaaatcccattaattaactttttttattaaagttataaaaaattaaaataaaataatattaaaaaaattaataacatatcccaacaactcattataatcttatacatctaaattatccaaccaaacaaaattaaaaaaaaaaaaatattctcatgagtgagagcaaaagtggtgctctcacctaagaattttcctatatagttgaattcaatatttttttttctctattacaatagaattttttttcttagttgttgtatttttttttagaataatttaaaacttttttgaaaaaaaaaatcaaattttaaaatatagcgccaataaagtgtaggagcaaaattagtattgcataccgatgaggatgagaaaaatatttttttttgactaatagatcaaaattaaataaaaatatatatttatttctcctaacatattattttggcattacacttcttttcttcattatatattgtttcttttttttttatttgacataaattaattttgaatatttcacaaaatattatattagcaaaatattttttagatacttcttcaattgtttgtaaatatattatatcaaatcatttatacaactgtccattcaatcattcgtttattattttaacttataattatctataaattcatttacaaaaaaaaaatatacataaaaagtaagagaaataaattataaaatatatctaacaataatatatgtagaaaaaaaaactttagaattagataaaatataccta

SEQ ID NO: 11585 - DNA, 525 bp, Cannabis sativa
  modified_base (230)..(236): a, c, t, g, unknown or other
tgcggtgtgggtggtgcagtttttcataattttttcaaaccaattcacacatgcagtttttctaatttcccaaaccgcactgcaaaaaatagtgcggtgcggtatagtttttgcggtttagactatcaccaataattaaactatcacaaatacaacaaagcttgagcaacactaattaaaaataccataaggcttgaaaataaatatgaaaaaaaattaagtttcaatannnnnnnaattagtgggctttgggttggatattcacatattggacttaaataaatataaaaattgatatttttataatgtgcggtgcggtggggtttgaaccgcatattaacaattcaaaactgcaaactgcaccgcaccgcgctgtttaagaaaaattcaaaccgcgagtgcaccacaaaaattttcaaactgcattttttttgcggtacaggcgatttgagcggtttgatgaacactcctattttcttctctcgctttctctatcgtacgttgacgctatcacatttaacagtg

SEQ ID NO: 11586 - DNA, 1285 bp, Cannabis sativa
tatatagccaccaatttgaaattaatttttttatgtaaatatatatatgtagagaaattaagaagattcatgtttatttcgatcgggacctactaattcattatgtatattattttgttataatcaaataaattttttaactaattatatgtattttacatcacatgcataaatataatatatataaatatatttgtaaatgtaatgaataatatttggccagatagtaggaaaataagagctaagattacagttataaaaataaaatgattagattttaagattttttttttaatttttaatgtattatatatgtaataaaaataaaaaaataaaaagtgatcgggttggcgggcgggttcgggttcaactcgaaacttggtgaccataaaaaatcaacccgcaaactcgtccgaaagtgtactgggttggacccgacccgcccaaatagaacgattttttttttaattttatgggttgactgggtcggatccagacgggttggctgggttcgggtcaaacccgatcaaaatattcaatcctaactaataatctctctatttatgattaatctctcgtgcaaccaacgtggcattatcaaactaaaaaattcaaaagaaaggacagtaaaaaaaaagaataatttgcgacataaatacttaaatttaaaattataaataataataattaagtttaatttttagcagtattaatacttaagttatatttttgaaactctgcaagtacctgacaattaaatgtcaagtcattattcacatgtcattttttatgaaaattttacgcatggtgacctaaatctaaactttattatagaaatattgtccaacatttaagtatttaaattaccgatgttatttggtatttagtttgtgaggtagcaacctcttctcctcccgttcctatttcacttcttttcttttctttatctgacgctctccaatctatatacataggggtggacaacattcaatccaatacaattgaacccaatcgatccaatccaattcaattacaaaaaattagatatccaattacaattaaattgaattggatgctaaaagttagattctaattggattggatcaattattggatgtcaatctcaaattaattaaaaactaatcaaattcaattacatttatatatgttaaaaaattatgtatatttatttatataataaaaaatataatatatattaattatatttttattggattttcttttgtgctgaattcgtaacacttgattattttatgtatttatt

SEQ ID NO: 11587 - DNA, 504 bp, Cannabis sativa
aataaataaatggctagacctatacgatacaaaccaaccaaatatctaatttttaaacactatctatttacatataacttaattaatcacacaattatttaatttctaaacaacaactaagtattatattccaagatcattatccaattaaccatttaatttatttagtcaaactttataatcacccaaacagtaactttcgcattctttgattataataaaattcaaatgtctagaatgcaacaattttctttttctttttattattatttttatattccaccttagctcataaaaatactataatatttaacaattaacacaactttgcttatcttaacagaaatcatcactaatactcatctctatactcctaatctgtagcaataaaatgataattattttttctttaaatcgggtattacacatcacctctcttctatcttgctcattcacatcctcttcaataaaactcaattctaatgaatcctctatcaacttctt

SEQ ID NO: 11588 - DNA, 569 bp, Cannabis sativa
aatacaacaagtccagtcgaccctgctaacgcagttgatcccaatgaacaacctctaccgcccatggtagatctgccattggcatctcgtatagagggttttgtcaatatggagtagcccccacacacaccacaactgactctgttccccgatactatgtgggggaaacaaggccaggaattggcgaaccagtaattggtgagcctcatgtggacttgggagaagagtttgaattagccagacttagatatcaaaataagtcacagtaatactattttcaaactgaaatgatcaacattatgatcgagaattttttttgaaataatagagaagagagagaaaaaaagaaaaaataattaaaaaaaataaaaacttttaagattcatagcaggagaaaagtagtgagtcatgatatacgagtttcaataaaaaaataaaaaaaataaataaatcaaaaagtgaacacatagggagataattattttcaatttttcgatagataccgtcaggtattgtgtgcactatttaaattattacatttgtttttgttattaatttgaacattacgt

SEQ ID NO: 11589 - DNA, 712 bp, Cannabis sativa
tttttttttttttttgtatacatccacatgagcctcggatccttcattgcatgtgccactacgtaaatatgggttggatatatctatattatatattgttcatcacctcttcaaaatcagaatcatctcaaactaatcaactcttcaaaaaaatctaaaattaattaataatggagtttaaaagttgcagtttgattgtgccaagtgtgcttgaaatgacaaaagatcccaatatggtgacagttccaagtagatacatccaacttgaacaagatcaattagatgaagccaatattgatctcaattcttcttctgatgatttcccagttatcaacttcgaaaacttgtcattgccaatgtctcatcataactcacaactctatgaatctgaactcactaagcttgacttagcatgcaagaactggggtttcttccaggtatttatttatatatatattctctatttattataataatattttgtcaaagaatatacttaagttattcgtaacatttaatatttatgttatttttttagcagcgaaaatacttaaattgctaagtgtgtactcaagttataagcagatatgataacttgagtacgttataaagtgtaaaatcataacaagttaatgtttttgctgctaaaaaaattatattactatttttagctatttttgttgtaaatattcttaatatttatattgaatta

SEQ ID NO: 11590 - DNA, 576 bp, Cannabis sativa
tatatatataattaagttgttatgctatctagttagaatgaaaactacctctctcctatatattaacatattaatgatagagttaattatttcttccttttatttttattattaaaaaaaaactgtttgtattttacttcatcttttcttttgattttctcccgtgccaaacactactctctgaagtttcagaaacgtttgtactatgttgcataaattgctttttaagagttttttacaagtcttgaaacctaagcaaaattctataatataacatgcactacaataatagtcacatagtatagtccaatgggtgggacttgatttttttttttttttttttttttcttcaaaataaataaataaataagaaccaatccttaaaatacactcttttagagacactgcttatctttcagttgaattaaatttttattttctcatttcatattaaataataatttcacaattacatatttatttttagactttgatcacactatttacaaattactaataaactcttatagtattttcttagtctaaatgttcaaactgattatttttaatatataa

SEQ ID NO: 11591 - DNA, 591 bp, Cannabis sativa
aatgaaaaggaaaacatccaagagaatcaatttgttagttcctatataatgtaaaagttacctgagaactttcttctcccaaggcactgcaaaaagaagaaaatacttgtaaaaatttaataaaaacagcacacattaagtataagataaggaagagagacggacaaagtacatttgtgacaaatataccttcactttaggtagcaaaaataacttcaccaaattctccggatgatagtggcaatcctcaggaagttttgaattacttggtgctctacttgcaggtagcagtaatgacttgggatttttaggaggagcaaaaatatctggcatctcgttgtccaaggattttgtgaaatcaatatcaacttgtacctgtttttggctcttctttcttttagagtttagtgcagaagcattttcttgagaacgatcagcctctaaatctggcataacaccttcaacattaattaccaaattaagaataaaaaaagcaaaggacctacaggctgtaatttgctgatacatacccttagtttttcgatatttccaatgctcaggacctgcccaagcattttgttttgaagctaa

SEQ ID NO: 11592 - DNA, 1731 bp, Cannabis sativa
ctctcttgaaagacgggtgcaaaggcagcagcgccccttgcttcgtgtgggcctctgaccaggcataataccctttctttgggttagtttcccggtgatttggagaagcgagataacactcaagtccgcacaggtacccagccttgtccaaattcctcaattggccctcagttatgttggacggaggacacacccatctggcccctaaggcaccttgcctcctatggggggccgcttcggcaaacgccttggtgacctagtcttctccctcaatgaagaggtcaccctgctcggatactggctccctgacctcattacaccctctaaagcgtggatgcccggccactccttcctcctcagcctcggaagggctatcaagacagatgtcgtcctgctcctctatctcttggacctcaatgtccccctcataatctttctcctctgcggcaggcagatcctattcggcacgtggcagtgtggcatgatgggccacgtgagggtcagatgcattaactctccgcaccgtctgcttggtttgagccatcatccttctcttggacggatattgatgtgtatgtcgcgcaacaattacagtacggacaactattggaataccaaagttaccagaacttggttggcctacgggaagggtatcagcaacaccaagtcggacattataagtccagctggatggaagatagcgcctctaacacttccgtagttcccaaacgaagcgaccataaccttctcctgcgatctgctcgaagtaaaagtggtgttgtagttcgggttctggagtaggagaatgttcgctactcactcccagtcctcaaaacttgagttagaaagtccatcactcgaggaggacgaactggcgcaaagatgaggttggtcctcgtaaagaagttgaagcagatcctggtcaatgcggtgttcgcctccccaaaactcactagggttcatctacaaaagacaatacacgagatgagtatttggctgggatatcgaacaaaaactaggcaacacttagcaacaaacctgcacggacgtggtcctcccagccgagtagtggagaatccgagcagcacaccaacacttagcaattccagaatttacatcgtaaagcacaagagcaatccctataaatctaggatcgtatcacagagatatggcaagatgtcccaatcccacaatctttgtattctaaatatgtaatatgtattcttaccaattatagatattgcaagtaaaagggaaaccttccctcaagcatgtggccctataaatagtgatccattctcattggtaagggggtcaaaagaatcacttgagagagatctaagagagcatactcagagatttcactgtaagagctttaagagagaaaacattgtgttcttcattcttaagttaatacaaatctaggggagtaggctattaccgaactgctcggagccgaacctctttaaaaaccttgtattctttatttatcttcttatattacacctaaatcatatcctttatcacttattattaagactcactgtcgttggctaaaagcgaggtcaacagcatgaaaccaatcttagggaattagaagtaagccactgcttgattatacttggaattaattatcaaacattaaatagttaattcagatgaacttaaaatagaagttcaagcttcacaattaacccacgttaacacagccagagtattcaggttacttaa

SEQ ID NO: 11593 - DNA, 664 bp, Cannabis sativa
cagcagcatcagtaacacgatttgtaacagaagcagagggaagagaaaagagagactcaacagtatatggaagatgattgagtggaatagcactaggaatgtgagactcagatacactttcagatgcatctgttgaaattgaggcataaggaaaattggactcatcaaaaataacatctctcgagatgtataatcgaccatttgagtctaaacatttatagcctttgtggttaaggctatatctcaagaaagtgcaaggtgaggatctaaaatccaatttgtgtttattatatggcctgatatttgggtaacaaagacaaccaaaaattttcagattagcatagtcaggtttgttgttgaacaaaatctcaatgggtgagagttgatggagaacaggggttagcaatctattgtgtaggtagacagcacacctaaaagcctcatcccaaaattttagaggcatacaggcttgagcaagtaagcttaaaccatgttcaacaatttgcctatgctttctttcaactaacccattctgttcatgagttgttggacatgggtgcctatgaacaattccagcttgtttaagtggttcagagaaatttctatactccccaccccaatctgattgaaaaactttaagtttctttcctaattgcagttcagc

SEQ ID NO: 11594 - DNA, 511 bp, Cannabis sativa
aatccaaacgcatctcgggtctctagcccacatgttctcatatctaaacagacgactcttacaacaaactcccccggtagaatcgagaaggaggggtctatgatccgagctagttgaggagagatgtttgacaattgcattcgggaaaaggatacgccaatcggggtttgccaatccccgatccagcctagctctcttggttgaccctccattgttaacattattcctatccttggcccatgtgaagcaagggccttggaatcccagatcgatgagacccacccttcgaaccattcgacgaaagtcaaatgcatatttggtggagttgccttgtttcgcatagtgaaagcactcagagtccttgagagttccattcatgtctccaatgagaaggattggtctcgaggagtgatcgactatatccccaacttgaatccaaaaagcttctttgtcttctcgatggggtggtccgtatatactaagcaaggaccatttgaggcccttaggttcg

SEQ ID NO: 11595 - DNA, 1852 bp, Cannabis sativa
ttctcccatgcggcattaaatgtgaggtgactgttcaaatggggtctggtatcttccgatggtgctttgccatagctctatcctctaggagtacgtggaatcctcatttcttcttcgggaggtattttcttgtggatactcttgatacaaaaagacttagttgaattatctcaaaatcatgttgtttagatccacgtggcacagtcgcattggtcgacgtattttgggaaaaattaagggaaacatgtatttttacaccacatactatttttttttaattcattcattttataatgtcttacttcaaaatttacttttttagtctatcttttatatattgtatactgtgtacattataaaattatgtatattaccattttatattattctgtcatgagtattttattttctttattttttgttattctttttaaatattgattaaagttgatgttggccttttatacacattattatattttgcattttctttttaatttggggcaacaattcatcacatgatctcctccttctcaagaaaattgtgacaattattttttaaataataattaaagttgatgttgacctctcgtacacattatcatgttatctcttccttcccaagataatatattttttttttatgtatattgctcttgagcaaatcactaaacacacacacattatttatttttcaatgtatttgagttctttctccccagttcatcagtttttttttttttttttccaattctaaaatattatccaaataaaagctaaccctctccttttgtagtaggtaaaaaagatgagatgtgaatgaggaagaagaagaagaagaattggaaaagataagagtatgggtgtgtgtgtgggagagagatggagagcctgctctgtgatgagcttcttgtaaaaatctttcaaagactcccactaggttcatgttcttcagtctctttggtctcaaagtgttggctccatctgtatcgtacttctaagtccaccctcttcctccaactttctattttctgttactggttcttttgttattgttttaaggttgttttactaatcttttctttcatttctttatcaaattttcccaaatattattatacttctctatataatagttttggaaaaataataaaatttgtatgtagttattttcttcaatatcctatgtgctccaatatatattcaactttttcctccatttgttccactattattttttaattgttctgcttctttttagttttgatgctttttcctgtaagttttcttgttgtgtccaaactcccaacatttggtgcatttgttaagttatttttttcccagctagcttcgattctcttttttttttgtcttccaaattttaccatttcaatgggaggtaagaatattattgttcatgattttttatattctggctacctcaaataaatattcagtggttggtttaacctgtgtaatttgaaaccaacatttgttcaacatacaaaagaatagttgaaccacccaaaaacaacattagaaaaaccatgacagtccaagtattaatagttttaatgtttctgcttcatctcgccagatttaatggttgttttttagctattctagtgttgctgtagtggttttgtctgtgaatgtgaaagatggagatctcgttttttattttcagtatttacagtataaaagaaaaaaaaagaaaaactaaggcaataaaaatgtaaaccttcatccaaaatccggtatatttttgtaaatactcctttaatataatcttgcttaccatttaatatattttagaatctctattatggttcaaaaaaaaaaaaattaaaaa

SEQ ID NO: 11596 - DNA, 535 bp, Cannabis sativa
taccaaacacgtagtttaaataattcaacaaaaaaaattaaaggtacccgagttcgtttgactcccaaacggagcttaacgaagccgaagactggtccggattgacgcttcatcatctcggcctggatcttagacatatccattttggagagatcgctgggcttgaggtcgtcatccgaagaaggtggcgatttcttgccccattccttccaggactcgtcttcctcgtcgtcaacgacgtcgtctaggtcatcggtaatgtggatctttccctctgcgaatctcacgaatgggccatttctggaaaatatgaaggaggatgtgaggaggagaaaagggaagaggaaggtgaaagaagtcatgtgcttttggtgaatgataaataaaatagtgcttatggaatgaaaatgtagcaagtaaatatatatataggttttgactgtaatctaatctaatattaaaattgtgatgattatcgtgtgagtattaaggatagcaattgcaatactaatctgatgttttttttttttttttt

SEQ ID NO: 11597 - DNA, 725 bp, Cannabis sativa
tattgtcattaaaattcaccccataggagttacaaaaataaactttgagttacccgtagcgagatctgctaggcactaaaagttcgccatcaccaccaaaagctaattttcaccatagatcatcatcaatggtcaaaaacatcttatttgtatttttttttcctatttttgtggcctctttcacctataaaaggagagctcccttagtttatttttcatattcagaaaattacccacaaggtcagagcttctctctctagaattcggagcttttgacacttagtctattgttgtaattaccatctcgtgagaaataaaaactcaaagtagacgtagccccattactattgcgatataagaggtgaactactataaatttgttgtgtctctcttataaatatttaactacttattcattctcgccaatctagcgagcgggtgtggcttagaagagtctagatttttaagtcaatattttggtgctttcattgagagccacaactcaagaaagttactaaacaagatggttgcaacacgtttacaagtgttgacaaacagactccaacaactggccgaacaactgagggcatgccagttgatggagttggaatcgggactacttttgcaccttaagcaccaggagcaagcctcggaaccaactcctcaactcttcttccaaggccaccaccaacttctctcaggactgacaccaatgaccagatgcc

SEQ ID NO: 11598 - DNA, 813 bp, Cannabis sativa
catttgttaaattgtttctttttccagccaactttcatcctttttttttttggtcttctagatttttaccactttaatagaaggtaagactattactgtcaatgattatttcattctggttacctcaaacaaatattcagtggttggtttaacctgtgtaatttaaaaccaacatttgttaaacatacaaaacaatagtggaacaacctaaaaataatatcagaaaaatcacgacagccccaatattaatagttttaatgtttctgtttcatctcaccggatttaatggttattttccggctgttctggtgttgctgtggtggttttgtctgtgggtgtgaaagatggagatctcgtttttttatttttggtgtttacaattacagtataaaagaaaaaaaaaggtcccaagacagtataaaagttatttttgccgtgtggcagtatttttataaagattaagtcaaaatccaatatttttataagttaccttttttatttttgcctaaggcctaaattagcatagagcgggtcctgataggattcatgcaaatctctaaaatgacattattttttctccaataatataacatttcaatattttgccgcattatatgttcatttcagcaaatatcctttaatttaatttttaccattagagtgttgtaacagactaaattagacagaatgactaaaataaaaggattgtaaaacttagagagtaaccatattttttttaatatagaagttagaccatgtcaaacttaaaagtcttcaaaatttgcccaccaattacctaacaataggcagcta

SEQ ID NO: 11599 - DNA, 1013 bp, Cannabis sativa
atactacatcagcaaatggctagtcggcccagaaagtcgatacccactcatggagaagacctactgcttgctcttggcttccaaaaagctaaggccctacttccagcacaccccataaaggtgtacaccaatcaaccattgcggcaggttttgcagaaacctgaagcatcaggccgactactcaaatgagccattgagcttggccagtttgagatcaaataccaaccaagaataggcataaaaggacaagaccttgcaaattttgtggctgagtgcaccaactcaactcttgagatccctcaagactcaggagaacaacaagagccagagaagaagcgagagcaagagcaacaacaaaatcccaaagatctaagatagaaactccatgttgatggaagctgcactaactaattgttcagtgcaagcattgcccttacaacacttgggggaaaaatgcatagagcaatcaaattcgacatcaaggcctcaagcaacaaggctgaatacgaagccctaatagttggcctcaagctggcgcatgaagtgcgggttgaccacctaggcatattcagcgtttctcaactagttgtgaatcaagtcatgggtgaatacatatgtcaaggtgataaaatggtggcctacttgagtaaaatcaaagactttctaagtcagctcaaaggttacacgatcaagcagatcctcagagaacagaatgctatagtagatgcacttgcccgcctagcgagtagtaccatagttgacaaagcaaacctagtgcccatctagttcctagaagaacttagcattattgtcccagaagaggtcaacatgctggatgacacaccaacatggatgacacctattgcaacttacctccaaactgaagccttgccagaagataaaaaaggctagcaaactaagaagaaaacctgctaggtacctaatcctagatggaaaaatttacagacggagtttttctatgcctctcttgaggtgcatcaccaaagccaaag

SEQ ID NO: 11600 - DNA, 1010 bp, Cannabis sativa
  modified_base (718)..(732): a, c, t, g, unknown or other
tgtcacttgagaaagaggttctcaaaactagaaataagatcatctggtaactcaggtaacttttaaactatgtcacttgagatcagctggtattggcaaactatgtcacttgagaaagaggttctcagaactggaaataagatcatctggtagctcaggtaacttttaaatcaattgtttatacaagagttctttgcttcaaaactaggtgccttaccatagagcaatttggagttctattaacttacctaagcacagatttgtgctatggcaagtgtgttacgaaaaatatgaataatacacatgtgcacgtaatcaagtagtactcacacaagtgaggacgatcccacaggaaattggactgaataccactagattagacttgtatttctatttggcaaactaattaattttgagatggagaataaaaatcaagattaacaagaaaataaaattcagcagtaaaaagatttaatcaaagatgaaaaattaaaaaaaaaaaaaaagaatcctgttgatttaattacccaattgttaatgctaattgctactctctttcttaatgtgaatggcagattaaattaacctaactcttttcagatctcttaggccctaaatcacatgttatctaatcatctctaaattagattaacatgtaataagcattaagcaataatctaaatgtcacaaagactatgcaaatactttcgtttcacannnnnnnnnnnnnnntccaattttagcattcccaattcttacttttcaaattttgaattgggatcataaagcatgcaaaaggtgatcaatcttaaacatgtgattaacacaaatttcacaatcaagaaaggaaaaatagcaattatcataaataaagacaatgtcaatcaacattcatcatctccccaaatttagctcataaaatccataataacatccataatcaaatctaaaacagaaattaccatagaaatcaagaatttcagaaggaactagttggtgattgcgctccg

SEQ ID NO: 11601 - DNA, 897 bp, Cannabis sativa
tttttaataatgtaatcattattatgctagttttataatgtaaagggaattataatacatagtgtaatgaccattacaatgtaagtcattacagcctaaaaattaaaataaataatgtaatggtaataataattctattataatccacaatattatactaaactaaacatgtgatcaatgtaaaagtttatgtatatatatatatatattagaaattatttggcttagtatgcttaaatgtaccacaaaattagaaatagtatatacatttttaatattttttcctcccaaaaatacccttacatttcaaaaaaacttctctctctcactctctagcgttaatcccgacccagaacccctaccgtcgaacacacagacccagaaccccggtcacaaggcctcgccgtcatcttctctcacgacctctctcgttttttgtgtttctttcttctggtttactagttttttacaatattttgcgatatatagtgatgtatttgcaatgatagaacaaattcaaggttagagatgaagtttagcgatgatttacgatatttagcgataatttacgatatttagcgatgatattagtaatttgtttcgcgatgtggaagacatttagcatgttttatgatttcgcgatattttgcgacatcgtcaaaaactagaaaaaaatgcagaaaacaagcgagttggtactcatagattttggagctttgggtttcacgatttctctttgtagtttcgcaatatcctcctcggttttatcctacgttttgtcttcggaatgggtttcaccagaggtggtgcgatggtcgtgggtttggtctgggtctggtttagtatggttatgtggttgtgggtatttgttgggtttggtgagagagagagagagag

SEQ ID NO: 11602 - DNA, 765 bp, Cannabis sativa
ttccacgctgaacaaggaaactggagggaagttattgattgtgtggtacctgtagttaaaaatgagcataacataatgcttactcgaccaattgaggatgaagaggttgaagttgcggtgttccaaatgcatcccgataagtctccgggaccggatggtatgaacccaaagttctttcaaaagtactgggggattgtgggaggcgatgtgattcgttcggttaaagattttttccatacggagacgatgcctgagggtatgcaaaacacaaacattgtcctgattcccaagaagaagaagccagaccaaatgagtgagttgagacctatctctttgtgtaatgtcattgccaaagtcataaccaaggtacttgctaataggatgaaaggtttaatgtctgaaattatttctgttaaccaaagcgcgttcattccgggccgcttgattacggataatattatggtgtcctttgagatcctgcattaccttaaaagaaagcaaagtggcaaagatggttacatggccttgaagctcgatttgagcaaagcttatgatagggtagattggcattttctttgtgcaatgcttggccgaatgggttttaatgaaaaatggattcgactcatttatggatgcctttcaaccgtgcaatacaatatcgtgagtagtggttatactctcggtcctatagtgcctagtagggggctttgccaaggagatcctatctctccttaccttttcttgatctgtgctgaaggattgtca

SEQ ID NO: 11603 - DNA, 516 bp, Cannabis sativa
tggttgtcggagttcgtcggtagtggtggttataagtttttcttttggtgttttgaagagagaggggggggaatttgaataaataaaaaaaattgtgggtcccacatcctttatttatttattattttattcttttttccttcttttctttactcagtttgatcgagtcttcaaagcaccaccatcaagcacgctaaaggtaaatattgatgccgcattagatgccaagaagagaaagatataggattttgggcaattgtaaggaacaaaaaaagagaggtagttgctagctgctcaactctaatttcgaatttatttcgaatttcgagtaaggtgtcttctatttttgtcgaagctttagcattgtaatatgctttacactggtgttctttggctgactttccaattgcagaagttggaatcagattgtcaagttgtagtaaacaaagtactaaagcataaattgtaggataaatcctatcggtcagatttgatatagagtattgtaatctcttt

SEQ ID NO: 11604 - DNA, 634 bp, Cannabis sativa
ttccaatccctggtagccacggctcatccaaaattaaagtggatttcccatccccaatagccttcctagcccccatcttaaccaagcttttagcctcccataagcttctccaaataaaactaggatttggacctagctcagcattaaggaaactcccattcgaaaaatatcttgctttatagatctttgccaccagagaattctcattagtgactaacctccacccttgttttcccaagaaagccatattgtagtcccttaagtttcgaaaaccaagccccccaacatccttatgtcgactcaatctttgccaactcatccaactcactcccttactagagttagattgtgatttccaccagaatttcgacattaaaccttctaggtgagtgcaaatttcctttgtaaggagaaagacactcatagcaaaactaggcaaagcttgggccacagatttcaataaaacctctttcccagcctttgaaaggaacctagtttcccaaccattgattttcttcttcattttttccttcaaaaaacccagaatggcattcttacttctccccatagtgcatggaagcccaaggtaagtgctatgttcagacgcagctgccatacccaaaagccgacaaac

SEQ ID NO: 11605 - DNA, 584 bp, Cannabis sativa
gcaagtaataatcaagaaatttattcagataaaaaaaataatcaagcaatttattagtctataattttatctgcaaattagttggcccaaaaagatacaaaacttctgtcttatagaatattatagaacatatattagaatactatattcaaaataattttcaatttattataaaaaaatcaaatttaaatttaggtaaatttaagaaaattataaataaaaataatttttaaattgtaattagttgtacattttctaagtctcctaataaaaaagtatatctctatataaaaataattatattttaataaaatatataggtatacaattaataattttattttaaattgtaatgcatatataaatattatatttactcaaaaataattttattatgatgtagtatttatgattatttattattattattattgttacattgatattttttagtgttttgattattttttttttctaatgtaagtctatctaattataaaatctcaattaaaacataatttacttaatcccaaatgtattcttaaacaaaaaaatttctgtatcaagaaaatcaaaatttgtta

SEQ ID NO: 11606 - DNA, 610 bp, Cannabis sativa
aaaattgtgagaaaattgaaatggggaattcgggctctacgctttgtaacacaaggtccaagctggttcggaactattaaagcccaagggctatctttggtcccctaaaaaattataggtacttctatggtttacccccaaaaacttaattaggtagaaagaccccaatcttttttagtatctcgtgtacgttataactatttaaaatcacctgtaaattgattatttttaatctcctaaataattctaggtatatctatagtacactccttaaagggttattttgttagaccacttatttgttttgacatctatagactagacttttggtccaatttttattaataattgtgtattttatagttatttaataccgtctgtaaattttaaaaaaattataaatactttacaatgctgaaaataaagtttaaatgtattattgcagttgtaattatttttcttatacgagtagtaagtaacaatttaaaccttatttttagtattgtaaactattcaaaattttttaaaaatttacaggtaattctaagtttttacaaaaaaatcgactaaaatattttctatatgtcgaaacagacaaaggtcaatgaga

SEQ ID NO: 11607 - DNA, 522 bp, Cannabis sativa
ctttagcagccatgtacaattggaacgtccatcaactagacatcaataatgcttttctccatggagatctccatgaagaagtatacatgaaaatccctccgggttataaagcacctccaaactcggtatgcaaactcaacaagagcatttatgggctcaagcaagcctcacgacaatggtttagcaaacttagtcaaactctcatttcggatggtttcattcaatctctctcggacaattcattgttcataaggaagaccaacaataccttcttggccattctcatatatgtggatgacatagttgttgcaagcaacaacgaccatgccatatcacacttcaaaacatatcttcatgacaaattcaaacttaaagaccttggcaatattcgtttctttcttggtctcgaagttggtcgcacaaagaaaggcatttccgtctctcaacggccttttacacttcaattactacaagatacgggctatactggtgcaaaatccgtatccacccccatggaaacaa

SEQ ID NO: 11608 - DNA, 626 bp, Cannabis sativa
tgaccatttcgaaaaaaaataataatattgatatatttttttgaaaacaataataaattttaatataattcgttttaacacggttttatttataaaaaatctctattattatatttatttttaaaaatatatattttttcttcctgtattttaaataaaaattattttcttctagagactaaataatttggagaattttaaaaaatacttttttatatgttttatttagaattttacaacttaaaattattatttataaaaatatttttttaaattttaaaattaaaaaaaaaatacatttttatcagtaaatagtaaaaaaataacgaaaaaatcaacatcacgtaacttaattaaacaataaaacaatctcatgataaatataatacaactattaaaaaaaaaaaagtaaaaacagccaaaaattattgtttttattgaaaaaatatttttataaataaaaaaatttaaagattaagagtgaaaatttttgtgtgttgacataaatatgtaattttttttttcaaatttttagttagttctgtcaaaaaaaataataataataactattattaatggtcatttggagaaacaaaaccagcaaaaaataaaatgaaataactatg

SEQ ID NO: 11609 - DNA, 507 bp, Cannabis sativa
aacaaaagtcattagtttgtaagcagcacaaaactaataatttttaatagtaacataaatgcctaatgttaataaaaatgtaattttcttcattttttgttagtatagtttttattaatattttaaataggacatatgtaaaatctgaagacttagattctaaataatttttaatagtaacctaagtatctaatgttaataaaaacataattttcttcaaattttttagtatagtttctattaatattttaaataggacatatgtaaagtctaaaggcttagattctaaattattgagtttaggtgaaaatgcgtattgacgaaattgaaaaaaattacatttgataaatattgagtacgtagttaaaaaaatcatttagtttgtatcggttacacacaacttatttgcaattctctcaatatttatttatgcaaacaatgtttcactttcgtttatctacgagaagcaaaagccttggaattggttacaactaccttaataccact

SEQ ID NO: 11610 - DNA, 500 bp, Cannabis sativa
gattcccctaaccactgctgccgctgctaattttactcggggcgagctcgccaccgctttacgaaaggtatttgattagtttttcttttctgtgagttttgttttcatttggggattatgctccacttaaattcttagtttttcgcaacgggtttaagtagatggatagtctaggtttttttttgtttgtttgtttatttgaatatgtatggtggcatttgattaaatgtaccaatgttgaagttaaaaatccaaatgattgataacattttgaaaatgggtttaagcagatggacattctagggtttatttgctttagtttattaaagatggttttggaaattcatatgatatgaatcaatgtggtaggaagtgaatcagttttggagaagtggttaaaactaaattttcctttgaattgtaaattaatttccaaagggattagggtaaattgcctagatgtttgcacatggtccttcttttgggtttgtttgatatgt

SEQ ID NO: 11611 - DNA, 1112 bp, Cannabis sativa
gtcaataaaagtttttagatgcttaaataattttctcaactattaaaggatgatcatttcttaattatataaaagatcttaatatgatatctatttatatgtgtagtaaaattttattttgtagccaaaataatattttctttttataaacaacttaagtaaattatattataaaatttatttttaacttatactcagcgacgaactcatgaaattttacgagatgtaaaatttaaataattaataaatatatagatacaattaaaaaattattaaaattataatactatatattcataaattagtaataaaatatactataaaatttcttctaggcattataagggttccattgtttatgtttttcttattaataatatatatgaataaagcatattttaaatattttcgtaaaaatttaaatattatatgaatacttaaaaataaaaataaataaataaataaaatatattaatataattttatcaaagtattaaaattaaaaaaataaaattatttaaatttaacataaattaaagtaagaataaataaaaataataaaaatattcatatctaaaagtagtgacttaatgttgctaataaaataaaaatctagagataaatatactaaaaaaataaagtgcagtgataaacttgccaaaatatatataatttgggaaccaatttatcaaaaaataaaatttagagaccaactttacctcacatatatatttacattatattatatattagcttttctatattttctacatatcatattaaaattatttattttaatatatatatatattgtattcatttgaaaaaaataataataaatataataatattacacacatacattctaaatggatttgaaaaagtaatataacattttttgctgaatgaattgtaattctttatatgtatagctaaatctttgagcaataatagctcattcaatggagcaacattttttacctctcttagctaaatttttttttaactattagctaaaaaaaacattaactattttacctcttctattgtgagtgttcttgtacttgatcaactttacttactaatatgaaattcatgtttatgaatgaaaa

SEQ ID NO: 11612 - DNA, 534 bp, Cannabis sativa
ttgctggtaattggaggtcctaaggcacaattctagactaaccattaagtgttgccctaacacttttggggacttaaattcaaaactaaaagtttctctatcgatatatatcatggagataccctaagtattgagaaaacactcaatcggggtcccatgaaaagtctcaaaatagacagtccgttttaaaagcggacccccaaattttgcctaaatcggacgattcgaaactcgactgcctgatttaaaacttgcataactcattcaattctaagccaaacattaccaaatttttcagggtacctaaaaaaatcataattaacatttttcataaagaatcaaattaaatggtcgtcctaaaactgcctaaatcggacggtctgaaaccttcatatccgagtttggaaatctcataactcatccagtcttgagctaaatcttaccaaattttgcaaagcacctataaacgtcataatgaaaatttttcctgaagaaacctaacccaattcacaacaaaattcaagttatcacaac

SEQ ID NO: 11613 - DNA, 535 bp, Cannabis sativa
tttttttttttttttttgattatatcatctttcttactcatctcttcatcgtcctaatcctcgacctagttagaatccgaaaaataacggaaaaagttgaagaatactctctttctttatacattaactaattttacctttaaaataaagtctaatttaaatatacctatttttatgaatattgtacttaaattatcctcacacacttacataactaaaacataatttcaaatataatagatttgtgttctttatagatggatgtgtaggtttgtataaagttatgagaaaattttaattagaaaagaatgaaaactatcatgaagtgataggggtaaaattgatagaatgatgaagaaaaaaaagtaaacatagtagattttgaaaaagagaataaaaattaaaggcatcaagttaaaacagatatgtagtgtaattttctcaaaaacaacgctcatccaatatcgcgaactcggttgcaatgagctacttttctgttagcattagtaaacaagagcttgagaagctaaatagg

SEQ ID NO: 11614 - DNA, 749 bp, Cannabis sativa
acttcacgaactcacgcataataatacaaacatatttattaattagttatcataatttatttattaataacctatgcggttactatatttattttttactctacttttctaatttatagttattaattacttaagagaaatattttctctttttatttttttttttgaaaaaaataatctatctttttgttctctttttctgaaaacattttaaatttaaatttaaatccatatatattgtaattttttaacaaactaaaattattttttattttatacgtatatttaaaataatctttattagaaatctttacatgtaaatagtagtaacttttttttttataagtgtaaatagtagtactttgcaagtgatttttttaatttctttttgtaatattatttatctttcgagaatagaattttgtaactattattggatttattatgaatttgaacaaacaactaaaaatataaaaaatattttttatttttaaactaaaaatatctcaaacaactttattaattttcttaatttattatttattctaactaatgccttttttaaatgctcaccaaccctctgatttttttttttcatgcaacttttttcccacgtattctcatatgatagtatccacaccctttctccatctataattacttttttatttttctaattttttgttaataattattaagaaaaaattatttaatcttatttttcctaagattttttttattttattata

SEQ ID NO: 11615 - DNA, 515 bp, Cannabis sativa
caagcaaaataaatgacataatcttttacttgaccacccaacaaaaaagaaaaaactcattaattttgcctcaggacatatttgtatatactagaataagtatagtgccaacattcatagaataagtaattcgcatgcaatatgcaccatctcaactcctaaaatactttgcatcaaatgaacagtggcaaagaacacttaccagtcaatgagcagaggtattataggtgatggtcatgttatcccgtgcccagcggtgtgtgcgtttgagaatgatgtggttagaagagtcttgcaagataagaaagaggatgaaaccaaaagccttggtgataggggtgtgtagaaagtcatccaatccaattataaccgatcgatccaatcccaaccgatccaataaaatcgaatatccaattataattagattagatcggatgtaaattttgaaaatcacagccattcatattgtggccaccaaaattagtttccatcatcggacaagcaataagacgagc

SEQ ID NO: 11616 - DNA, 697 bp, Cannabis sativa
acatttttacaattttacaatctcaggggttgtttattggagtggtattgctacctatgtaatatggtttaattttgaggtttttacaccacatatttattgaaattttcaattttttattttttctttattgtggggtggatttttttttttttaaaaatactgtgtaaagttttcacggttgttttacggttattttttagttgttttactgttgttttaattatagagttttgttattttacgattattttataaaaagacaatatttttgaaaaaaaattctgtttgacagtaaaattgtaaagttttgttgaaaattttgtatttttgtaaaaattcctttaattttaaagatcaattaaagtgtttaaatatggactatgaccacatgatattttctttcaagatcaattttatagtgtttaaaattagtgttttatgtaattatctcttttttcttagaaagaagttactttttaccaaaaaattattattttaatgtaatgtggaatcatagtggagcttttagagttgtattttttttataagaaaataagttaaattttatgtaaatgagagataaaataaaaaagtattattttaagatgatgtatgttgttgacctaatttgtttgttaacaaatttagaagttcgtgaacgagtaagataaacataagtcgataaaaaataact

SEQ ID NO: 11617 - DNA, 774 bp, Cannabis sativa
actcgaaatttataactacaatattaataatagaaaacaatataggttgaatataaattcatacacatttagaaattatcatacatttagcaagtaagaaagacatgtgaaaatacaaaacaaacacatcttaaatattttctaaggattctaacaaactgatacagtgtcccgtttaggcgagagttaaagatatcattcattgaacagagtagtcaactcatctttaatggataccattctagcaacctttttttcaatcaagactagaattcggtgttgtccagtttaggcgagatttaaggtcattctatcttatgagcttccaccattgttccataccttgcaagaaaataagttttcagcgactacattttttgtgaccaaatcaacttcttcactaatagttagattttacgactaatttttagtcgcaaatattttttgtcatgagacaatatttatttagaaccaaaaaaagcaatgaccaattttttagtcattgtttgttatatttagtgactaaaatagtatttagtcactaaaattgtggcgccaaattataatagtggcgagactaattgtttttggtgacaaattatttagtcactaaaaattttaaatttgtgacgaaattgttaattagtaaaagttaatgatcttttacaactaaaatattagtcttaaagtgtggatgttgcaagtaccatcctaaacaatgataaagccataattttgttcagaatttctgcgaagaatacatcttttatgatc

SEQ ID NO: 11618 - DNA, 543 bp, Cannabis sativa
ccagatccaaaccaaggatcggatcgagactcgagattcaaactcgaacctaaacctagacttggaccaagacgtaggaccttgaattagacctggactcgggacccgagcctcagaactgggaccaagacccaggacacgaccccaaacccagagccagacttaggacccacatatcttgacctagagcttacacctaacccgtagtcggtgtctaaatctgggacccaaacctagactcgaactcgaacatagacttagacctagaccagggccctaactcagacctgacttgtgagctgaaatcgaaagtggaaccagaagcaaattgggacctgggaatgggactcagactagcacccgctcccggtcccggacccagaccccgacccagagtcagaatcagactaggacatagacccagaccctgatcgggacctagactaggatcaaaactcgagacacgaacctgaaccaagacacggacttggacctggacccaaacccaagacatggacatgaattggggacccaggatccaga

SEQ ID NO: 11619 - DNA, 534 bp, Cannabis sativa
cctctgtctattttgtgaagaagctgtctgctactactgcgtattttgtccttcctcaacctgtgggtaatgccccaatcaggtgaattcccatattgcgaatgggtatggcgaggtcatcattcctaactctgttggtggtacacgaggtatatgtgaaaacctctggcatttgttgcatctcttaacaaattcatgtgtgtctttgtttgctgttggccaatagtatccttgactgatgatttctttgagaaacttttccaacctgcatgatctccacaaaagccctcatgaatttccttgatcatttcattagcttctgctggtaacacacatcgtaagagaggtatagaataacttctcctgtacaatttgccttcgactattgtatagcaaggtattaagtacaaaagtttgcgtgcctcgatttatttgcaagaagttctctgttgagcatatacttgactataggtgtcatccattttggtgaagtatctatcgtctcaacctcttcctttcacatatacttgggtc

SEQ ID NO: 11620 - DNA, 652 bp, Cannabis sativa
cccggccgaacacaatcgggtcgctaatcgagtcttttccccgccctgccccgccccggttaaatttttttcgggtcggagctaacccgatttgataattaaaaaaaatcaaatttttactaaaaccctaaatccttaaacaagatttcttcactgtctcgataattcaaagaagcccccgaccccgactccctcgtctccttcctcaaacgagatttcttcactgtctcgaatttctggcaaactactcgcaacggtaattcttctattttttcttttgtttttttttttttttgtttttcatttggttttctagaattttaatggagaaggatgctctctttacttagttgtggttttgcttggggggcaaaagtgtattaatggaagagggaaggagatgtagaaataagtattgtgtgtgtgtgagagagagatatattttatatataatttatattgtaattggaaaagcagtggtgggagtcgtggagatagtaatggcaaagttttggttattttgagcaaacattaatatgtgtttatatgtatagggtatttaatcagcgtcccttaaagcacaatgaaacctctgtgtctttctcctcaaagtagcgtcccttgaacagtaagttattcttcttcacttctt

SEQ ID NO: 11621 - DNA, 679 bp, Cannabis sativa
cttttcacatttgaaccaatatatcaatatttctcccttaattttaaatatattaattttaatttaataactgataacaaaataaaataaaaattgaagaattacactatatattatttttttaactgtttttttaaatttacggtttgagttactatagtggttgcagcgctaattgcgcaattagaggttctatacgattttgtattgtaatttaggttgcagcgctagttgcaatagagatttttatgtaaaattccgagtaaaattccgaagaaaaaaaaaactattttaaagtgtaaaaattaagaaaccccataaaaatttatgtgtttaattttactatacttaattaaaaataaatttacactgtgtcaaaataaatatgtttatggctcaaaacaaaaaaaaaatatatgtttataaaaaatggcagaattaataatgatataaaattaattgtggcacatataaccatatataatatatattatttatatctgccagaccctatatatattgtgacaaatatttaatagacattagggtttactataatatatattaaaattacagctatacatagagtactctgtttctgaaatttcatttacgtaatacgtaccattaaatcacatatgtttagaaattagtggagagcttttgttgtaggccatat

SEQ ID NO: 11622 - DNA, 1506 bp, Cannabis sativa
taatcttttattttggttaagtttatcgtttttacatatcgtatttattttaattgatttttttttgatccacgcatttgcaggtgacgtcatccctagtcttgtcatgtattgtccatcttcccacgtcttatacctcacacgcgttaggtttgtcacgttttttgctacttttgataattgctccaaagtttgtagacttctcagtatattatatagttagagggagcgagcgatttatagtggttttagtgagtttcattgttttcaagttcagaagtttctagtgtgagagtattttagagagagttttgaaattcaaattttctctcctaggtttcatagagggtttttcatttcaaaatttctcaagtaaaaacatattgtaaatggttaaaactcgttcttcgctttctccctttggttcctcgaagcttcttcttgacaagaagaaaatgaagaaaataatttttgaagatgagaacgaaaatctttctagtggttccgatggttctggtgatgtatctgttaaggaagttaagaggaagcaatataatcgtggaaataagaagattactgagaatcaacctttgaaaaagttaaaacaagttgtggaatatgatgaagatttgtacgacagtgatgatctacaagttgagaacaatgaatcaataaaggtatgtgttattttctagtttatttttaatttttatttttcaattttttttttctgtgattttcttgattaggtattctttttaattttttaatttttattttattaatttccttatgtttgttatttattactttttctttattttctttatttttctttttattttgtaggttttttcttttctttatattttttgtttttacttgtctgagatttcaatcttgtttacattaggatttgtttcttttacatttacatttttgtttacataagggtttgtttctttaagatctaattttttcattatactttttgtatttttagtttttttatttaatttcttttaggtgtgaaatctgtttaaatatatttttgtatatgatttagtttacttattttttttttgttttttttaaatttttttaaaaatatttgtaacttttttttctttatttattgtgtcttattttttcagttttatgttattttcttattatatactttactatttttaagtttaaatttgcaagaaattatttgtttgtatatttttgttgtagtttatgtatgtgtgttgttaatctgatttctatatagctatatagtattgtttttttttttaattttatttttgttgatgattttgtttatgttaatatgtttattgttatcatttattgattcatttacaataaacagtgatgttctgttttattcaatatttttgacatggtaaactggtttgtttacattattgtttatttgtaatattattttatttttgtatgtcaataatgtttctcatttttaggagtgggagttatatt

SEQ ID NO: 11623 - DNA, 819 bp, Cannabis sativa
atgtgcattatttaagataataatggagtttgtagcgacaataacggagtctgttaccgtctcatactttagttttatatatacatatagacagataaataaaattatttttaattaatagtgttatttatagagattttaaaatgctatgtcatcgtctcatatctcttatatatatatatatatttgagttcaggttagtatctaagtactaaatgtacacacctaaaattaattatatatcatccaccataggtaaaagtaagaattttttttttatttttttttaattattttgtttatagatatatattaatttattattaatgataaaatatttatatatattttttttaaagtagttaagagtaacacataataaaattaaaaaaaaaaacagaaataatattattattaattatggtttttgtatacaaataaaaaaaaattaaaaatgtaataaataagtgagaagtttttgaattatgatttttttatacattgttatgatttatctgatttttttttttttaaatatttagaaaacatacactatatactttccttaccatattattattatatttattatttaattaaaataaaataaaaaagataaaaagtaaaattaaaataaataacatatattgttacgatattttttttagatcttattatgtttaaaaaaaataaaaacaaacataaatttaaatatattgttatatgttatgttcataaataataaaacaaactattaagatattttttttatataaatttttgaaaagctactaaaattaattttatttaacacaatat

SEQ ID NO: 11624 - DNA, 616 bp, Cannabis sativa
tagaaatttttggaatttgtttttggatattgccttgatttatattagtcaaaatcatatctgagaataagtacatgtttgacatcataactaaaaaactgtttttgtttttaaaaacagaaaattattttttgaaaataatttaacttgtttgaccttgctttttaaaaatagttttcagaaaacaaaataacaaaaaataagaattttgaaaacaacaaaatgctgttttctgttttaaaaaccaatttacttttagtcaatattgtttttaaaaaacactaaccaaacctgacttgtttttacaaacttcaaaaactattttttgttctcatttctaaaaatatttttttgaaaataaaaaacagaaaacaataccaaacatgctctaagtctttttatataacaaaattggtgtcaagaatactaacctaagaatgttaatatagttctctcttgtattagtactctttagcatttttctgacaaaatattatataggaaacacttcttaatgtgtaagtcatgaatagttactgattaaatttaattataaatattaattttaaaaatattaaattattatagtgtgatccaatgacaaatagtaaaattt

SEQ ID NO: 11625 - DNA, 543 bp, Cannabis sativa
gcctactatttggcataagatgtgcgtgcctaagcataagtttatttgttggcaagctataaatgatcgactattgactagggatcaccttagtagagtaatggagattgctaatatgaactgccctgtttgtgagatgcacccgtagtccaacaaccatgttttctttgagtgttattttgccaaattggtgatgtctgatataggtacctggtttgggctgactaattggccgagggacttcaagctatggaaggattggtattcgaagaagctgaagaacttgctagacagggtgatgaacactgtcctggctactgcagtttatttcctttggctgaacagaaatggctgctggtttaataggtgctgtcacgctcctgaattggtgagcagagagataaaaaatgctgttaaatatagaattatgagttgtagttttcaacacttgaaagggagggatttgtacattattaatgtaattcacagctggttgctgttctttggttggggcggctagtttcagcttgctttttgcttgta

SEQ ID NO: 11626 - DNA, 552 bp, Cannabis sativa
ttctaattaatgccatttaatatctccacaaatcgatatattgttttgtaccaatgtccactcactttagaatctcttccacacatctcttgctatatgggtactcaaaaaataaatgttcatgtgtttcttgttgtccacaaatcgaacctaatctatctatttgacattcttgttttttcttttttttttttgaaaaataaaaaaaagtttattaaaactcaaataacaacacaaataaagttacttataaagccttagttaaagctttcacccactactcactatctattttactcaaattcttaacacaaacactattaacaatacaattaaaaatgactttataggaagcttttgatatcaaaacaccttatttaagcatgccaaatataataaatcgtgactgtaataacactcaaaagaacattttttttacctctagaaacttttgctttctgaatctactttaggatatcatgcatgaagctctttttttcgacaagaaataccattgtttcagaaaaaattctaaactagtttttttttttt

SEQ ID NO: 11627 - DNA, 872 bp, Cannabis sativa
aagaattggccaaggggaaggacccggaggaagtagtgctagggtactactactatttggcttatcattattcattattttgaggagtaaatattttataacaaatattactaataaggacatgaaaaatatcatcactagcaaactggcttcatggctggagccttccatatataaatattatatattgtgttttacgagattgtataaaatttgtaatttaatttgttatataaacaggtacatatatatagagtatactttctttatctctttttttttttttttttgagggtaaactttctttatctctttgatttgataatatatctatgttctctcctatatttatataatatggagggaggacattagtagtgcctaactctagatatatagttttatgattagttgaaaatattttttaaaagttattatattaaattatatggaatttgatatttatttagaccaataattatacatacgagtactaaacactactggtaacttttagcatttctcgtataattaatatattaaatgatgcaaattcgtttccgtgcatgagtcattatgtatggggaaagaaaataatataggatgtcctaatatatgtgagtctaaatatatatatatatagcatatagcaggtgtaccgtgtatggcaaagaaaataaattatgtaatatatggggaatctatggcgtgtttggaagtcacttcctaattatagttagttatgtaatacttaaggtagtaattacatattagagtaattacagtcagataaatttagacgacactaaaaatataagtaagcattcaaaaattattaaaatacccatgtgagaacccgctcatagaatata

SEQ ID NO: 11628 - DNA, 565 bp, Cannabis sativa
tgtccaccaattatctttgtgggttgtcgtccaccaacgattggaaaatctttcgtccacgctgatcttttgccatccacgcaaggtattgttaaaaaaaattgttgctagttttttcgtagttaatttagagcgattatatattatttgtgttgaaataaacttcattttaatgaagttttcttaatttgtggtcggttttatatggtggttatggtgttttctaatctagtgtggtggtggttgagaaaaataaaaatggtgtatgctctcgattatttatcgaaagattctcgatagattatcgacaaggttttgttaaaaaaagtttgttgttagttttttttgtggttaatttagagcgattatatattatttgtgttgaaatgcactttattttgatgaatttctcttaatttatggtcggttttatattgtagttatggtgttttctaatctagtgtggtggtggttgaggaaaataaaaatgatgtatgttctcgattatttatcgaatgattctcgataggttatcaacaatgttgttgggttttatgacctaaat

SEQ ID NO: 11629 - DNA, 797 bp, Cannabis sativa
aaaaaaaaaaagaaagaaaacctcaaccacaacataatcaacccaaacaacaaccaaatcaatcttctagctgccacaatataggtcatggaggttattgaggaaatggtagtagacttcgtggtagaggtggaagaaactctaacaacaatggccgcccaacttgccaagtcttcagcagttatatgatacaatcgctatgatgaatcattcatggggagtgaccctcataataaaccaaacactcaaactcattctaaatctggcaatccaagtgcttttgttacaacacctgaggttatcgaccatgaagattggtttgtaaatagtggagccaatagccacgtcactgtggatccaaaccagctgacccaacacattccatatagtggtaaaaagcgatcgattattggatatggtaacgccttattaatttctcatactggaaccagctctttactctatctcgcaaaccacttgttctaaaagatttattacatataccttagattgcaaaaaaactaatcagtgtatcaaaacttacgtaaagaggtatccagtcaaaaagatccaatagcgttaagagagagatctttggtgcttgcattccaattgaagatgtcacatacttgatttatggtgttggagaggagaccatggtgcacctgtttattaattggaagtttgcctctcacgtatagagagcctcaccttgggggctaattccttatattgagtgggactggtatatagaattgggttaaattcctgtagaatttagataagcatggggcgaa

SEQ ID NO: 11630 - DNA, 529 bp, Cannabis sativa
gtaaacttatatgaaatatgaaatttaagtgttggaaaattaatattactgctattttaatttaaaaaatagaactcaattaaaaatacaaaccccaatcattaaattttaattttatttgacattctcattttcatctaatttaaaccccatatcaaaagccttattttttttttatggaaagaatctctttacttcaattttagtgctttttctctaacctatatcacttaacaaaaaataatagttaagtaaatgttacacttgttttgctgggaaaagaaggggatcacgtggtgcagattcttttcctacccttttagtcatttttggcaattttggggaccatgtgttagcaatagggccttatatcccagccttctttaattgggtcatcggtagtcactttaagggttcccataacacaaagaacactacctccagcaaggaccaagcctttcttaaattcctttcaaaaggggctggggtggattttgaaccctttacccaagcaagggaggatgccaat

SEQ ID NO: 11631 - DNA, 636 bp, Cannabis sativa
ttttattagtgttatgttcttgtagaattaggtgaatattcgaaatgtaaacaaaccatacaacaatggctcatatcccatggcccattcaaattttgcaacctatgaaactaaatttggtggtgatctgcttccaaatagacacatctactaatcaagattaaggcctcctaattgcaaatgcaactgatttttgagtcatacacaagaaagatttagaatattattacttccttgctaccattaacaaaattaaaaggggatttagttgttagataagtaaaacatgtcatctcatttaagttatacttccccaaactttactatttccatatagggccaccaatgacaatcagtatcatattattattgtataatttaatgtatttatagaaaaaaaaaataacttacagcgtaaatatttaatttttaacgataataatatctaaattatattttttaaagtttcgtaaatacataatcgttaaatataaaatcattatcaacgtgtacatagtcaaaaatataacttaattaaatatttatgctgcaaattactccaaaaaaatcacgaactaatcataaggcatcatcccgtgatcgtaatgctcaaaatcattatcgacgtgtacatag

SEQ ID NO: 11632 - DNA, 503 bp, Cannabis sativa
gagaatcacatccctcttattgtttgtttaagattaaatttttttacatatgtcacatcaagttactaataggtagaaatttattttttagaattaattataattaactatatacttaagaaattataattaattaaaataactataataaaaaaattttaataattaatatttataaataattttatttttatatttagtctttgttataatatttttaatagtcaaactattttgattacaatatttgctataaaaccacaattttttttacaaaaattagattctacctttttctaaaataaatgtgttaaataaatatttttttataaaataaaaaaacatttaattaattaaaaatacaaacaaatataatattaaaataaaaaaaaaacgttttgttaaaaaaacttgaaagaaaaagatgaaaacttttttagcttacaaaaataacaagttcgataaaaataaataataaataatcctaaaaagatgaactatga

SEQ ID NO: 11633 - DNA, 501 bp, Cannabis sativa
ggttcgagtcccagtcccggtcccggtcccggtctaggtctcaggtccaggtttgtgtttgggtctcaatctagctcccagatctgggtccaaatctagggttcgagttcgagtccgggtactgagtttgggatcaagttcgggttcaagtccaggtcggagattagggttgactctgaattttttataaatattataatacaaactaatacagaccattagttatgtattaaataatacaatatacattgtattaaaaattttggccgtaataattaatacaatataaccattatacttatacgacatactaaacgagcctaatagtagattcataaacgaacaacgaataaatatgtctattttgtcaattgatatttacttttgtccatgttaaaaataattcaatgtaataataacatattttcacataaatacacaaaagagttgcaataacataattagtaatgttcatagttgaataaatacatatcatgaata

SEQ ID NO: 11634 - DNA, 526 bp, Cannabis sativa
tacccgtgtttgatgcagaaggacaaccaggtgttggatctgaaatcaaccctgagtttgagcagtggatagtgcatgaccagttgttgatgggctggttgtatggttccatgactgaaggcattgctactgaggtcatgggctgttctacatctgcagagctatggagtggcttggaggctctatttggtgctcattcaaaggccaaaatggatgagtatagaaccaaaatacaaacagtgaggaagggatctatgaccatgatagattaccttaaacaaaagaaacagtggtctgatgtgttggctttagcaggtgacccatatcctgaatctctccttatttcaaatgtgttgtctgggttagatatagagtatctacctatagtattgcagattgaagcaagggaaaagaccacatggcaaactctacaagacttgctcctcagctttgacagcaagctggatagactcagttctttttctggcaacagtaagcactctaataatgtttctcctactgctaa

SEQ ID NO: 11635 - DNA, 542 bp, Cannabis sativa
  modified_base (168)..(176): a, c, t, g, unknown or other
  modified_base (254)..(254): a, c, t, g, unknown or other
gccaatggtatatatacaaacataaattgtttagtataatttttttcttctaccaaggtgtccaacaccttaaaaagtattgggccattgtacttaaaagatatgatatttttgaaaattatccaaaaaaaaaaaattgtatatattataagggaaatttacatggtnnnnnnnnntttgtcatttttttacaaaaatacagtcagacagaattttttaccttttttactgtattttttttataagtttcatantgcagtatactgtgttaagtttttcactggtgttctactgatatttttttgttgttctactgttgtttgagttattctgctttgtgttttattggtgttttaacctaaggcccatttaacctagaaagtcaaaaaacaattgcagttaagtgggccttaaatgcaggcttaatccatcttagcctaagaccaactcttcttatgatattagacacaataaaatactttttagcattaatttctcttattagtaaaattactaattgaacatggttaaaaaaggttttc

SEQ ID NO: 11636 - DNA, 895 bp, Cannabis sativa
atcaatgattatttatagacaatttacatttagtaaagacaaatttactgttttacccttaagtgtattttatcgtgaaaacccttagctacttataaatgatatttcagtaaactaatataattcatgaaatgagtgctctatcatttatcccgttaagccaagctctaagaaagccatcgtttcacttttaatataagctatagattcaacatctatgattaaagctcccactcaattgaactatcgagttttcaagatgtaagtattgggccaatcctattggtcagctgtaacgaacaagtcaaggaacccgtatggtacaattaggctagaacttaacaatcttaggattaagatcaattgacctaagatcaactaagtgacattgacttagaaaatacataattgtaagtttatgatatcctatccactgtcaatatcaatccagtccgatgtatagctgatacatccgatactagcttactttgccaacaccctgaaaaggacattccacttatataagtgtaagtaaaccacatcgttaattatcatgtcagtgtaaatacactacactgataaatcgtgagactaagtagtttgaagcatataatcatgattatttttcactgtgaagacaacactataatcatgaataactatatgttcaagatttaatataatttatatattgaacatataatcatgaaagtaatcatgtgaatcataaaacataaattgatttatgatcttgtattaattagtaaatctaaatatattgaaatgattttttagggcataaaatcccaacaaactcccacttgtactaatataaaactaaaagtacatttcaattaatcttatcattaagggtgagcaaaaaatctaataaacc

SEQ ID NO: 11637 - DNA, 940 bp, Cannabis sativa
aaggctgggcatttagttgataagtatcttaaccaatgctttctacttttttagattaatgtttctctatatatgctaaataaaatgatcatgctattataaaatgctataatttgttttattaggagtttttttacattagaattaacttatacataaaagtcttttttatttaaacaaatacataaagtctcattttaaattaggtaatacttgaaactttattaagactattgattatttttgacaaactataatgtttaggggtgttcattcaattcaatctgtactattttgttcatagtacattcgattcgcacgcgtttggttgggaggaatgaaatataggaataaaaatggaataaaatataaaatgcataaaaaaattgataaaacaattatgacatttcaatactttaatatgcaactaaacaaaggaatggaataaagattgtttcctttcctttccattccatttcattacctctaatcaaacgccacctaagtgcaaatttcatattttgtattcaatccaatctgtacaataactcaaatccaatccaatctaatctgcaaaagtgaggattgaattggttacttttcaatattaaactatttaatatttatgaaagaatatatcttttttcatataactagcaacaaaataaaacaaattattgttattttatgtctccaacaaaaaattaaaataaataaaataacaaataataaataataaattcaaatgaagaaaaaaaattgtatgtataaagaaatgtttaattttatttaaattgtatgtaaaaaaaattatatataagaatatatagaaaatttttgacatcattacatgtatactaatcgtcaagtcattatgttgaactgtctttaaaaaattatgtaaaatattacatatatttgaaaaaaaaaatcatattat

SEQ ID NO: 11638 - DNA, 501 bp, Cannabis sativa
acatactaaattatgaaggtgattgagtacctttttatttttctattcagtgttgtagaattgtgaaggtgatcccataatcacctttgtttgtttctatgcttcaactatataaatcttctttatatgattggtttatgagtagtacagcatttagtcatgttgtttcctctaatctgggaattaatctttcaaattaaattttaattttattttcatgtttgacaaatatgttagtaattacagttatctaaaaacgataatattttgtaagtaggcagtgtaattagactcagttctcatagaggttttatgaaaattggatagtgtaattgagatttgagacccatcaactaccttaattacatgatttactttgtaattgattagttgaacaaacacatgaaactttgtaattgttgaatgacactcaattccagttacatatattgactttccaaacaaataaacaagtggtttttgcattatgagtttaatatc

SEQ ID NO: 11639 - DNA, 851 bp, Cannabis sativa
atatatatatatatatactattacctgcaagtgaagttgatataagtgatccagaaatgagaagaaaaatgagactgatgttcttcatcacaatcatgatgagactcatttttgtgtttcaatttttgcaaaaaatataaatatgtttttttttatgttgtaattataaggtagctagctctttcttgttgttctcttcattcaagagaaaaagaagagagagagtgtttgtgtttatatataaatgaacaaaagatgatatgtttccttgttaattacctatatattaaaaaactatatactaattagagcacaaaaatcctagtgataattatatgattttttttttgagaattgacagttaatttaaaaaattcaaactttattagttatgcttttaggttataatttattaattattattataattcaaataatgaaaagaaagaaaaggagggacagcaaatgcaacttttcttcttgttgttggggcatgcactaagtctaagagtggatttttatatagggctttttacaaaaatattgaattttcggtaaaaatttataattttattgttatacggatttttttacaaaaatactgtctttttataaaataaccgtaaaacaataaaatagaacaattaaaacaacagttgaataactaaaaaataactatgaaaatttaacacagatcatagtataaaatatacacagtatttttgaaaaaaaatttattctaatagaaaagtaaaaaaaattagaaatttcatgtgagtgtaaaaactttatatatttaattaattataagacaatatagtaaattcgattaggaaaattttatttacacc

SEQ ID NO: 11640 - DNA, 620 bp, Cannabis sativa
tttatgaatactttataattttttcaatatttttgttacataaataaataataattaataattatacttttttcttcgtaatagtgtatactctacacaaatatttttgaaaatttttaagaattcagaatgataaatacaaaaataagaatgaaaattttcttagtgactgtattcaaatcgtgtattacacttagatgatgtttggttagaggaaataaaaatataggaataagaatatgaataagaatgaaatggaataaaaatttaaatacttgaaaaaattgataaaaaaaattattaaattttttctcttgttatattggaatggtctttccttcttttttaaaatggaatgaatagttattccaccaaaatagtgaaagagcattccgaatgtcattccaatactttaaaatgcaacaaaaaaagaatagaataaaaattattttctttttattcaattctatttcattacttcaacgtcacctaaaatggtggactcaaaattccaagaatatatattttttctaaaagtttatttttgtctatttatcttaaaaaattacgtctattcactttaaattttaagtcatccactaattacacttgcatataaa

SEQ ID NO: 11641 - DNA, 769 bp, Cannabis sativa
tggacccagaccccgaaccccttacctcggccccggacccaaaccttgatgagatagaaaatgagaagagagaaagtgatgagagagaaaattatgtgagaaaaatgatgagagagaaaataatatgagaaaatgatgagtataatgatgtgaaataaagtgaaaaaaaaaagataattagggcaaaagtccccaaaaacttagggttgatgcagattagtctccaacatcaaaaattagctataatagtccccaatgtcacgttttctataagttcgttggttccattttctaacggattcgttaaacccaaataaatgttatgtgtcaattttgtattagtccaaataattattttaattaaaaaaatttaaaataaaataaaaaagaaaaatacattttaaaatcatattttttttcttattcatcttcttcatgaacccagccagccatgagagtttgatcggagcaccaccatgggattttgaggcctgaagagaccattcatggccttcatcttgagactaataatagtcataaaattatttatttatttcctttttcaccctcactgcccagaaaccacgcatatcaaaaacccatcacccacgaccaccatacagcagtttacgattcccatttaaataaataaataattcaatcaataatgattgatgatgaagatgaagaagaatcctaacaatctcaacattagcatgatatatctttatacacaaaactgtagtttttatatataaaaaaaaactac

SEQ ID NO: 11642 - DNA, 508 bp, Cannabis sativa
cactttgtcttgattatatgaaattcaaaaaattttaacaggttaaaaatataaggttcaaaaaatgcttttttattttttactcgtgtaaaataaactattttttattttttactcgtgtaaaatagactattttaacaaagttagtgccatgtggattggggttattccctcttgtgcaaatcaagttgttttgcttgatttgcctaatcctgtttagtgttgttattaatgaattccttttcaaaaaaaaaaaaaattatatattgtaaattattctaaatttctcaacattttagagaacatattaaatagttttaacataacgtataccattatgtaaaaattagactaagagattttttcaaaagctaaaagagttagggattgtacaatatactaattttagtgggatgcatggtagaagcaccctaaaatacatattagatttatttagtaggtctcttctcatatattattattttttttaaaaaaaaaatgcttatga

SEQ ID NO: 11643 - DNA, 526 bp, Cannabis sativa
aatctctaggctcaaaaaagaacggtaatagtacctaaagtactcaagattcttgtaagtttgttagtcctcattttaacagatttgttagttgtcctaaaaataccacgtgttgatattaaaagacaatataaatctttaaaaagtttactttgatgcaaataaatacccaatctcaaaaaattgtagtaatagccacaaggtcaaaattatcgttagctcataagtatcaaatttaactgttctatttgttactcccaaaaagtccacatgttgatatttcaacaaattatgatggggagtaaattgatttgaaaagggggtttgtctaacgtcatgtttgattacttttaaaggttattagctattacaaaaacaaattcgttggaaacaattaaaaataaaaggtctgcaattgaaagatagtcctaaaaatagaagttgagatctttcctttccttcaaaattatcaaaagaaacatccaatttcaaaatatattcattatatttagaaaattatactcaa

SEQ ID NO: 11644 - DNA, 888 bp, Cannabis sativa
tgagaaagaataattagtaattttaaccaatttttatttaattttacctcctaaaatatatgacttattaaatattctccctaaaatataatagttacataattatgtcccttctgtcaggttctatttttttactgttaaaaattagtatttttaccctgaaacttttgaccaatacaaaattttgcccccttttattaaaaaatttattttaaaaattataatattttatccatttaaagcaattataatattatattaattcaaaaaaaataataaaaattattaaaaaattggataaaaatattaaattaattaaaaaaatattaattttacttaaaaaaaatattttcaaactttatttgtatatatcaacacgtattttaaaaaatcaaactaaaattattgagaatctaataaataatttaaatgaactaagaatttttgaagaaaaaatcaaacttataatttatatttataaactcatacattaacaaatagagaaagctaactaacaattcaataaaaatataaaattattttttaaaaaagttataaattaaactaaaaaaatattatgtttacttaaataaatctacattttttgaacaaaaaaataaaatatatttaatttattacagtaaaatttaattagtttttaatatattttttaatatgtatattttaagaatcaaaatcaatataataaaattgttaattattctttagaaataaaagaaaagaacttaataagcaataaaagtaggtcaggatctgtttgtcattttataatatataagccaaacaccacattaaggtgtgtgtgcagtgtggacctcattccataaatacactaaactacaaatatggtggtcacatccataaaaa

SEQ ID NO: 11645 - DNA, 662 bp, Cannabis sativa
atctttccattacatccttaacaaaatttgaagcactcttcgctctcatcttttatcaccatcatctcacgtatattaatccaagaagcttgaagtatttgaggtaagaaactctgttagaaactgtaaatcttaatttagccctaattaattcatgagaatcaaacaataggattaaagaataccggaagcgtaccgaagtccatagaatcgacatttaaatggtttaatcttccaatttgcatcaaaatctttctctgaaactttttctattggtgatggagaaacaagagtgaaaagatacgatatctgaagcgatgcaaaaaataggaaccaatacttatttattaataactgaataaacagtaaattaatcctttttgactattttcaatttggcccctcatcaaattagaaattgtctaattggtatccacatattaaaatcatgagaatcatacccttaagtcataaattttattccaaaatagaccacataaatatgacttatttatttgacgacccaacacacatttttatatatacaattatgaccccaataatttctaacaatttattttacatggcaactctttaatgcagttccgtataatattttgtcgactcgaaatgatgtttttttgggaatcgaaaaatgccta

SEQ ID NO: 11646 - DNA, 768 bp, Cannabis sativa
gaaaaagcataattccaaagagcagaaatatggcacaatattcataatattccctcttaaaattgtaattattttttgttcaccaatcatgcacataaaagatatgactctaataccatgttgagaatcataagattacattttaaaaccaattagtaatgaatagaataagactcaatactttactatttatttcatgtgaaactaaagacggagccacttttggctctaaaggaggccatggtacctcgtaaaattttggagaattttattttaaaaaaagagtttatgtatttgatcttatttgatctcccttaatttttttttttttttttatcttttgactctctttattcttaactcgccttatttttaacttctgcttttgttctgtgtgggacaatgtcgacaataagtattgttattaaatagtataatggtgtcaaaagtcacttttggttagataaccctatacttaattatactaataataataatagtgaaaagttttagaaattcttaattccaaattatattttggtaattataattctattaatatttttattgaaaaaaatataaaacaaaaaataaattagctttatttttaaactagaaatgtaaatggtgatggtctaagtaatatattgagcatattagcaaacattaccaacaacacgggtttttcattagttaaccgattaattattaaattaaaatatgatttatatcgttttttcattattttttaaaataatacaatgctga

SEQ ID NO: 11647 - DNA, 551 bp, Cannabis sativa
ttttaggaggattaaaagcagtgaggaggtcatcaaggacatcccaattaactaacagtatcataaactttgcttatgtctatttttatatcacactgagaaaacacattctttctcttataattcttcaacatgtgtcttgtaaaatcatcacattatgagaaattgaccttccctaaataaaagcttattggttttgattaattaagccaggaagcacttcaacaaacctagaacacaagagtttcgaaatacacttataagttgtgttgcagcaagcaataggcttgtagtcaacaatctttgaaggattttcatgtttagaaacaagagaaatcatagtagaatgaaacttagaaggcataaaacctgttatgaaaaagtctgctgacactgccttgtagaactcaacaccaaactcaagccacactgttttgaaaaaacttgacccaaaaccattcgaatttccttatttgaaaacaatttcaacagacctaattgtcggtctaaattaagtctagatccttactcaatgcggtcaagatttcgtc

SEQ ID NO: 11648 - DNA, 560 bp, Cannabis sativa
tttaaaatccataaaaaaaaatatcttaattgatattagaaagaaaaaaaggcataaaatgaaagtatgaaagtgcatgcctttttctaatatcaattaaaaatcataggttctaataataaagttatatgatgtatagagtaaatatacccttttggatctttattattagttttataaaaattatagattagataatttattttgttaaatgataattttagttatatattttaaaatggtataaaataatattctgaatttttattaaaataaaaagatttagatattttatgactagactaattgtatttttttttttacatttatttgtactaaaaattaattttaaaattgtcatattaaaaaaataattcacaaaaatttagctcataacactattttaaaaaataaaatcaaatttaatatttaacaaaataaataaccgataaagatagctcaaaatgatatttaccattaatatatactatattatattttttttgaccaaatatatgtataacgagtaattgaaaattaaataattatctaaaataatt

SEQ ID NO: 11649 - DNA, 553 bp, Cannabis sativa
cactaactcaatagtatatgtacccttgaaaactaaatatatatatactcgtttttctgttttagttgaacaactaaataacaacaaataaaaaatttaattacagctctactttattaagaaaattaatcagacattaaaatagtgcgcccaaatgtaaaattgaaattaaaaacaatgaataaataatctaaaagaacaaataaaagaaattgtacatcatctcaagaataatattttcgacacatcaagaaatttataaaaaaaaatagtaaaaataaagaagaagaaaaaattctccaaacataaagaatttttttatttgtaaaaaaaaaatagtattttatttgtcaaaaaaaaatagtattttatttgtcaactgacaatagaagcatttatacgtttctttttatgttttaagtttataattgtttatttaatatcatttttaattttcaagcattatttgtttttttttaaaaaaaaatgacagaataagctccaaacgcgccaagtggcacatcctcctccaactagtagcaagtgggggcca

SEQ ID NO: 11650 - DNA, 645 bp, Cannabis sativa
ttctcttgtactatttttggtttattattttctgatattttaagtttcctattcagggtgcagattcctttcctaacacttaattagctttgacaattataagagctatgtgttaagggtcttataccacatcttcctttaattaggttggcatgcatatatatcatgatagttcccattctattaaggctcgctccaatactagctaccttagtggttgtattttattattttttaattagaatattaataaattaatcaattgaagaaaaaaaaaaaagtgagcagtagtgctcaacaacagttacgcaccttatatttaaggttgaaaagttaatatatttttttgacatttaatctcattttctgacaactatctctcattatcaactgcattggagttgcactaaggatgacactccacaacaagctagctttcgaaaggagcaagcataattctctcacaatgaatattgtgatgaaatttaaatccttacccaaacaaaaaaggatgctagtaaaactttttctaccacgattagaaagtttggatgggtttcctctatttttctttagaggctatttatttattttaataatactttattatttaaaataatgaaaaatgagcttagaaaacatagt

SEQ ID NO: 11651 - DNA, 568 bp, Cannabis sativa
gttttctacctcttatgatgtcaaacccctagaaaccaagaaaaaaatagatttcattttttcaaagtcatttaaaaatttcatttcattttactagctctctctctctctctcctctgcgaccactagctgaaccatccgtctcctccactctctctctcactttgtccctctcctccactctctctcactttgtccctattccccactctctcgtggcaacacaaatgtaagcgcaacattctcttatctactgtttaaatttctattagccatgatttggtttgttgatcttgatctttgtgtgtgtaaaagaaatccaaagtatccaatccgaagaaagttgtaaggatcgtcaagcaaaaagtaattcgaagcttgtaaaagaagtgttgaggaggatgaagacgagaatagtgacagtggaggaggatgaagcttgaaaaggttttggagcggctgcgacatatgcaagaagtggtttcgaggaggatgaagatgatggtttttctttgatggaatccattagcgatggttttaaaatatcacctatactatggactatagc

SEQ ID NO: 11652 - DNA, 1030 bp, Cannabis sativa
ggggtttgatcctagtcatcttctcatttgattaggtgaaaatgttttgatttctcttgaagcaagccttgagcatctctcttaaaacctcatcaggtgtgttccaatcttgacaaacttggtcgtgtcgattatgtgaggggaagttttttgagttcctcagtcagaccaactcctaagttaatttccctaaaatggggtcaatgtcctccccgtcttgggcgcactttcaagtggttttaggttgtctctttcttctccatagttttgcataccataggtcgttgtcatctctctggattttgcaaaagaggtcttgttcgttcccctagtgccaaagtagaagaggaggtcttcttggcaagagataatgaagcgttataacactcgtgggaagttccttgattgccaaggaaataatagataccagctgccattgggaacttgacggtcaagtggtatattgacaagatagctcaaagcttgtatagggctagcctttcgagcatcacattgtacggagacttcacatcaaccactatgattgttgccatatttgtgatcttccttggggtagtgccgactatgagtggtagtttgatcttaccacatggagctatgctagctccgctaaaaccatacattagttgcttgcatggttctaggtcttcaagtgacaaacccatctggattagtgtttgcttgaataagatgtttaaggatgctccaacatcgatcatcacccttgccaccatcatgtttgctattttcacctcaacaaccaaaggatcattgtaagggtagctgacatgataggaggcggagtctccaaatgtgatgagatcacactcgtagcattcaaaatttgttggatatctttgttcatgttgcaaagaccttgcacatctctctaatgccttccttgaattccaagcaaggtgagagcctccaatcataaccttgagactggctacaactggtgcaggctaaagaggtgcatttcccctagctggagcattaggtcatacat

SEQ ID NO: 11653 - DNA, 562 bp, Cannabis sativa
tgtcaacccgcttgatctagtgtggctcgaacatgtacaagcaccgccaagctctcgcactcatggctgattactgactgatttatcctttcctgcatagtggagcactcgtgagccaagctcaacaagacagtaaaggatatcaataatcacaaataacatatctcatatacattaatgctatttctcatttttttatttaatatagacctgagtgttactctcacatgcctatttctgtctatgtggcatagacccacgtgttacgctcacacgtctaaatataataaggccttagaacggttcatcacggttataataccgagtccaaccaaattatgccttgagcgcataattcttaatctcaatatatatagcatggcatagcatttacacattaataattactagggtaataaccctaggccattaaactgctcactttagagtaatgaccctaatcctaatttttaattaatcacaaatataatattcaacataagcgccactgcacatatctctatgtcctaactactttcttacctgatgtcctgcaactgtg

SEQ ID NO: 11654 - DNA, 524 bp, Cannabis sativa
ttgaagaagtcattgaccctcgtcttgcaggccaaataaagccagaagcagcattgaagtttggagagttagttgaaaaatgcttagcagaaagaggtgtttttagaccaacaatgggagatgttttatggaatttggaatatgtgtttcaactcgaaggacctgataacattaatactggttacttgtcatcttctcaagtgaatcatgtcaatgagttggaaactaccactattctgtccactgcagaaatcagctcagataatttgggtgaccttgctgatgtttcaatgagtaaggtgtttgctcaaatggtgaatgatgaaatgaggtaaagaagagaaaacaaaaaaaaaaaaaaaggctgttaaagggtttaatagatttttcattcaaggcttcttagattgttgctagaatacatgtaaagtaaacgaatatataactatatatatatatatggcaaggggtttggtggagctagttgcttgtgtttcatgtgttagtgtgagagctttcatcat

SEQ ID NO: 11655 - DNA, 503 bp, Cannabis sativa
taatgcttgctcatatgtttcctccgattctggttcaaacaatatttggctttaaagttattgtattggcctttagccaatgacatcaaagtttctgtaagtggaacaacttttaagatcaatatggtcggaagtgttgtcttatgatgagaaatatttgaatgtaactgcttttatttttacttcaaatgatttttctgccactatcatctaaataagaaacaaaaaagggagtcattttggtagttgatcattttatccaaaaaacttcggatactttttagaaacttggccatcgtgtttagatgatataacgatgcacagtggcctttctttgttgttgaggtcttcttagtctttaaagttatgatgtctacctttgaatcaatactttttcatttgtgtttcctttttacctcattacattgtcttcgaattgactgcagacatactttatacaattttgtttcatcgagctattggtcttgtgaggcccaaagatg

SEQ ID NO: 11656 - DNA, 690 bp, Cannabis sativa
tgaggaaaacctagagaagataaggcagtgattgacatgccttccccgaaaagaaaaaaagatgtccaaacttgagaggacgcatagctgcactcaatcgatttgtatccaagtccaccgatagatgtataccattcttcaacttattgtgaggaattaatatgattgaatggacagaatattgtgaacaagcatttcaatcattgaagaaacacctggcagaaccccttatcttgtcgaaaccaattatgggggagttgttgtatctatacctggttgtaactgagcatgcattgagtgacgtattgacacgtgaagagaagaagatttaaaatccagtgtactacattagcaaacagcttgtgggagcggagtcacgttatcccaccatagagaagctggcctttttcctagtctattcatgaaggaagctgcgaccttacttttaagcacatcctacccatgtcctaattaatcagcccctacaacaagtattaatgaaaccacagacatcatgttgacttcttaaatggcttatcgagttgagtcaatttgagataacataccatcctagaacaaccataaaaggcacaagcatttgctgatctcatcgctaaatgtactgggtttttagtagaagacagtgtaagagaattaccagagtgtgtatggtggttgtttgtcgatggg

SEQ ID NO: 11657 - DNA, 662 bp, Cannabis sativa
atcacaatcatatcaataacaattgatcaactaatgccaatcagtaaatgatttgtttagtgtacatcatgactgaaacccaatataaaatgctactaaatttatatctgtgcaaaacaaggaagcacagcatgactttattcgagttttagtacaacgtgtaaccctatggatttttaatagaaagtacttacctttctaacatattctcttttcacatcttcccaaggttttacatgaggagaaaaaatagaagcattccagatggctcctctagcaaccatgactgatgaggcaccttaaacaatatgacaattaaaaaatatacatgagatattaataacatgttcaagaaagtgcataatagtgtatcagatggtttttggatcttctacaaatctatccattgtatttatccatcaaataaaggactcacaatgcagtgtcctgtgccccacaacacttcctaagaggtacctgtaacagtttttatgcgctgaaaatcgtcatactcaaaaacatcaccatttgctattattggaatggatactgatgatacaacatcggctatctcatcccatttggctggatctcttggcctatctgcaactttcctgtaagttgttcagattaaacttaaatttataaaaagataaatatat

SEQ ID NO: 11658 - DNA, 567 bp, Cannabis sativa
taactagcaaatggaaactggtattaactctatttttatttttttctttattttatttaattattattacaattcaacattaaattattggttgtactaggaatataatgatcaaaactatcattaaccttcatccagttaaagaacctcagagctaaatgtggcactttaaaccttttcaacactatgctaaccgatcttccattgaaaccaaattattttaagcacaaataatgtgttacctcatgaacaatcggactaacatcaagtggatatctcccaaaaccaatgttcattctttcctgcaataaactctcctcacaattttaataaacaatgggagtgcaaggcaagcttattccactaactacatcacccattgcatggttttcgctggataccgaaaacccagatgagttccaatctgcaatgaagttatcggtgattattgtagcaccagagaagatatcgtcattgaaggagcgtctcaaccgactggctttttctataactttactcgcaggtagaaactagacaaacaattaaacttatcagcacacccaaaac

SEQ ID NO: 11659 - DNA, 659 bp, Cannabis sativa
  modified_base (146)..(160): a, c, t, g, unknown or other
tatatataaatatatatgagtgattatttaataattaattacatttataacctgctataacaagttactaacaggtaaaaattttatttttagacttaaattaattatatacttcaaataaaaggatttttttatttttacacttnnnnnnnnnnnnnnntttttttatatatttttatagaattctacataaaaactcctattgtaattagcggagcaacttaaattgcaacaaaaaattatatagcaacccacacagaaactactggagattcacttcaaaaactcaaacggtaaatttgaaaaaaaaagctaaaaaaaatatcatatagggtaattcccttaaaataaattattttttaattaaaatatttaataatacatttttttacaactaatatttataaatatttattattttttatttataaaaaaaatcaagtaataggtaatttattaattatttttatttaaactctaattttctttttttgaaagcatttaaactctaaattaatcacaaacaactatttatcaattgatccaacaacgactaaaaataaatgtaactaccgtgattacatatcatatcaatatgtaactattgaaacttattccatatatctttgataaattatctgaatatatttataatactt

SEQ ID NO: 11660 - DNA, 771 bp, Cannabis sativa
ctctcttattttttttttatttttgcaggttgtggtggtggtccgatgggatgatggtggtccaatttgcttttggtggttcaatgagttcctgtggtggtggtatttattgttgtagtttatttgtttgtttgttgttcttgttgttgggttgttgtggtggtctgatgggatgtggtggtggcaatggttcatatttttttaaactttttttattattttacttcggttcataactgaagcaaaataccaatttgtgtcagtgcattactatttgctttggttatgagctgaatcaagaatctattagcgtcggttactaagtgaagcaaaaataagactatttatgtctacaactatagcgcaggatccaccaactgataaaaattctttatatgtcacttaaaaacagaaacaaaatgtcatttttgtagtaataagtactggacctggattctccttttgaatagccaaacacctttctacaaaatcttccacattgatctgagtattgccttgaattgtgtgggaaatttctcaatcactatagcaacaaatttgagagagagagagacagacagagacagagacagacagacacacaaacacataaagggagagagattcaaattttataaagagaaaagaaagaccttttttattcttattttctcagtttttttttattttgcagaaaaaagggttctaagagtctactgaatcaaagctttttatgttctttttatagagtctctctagtttaggtttaga

SEQ ID NO: 11661 - DNA, 508 bp, Cannabis sativa
  modified_base (395)..(400): a, c, t, g, unknown or other
tcttccaattgttaatgggccgtgtaatgaaaactaattgggccatcctatcctatggactaatttataggagatcttacgaaaatactaatttttttgtcatttttatatttttgctcacactttctttttttacattgttactgtactgattttttaaaaatattgtattaaagttttaaaattacaaaaatattgtgtttcaataaaataaaaaaacaacttaaaaagcaactctaaaacaacttaataatatgaattcaattataaaacaatcaaaaaataattacaaagtaacagaaaaataataaaataatgacatgattgcaatatgcaaaataatatctaactcctcaatatgtttttgtattaattttttttacttagttttgacnnnnnnatttatctttttgtactactacatgattttttttcatagaatttgctaaaaacaaaaaaaagaagaggaatctttattcaaaaccgaacaagctacaaacaaccaagg

SEQ ID NO: 11662 - DNA, 661 bp, Cannabis sativa
caactctgacaaatattggaaacaaaaagaccttctcagttgattgccttgatgtaaattactacatggtttggaaacagaaagaccttctcacttctcagctgtcacacacacatccatcaaatatcaatcgactacttctgtttgtgttattgcttctgtttgctctaattaatatcatattattaaattatgttatgcacatacaaaataatatcaaacataatactatataaaaatatgacatataatacaaattaatattacactatgtactaaatggaccctaaagttattgttaaaggtacattgatatttgctgtcagctcatttcattctcataaaatgagtattcatcaatatcaactttgatgaagtgggtgaataattttggttaatgatcaaacaccaaggaatgtagtagagttgaatttcatcgtagaacttgaatattagcaggtaagaaaatatgtcacaaactactcttctagttaattttcataacaaggatgaaagatagatatgaacaaacataacaccaaaaaacatatgaggaaattatgagatacaaaagatatgaacacatttcaagctgccatacactcacacatcactgctctgacaaaatggtgggaaatggtaatgggacaactcggcagtt

SEQ ID NO: 11663 - DNA, 559 bp, Cannabis sativa
gtaagtttctttcttttttgctttgtcatttttgacatcatctctcagggtgttacagatcattactggtgaattttcagataggagccgtatatttgtggtcttatgtgtataacattgttcgtgtatcttgaatgagtataaatgacatcaagtctttgagggaatcattagaagaaccactagttattattagaaactttattaaacaacacaagaaagaatcataaataacaacaaccagataacactttgaaatctcaaatcgacagcaattgatgtgcctctttaagaggcatccaacaaaaagctaagttttaaatataaaataattacaaattaaggtgaaaaacttcagaatctaccaacccaaatttggtttcaagattgaagatttattataaaccaaaataaagtacaatctagaaaaacttgaaaggaaagaacaagttattttaacttaccaattgaatatctgtcaccatttcctgaagaccacgaccatagcatgggacaagcacagcaaaattgttgtctacttcatcatcactctgaaact

SEQ ID NO: 11664 - DNA, 612 bp, Cannabis sativa
  modified_base (534)..(535): a, c, t, g, unknown or other
ctggatccccgccacgaagatttagtggcagctgcggtggtgccggcggtgacagtggtgcttgaagggcgttccatctgtcaccgcattagcctccataaacatgggagttatcaaagctttgctaaagccctccgacgaatgttcggggagggcggcgatcatgatgttgatgataaagatctggatctgtctaatgctgttcctggtcatctcattgcttatgaagatatggagaatgatcttcttcttgctggtgatcttaattggaagtaagtataagaatttatatattgtatataatatctttttgtatatatatttgttattagttaattttgattttgattggttagtgatattctatcaaatttattatattaaattatactacatgttttatacataaaaaaaaatatatttattttttatcatttctccattttttaaagtaatttctccattaattattttaaaatgatattttattattataattagtgaaattattttatatattatttttaatttttnntttttttaaatttacagtttggatattatttcggtagttttttttgtgtgttactatgtaaattttaattgtgattt

SEQ ID NO: 11665 - DNA, 656 bp, Cannabis sativa
cctcattcttttgaaggcagggcaaaacaacttttcatctaccgtcaccctgccaaaaacccttgcaatatcttattccacagaagattaccatattgtaatactttgtaatcacaaaacttctgcccaaagaggctaataatatagactcgtggactaaggatcattaacgcctgaaccacgtaaaaatttgctagttttattatttataactagttatttcctttattctctcaaaatatttagtttttgaaaaactcggtaatcattttgatgctttcattgagagtcaaaaggaagcgtggtagtgttcatcaccctccaatcacggtgaagacaagagaaaactttggaaaaagaactccattagatacggtcatggaggaaggtacctctcgtgcagcagacgcacaggtggaaaatggtagagaacgcgtagctacaatcgagaacccaaagaagaatactactaccgcgaatccagaaatgaacgacaaaaatgttggagaaggtcatgaggatgcccgatatattgagacttatgatgaagatgatgatagtgactactataaagatggatactataaggatggtttgtattacgaacatgaccctaatctggtgcgggtgattgaagagttggcggcagcacagga

SEQ ID NO: 11666 - DNA, 1034 bp, Cannabis sativa
tggttcaataaattcacccacaactcaatcacttcttgggaacaacagtctacggatttcacgaaacaatttcaggcaggaagagacaggcgacctgaagagtcttcccttactaacataaataagcaaccggtcgagtcacttaaggcctacttaagtcgtttcagtacagccgctgctagagttagaaacttgaacgacaatatacaacttactgctcttcaagcagggattacgactgaccttgaaacggctggaggtgagctatgggatgacttataaggtcgcccactgaaaaacattagtgagttcaatgaaagagctcaggtgttcgtacaaaaagaggaagcaaagaaagagatgaaattgataaagactagcttgggaaataaactcagcattgtctcagcaagcactgtctcgacgaaggctgacaatcctagaggctctagcaccaagagaaaagatgactttagagaatcagccaaatataagaaaaagcaaaagaagcacgataagtacgtacaaatttacactatttacaccgagcttaatgaaactcgagaaaatattttcctcgcacatgagcacagggttgcattttgcaagcctgagcccatgagacatgcgaggcacaaacgggatacaacaaaattctgtagatttcacaaggacatagggcatacaacggatgaatgtcgttagttgaaagacgagatagagaaccttatctcacgtggttactttcaacagtatgtaaaacgacagggtaatggacaaaaccagccaaaaccgcctaataacctagacaaccaaagattacaacctcctcctgtagaaggagaggacattatggtgatctcatgagggccgcatctcgctagacaaagtagcaatccccgaaagagatatgtcaaggaaataaaaaatgagtggtcagtttttgctccagaatcatcaaagaaagctaagactaaggaacctctaattgtgtttttggaggaaggcataaagcacgtgaggtacccacacgt

SEQ ID NO: 11667 - DNA, 1843 bp, Cannabis sativa
aaaaaaaatggtaattttaaaaataaaatgtcattttaacccagaaattaaacattcgggttcagcccaataggacccgaacccgactatgccaaacccgaagagcccgactcgatacccgacacatccgaacacccaaaaaaagttcggttgtgcatttccaagacccgaaccctgaaaacccaaacccaaaaatccaaaaacccaacccgtgtgcagccctaccgacccttacccatcttttctttgcagatgaccttatcctggttggtagggccaatttaaatgaagctaatagtttttggaattgtttagagaggttttgttcttagtctggtcagaaagtgaataaactcaaaacgtcaatctttttctgtaaaaatacccctgatggtatgaggagaggtattaaggaagcgatgggtattgattcaccggaaggtgttataaattacttgggtttgcctctattcagatcaagacagaatgatgctgattttaacttcattttggaaatctcacctctaaattgtagggttagaaggctaagactttgtccaaggcaggccgagctactcttataaagtctgtgggtctgtcgatgcctatctatgccatgcaaaccacgaaactctctagtcggatggtctcaaggatagatggtttagtcaaggatttttggtggggctttgaaaagggaaccaaggtcttcatctcaaagcatgggataagctgtgccttcccaagtctttgggtgggttaggctttaggaaaacaaaagaaatgaatctggctttcctagccaagtgggggtggaattcgttgaattgttctcagtctttatgctgtaaaattttggaagccaactatcttaaagggaaggattttctcagctgtagctataaagactccgagtcctggttctggaaaaatgttgtgaaaaccaaagcaattcttaggaaaggggcttgtaaagtagtgtcgaatggaagggcgaccagtatttggagggatccctggattcctcattataaaggttttatcccgaaaccaaatggcggtgttttacccaatgaaaactgtgtggctgaactcctgcttgataatggagattgggacatcctaaagctcaatggcatctttgacaaggaaacggtgtctgcaatcgttaaaggtgttaaaccctcaggttaaggagaagatagatgggtgtggactttagagaaaaatgggcaattcacgtgcaaatcggcttacctgtctcaagcgtttgaaagagctcatcaatgtgaggttgctccggtgctctggaacaagttatggaatagtaatattttggagaggcataagattctctggtggtgcatcctctctaacgcgctccctgttagatctgtgattggaagaagattccacattgaggacacctgttgtcctttctgtggattaggggaggaatccatggaacatcttttcttgttctgtgatgtggcgttgcatttatggagatcttcaccatggggcatctatcctatctgtaatttcgggatttgagtttgggactgagtcaaatttatatggaatctcaataatagggggatccgagtaaaagaagtctttttgtatgcttcgattgttgttgaaactatctggaggatgcgaaacgagtttattcataataacacttatccagatcttttgaaatgtattaaccagatttgtacttcttatgcagagcttcatgatgttttcttgccttgcccgacaccatctttgagggggacctggaggccaccatctcaggattggatagaaatgaattgtgatgccaaggtgggattag

SEQ ID NO: 11668 - DNA, 721 bp, Cannabis sativa
tacttttcataatcctaatccctagcttgcactccctttctatggatcccttaccgcaccaccatcaccactacaaccacaaccaccatcaacaacaaaataaatcatgaccatcacgacaccacctgatctaaacccaaaatcacaaagaagatcaaaatcatcgccacaccaccacctaatctaaacctagaattattgttgtaatatgggtcgagttttttgacacggcacgaaaccgacacgacctcgagaagcacgactatgactcggtaaaaaaaatatgtacttaagcatgacacagcacgacaagaaaaaatatataagcacgacacaacacgaaaaatataggaggcgtcacacgacacaacaagcatgaaagcacgacacataagcacaaatagattaactcgaaagcatgatatattaaaaagtccaataatttaataataataacaatgataaatattttcttattaattaaaataataataatattcaaattataataattatagttattttttttatataattgtgtaaaaatattattgaaaaaagatagaaaaatttacaactttatatattttatagtacttaattacaatatatgtgtataaaaatttatttacaatttattatacattttattaattatgagaaacatattcttaattttatatacgaactatatattgtaaaattaaataataaacatata

SEQ ID NO: 11669 - DNA, 510 bp, Cannabis sativa
aagtattattattaattaattattaaactttttaaaagaccaacttatttatttatttatttattgggactatttcaggaagactagagattttctgaggaggctcttaaattaaggagtttatataaattattatggttttataataaagcaatttagtttgcaccacaagagatgctcagccattttgaaagttgatgtgtatttatatgtttgcttaatttggtttaattaagctcatcacttctcttggtgatcactttaatcctttttgtgcaattctacttgtaaaaacacaatgatcattgatcaacatccatagagacaataaataaaacaattgtgtagaaaaatttgtttatattgactttctattaaacaaagccacattacattcattattacaattttgtattatttaaaaaaaaaacataacacccaaaatactaattaatcaacattaattataattagtcaagatatacatacatattatattatatattctaa

SEQ ID NO: 11670 - DNA, 643 bp, Cannabis sativa
aaaattcagtctctcaattataagtatatgtaaagttagtctcacacattgcttacgtgtggaaataaattgtcatatataagagaaatgagtaactcctcccattagcaattggttttgagatagaaccccattcaccttatcccagattctaacatgtatgagagtcacttgtgattcgttgtgagcccaaagccaccggtctaaaaagccgtttgtgatccgagtatccaaaaagatacttccactgtctccccttgaacctccatttgggacctttcggccaatgtgtgccaatttccagtgttggggtctttgacctgtttcaaaaatctacaaattttccaacgtgtacacccacaaatttcctgatatttagccttgtgggactctttaaaatgtcacgttcggtcctgtggtctcttaaaggtcgttcgttatacttacacttttcaggccaaacgtggggagggtgtctacattgcttatgtgtagaaataaattgtcgtatataatgtgctacttctcccattatcaattggttttgagatggaaccttattcaccttatcctaaatcctaagaatatgtgtgttctttttatatatatatagatgcagttaattattttgataccgcaaatt

SEQ ID NO: 11671 - DNA, 623 bp, Cannabis sativa
gatagggatctcctgccaatgctaacacatcggcccactgacgcttctgtcgaaggtaatcggccatagacatggctccttttctggctgtttggattttggtccgatactcatccatcttcacacaagaatgagctccaaataacgtctctagggcctgccacaagcttgacgatgattcacagcccatgacttcagtggcgatactttccatcatcgatccgtaaagccacccaagtagaagctgatcattcacgatccagatctcaaattctggattaacaataacattttcttcacctgttgaagtatctgtaggcagaaactcaacaggtctaacttttgtgcctttcaaatacccgtctaatatgtgaccacgaacaatcgttgataccattgtcttccacaatgtgtagttattcctgtcaagctttaaggcaaaaggctggttgagggtggtgacgatttgagaacttgcagcacctactgcaggaacggatgactgggccatgacacttgaaatactttgttcacctgaacgggctgaagtttgttctgccatgaagctgagacaacgaagggcaccaccggtgcgattaacagctctgataccaagtttgaaa

SEQ ID NO: 11672 - DNA, 874 bp, Cannabis sativa
atcaatgttaatcttaacactattgacgggtggaaaaatccaatgctccgcaccatcacccttttgaagttcggggcaaggtgtttaaatttgataattttgagcatctctccattggttaagatagttctttgttgaagcaaaaatatccaaagcactaacctttttcttcttccaaacggtctcgtttctgacattccaaatagcccagcagagagtggctattaaacctcttttatcaggctcgaatcgctcaaatatatccttcaaccaaaccaaaaagttgtcaccatgtagcagatgtgtgcctattcccattctgtcccaacaacacttaatctcttgacaagtgactaaacaatggaagatagtctcctcctccacataaaaaataggacacacgacacttacagccaaccttttggttaaaagttgacacatggtaggaagacaattagtacctgctcgccatatcatatttttagcctttggtggaatcttcaaagcccagaggcgcttccaaaacttcgtgatagacacttcattagttaaacctttattttgttgtattaacatgtaagcacttttaatagtgtagagccctcaactctccaaataccagataagttgatcagtttcatgagtcacctgtaaaggcacttgatgatcaaattcctatctcacgcatcaaacatatcctccaaaatctccatatcccatccaccaccctcttgtctaaatagattgttgacaacaaccccttctaatcctgggtgagacgacaccaccataggattttcttcatccggtaaccgtggttcgcccataatagggatagaaagaccatctcctaccctccatcaaacccccttcc

SEQ ID NO: 11673 - DNA, 676 bp, Cannabis sativa
gatcagagataatccctgcctcagccaaagaattcttcattaaggtctgttaaacctttttctttcttcagctcatggatttttttttatatatttattccaagcacgtgtatagttttatagaacaaatttaaaaaggtaaacaaaaaagctcataatttgaattcatgtttaacactttgtccagaaagtttcaatgttcaatgataaaattcctttgcaggcatatttgttcaatgattactgggaagatataggaacaatcagatccttctttgaggcaaaccttgctctcacagagcatgtaagtaccaaaggccaaagcccctaaatagctcataaaagttcttaggcaaacaataattttcatgctttgttgaaataccagccataaccataattacatgtttgtgcaatgtgatgtgatgctatgttttctcttctctctcatctctttcagccaccaaggtttagtttctatgatgcaacaaagccaatgtacacttcaagaaggaacttgcctccatcaaaatttgacaagtgcaaggttagacttctctgttgaagctttaaagccgagtcaaatcagataaacgcacataaaaaaaaaccagctaacaatttttggcttttgatttaatcaacttttaacattctttctggttgtttatacaga

SEQ ID NO: 11674 - DNA, 666 bp, Cannabis sativa
ggcctgccacgttttggtgcttgtgtcttcgaaccatctggttttcccgcattcttttctccttgaaaagcaaatgccatatttccatttggatccgaagacacattttgtcctcccctttgattttcttcctgagaaaccaagtgaaaaactctattaatttcaggtaaagggtccatgacaaggatattacctctgacttgggcgtaaaaatcagatagccccatgagaaacgacatgatgtactccatgttataatggtcttgcaacttcttgactccaccacatgagcatccattacaagtgcagctaggcctgaaattggttaattgttcccaaacagttttcagtttagtgaagtacatgctcacggtttgactttcttgtttcaagttcatcaagttttttctgaggttatagatgtgagcaccatttctttgttggaatctcactttgagatcgttccaaatagcggagactgattcatcatacaaaatactagacgaaatttccttagaaaccgagttaatgatccaagaaatcacaatgttgttatttcgaatccaagcattgtaaataacatgattagaaatagggggtttagagatagaaccgttcaagaagccaagcttgttcttgattgaaatggctaactctatcgcacga

SEQ ID NO: 11675 - DNA, 834 bp, Cannabis sativa
tacatcaaatacaaattaaaaattatatattcattttcgtaatgactatagtcggtatacctggatctatcccttcaaaaccaatttgtttcgtttaaaacctttgttgaaaatcagtttgagagaaagattaaagctctcaaaactaattagggaggtgattttcaatcctttatagattatgttattcaaattagtatagattttcaacattcatgtcctcacacctcagcttaaaatggttgagctgagagaaaacatatgtatgttgttgagatgggcttgaccttacttgctcaagcacatatgcctttaaaattttggtgggatttcttctaaactgctttttacttaataaatagattacccacgccgatgttaaaaaaccaatctccctatgaaattattcatggaaagaaacttgaattccttaaggtctttggagttgcttgttacccttgtattagaccttattagacacactagtttcaatttcattttgttaagtgtgtaaatttagggtataatgattctcacaaaggctagaaatgtcttaattccacagggaggctttatatatccagaaatgccatatttaatgaaaataatttcccctttaagactggaattctcaattactatcagcatgagcaatcagtgtgtgttagtgtcccttcctagtcagccttatttcaatcttacaaatctcctacatcacaaaattcttagtcatctaagcgccaagtggttgcatctcaagtccctggagaagacaccacaccttagttagattctcatgatcaaaaccatgtaatacaaactgatttctctact

SEQ ID NO: 11676 - DNA, 1058 bp, Cannabis sativa
atgcatattaatgaaacaatgttcaacctaaatgttgaaaataaattttgtagttttacctctgctgatctaatttgtgcaaaactttttgtaccagttgtatgattgtatatctttttagcacgactagccttgtttgtagcactctttttctgaaacaatattgagaattacaatcaataaatataaaattcatgaaacatgataaaaataacatagtaaattaaatattaaaacaagaagtacctttgcatcatctgttgcccaatagtttattaattgctcccattgtttatcatatactcttttgtccttatattttttttgctcctcaaaagataaagtttctgaataataagttttcttaagataagctttccaattttaagttccttaccacaagtcctcatagtccaattttctgccagataaggaatatcaaatttttcctagaagattcaaagcatgcattaactattagcaattttaaatatacaaattatgaatgtcaaaattactttaactaatgatctaaaatgttaaattatgtaaaaacaaaaatattaatttttacctgtatgattctccacattgtaactttgtatttgtctggtactttatgccaattttcatagttaattggagcattttttccatctcgtactaatgtcccaatcaagtttgcaagtctacttgcatttttatcatgtggttgtccaaatttattacatgtgatttgtatctttttaccatcacgatttccccaaatgtcacgcatttgtgtaggacctctaccattctttttgtcattattatttgtcaacaaatctgtaaatgattctacaatcttcatcttgttccaatctatattgcatatatcgatccatagctgcaaacattttcaataaaaagtagaataattatgaatctatgagaatgatttaaatcaacaatgaaattttataaactgaaaaattaaaagaaaaaaattacgagtaaagtcatataaatagtgatgacaaaaaagatgctaaatcaattgatggatacttaaaata

SEQ ID NO: 11677 - DNA, 589 bp, Cannabis sativa
ttgacatatcacaaatatatataacgatttttttacaagacctctagaaaagtccaatagatggatgttggagatatcattggaaatgcgacacgtggaggtttttttttcactgagaagcacctaattatatatatttttaaagttttatgggttattttatttcttttcaatatttagtgggaacccaaaatattacttagtgcgaagttgaaatgtcgattttttttgaaccaacaagacctgtaaccaaagaagaacagcaaaagtgaacaggttacaaagatctaaagaggacttgaaacacaattgtttaagctcttcatctgttcctaatgctctgcgagcaaggtcgtgcgccataaaattgttgcccctagatgtgaacttgattgctgcattaggaaaagaggacaaaaattggatgatcttccaaatcaaatcggaaagggctgagagatccttctcctgctttagaattttcgaggcaaggacttgacaatttatgacaataatttcaattagggaaatgaacagccttacacaaacgtaaggccctaaaaagagcctctacttccgcatagatagg

SEQ ID NO: 11678 - DNA, 1042 bp, Cannabis sativa
gaatctccaaaaccattctaaattacagagccactatataaaaccaatcatttttaacttaaaacgaaacttatccttaccttaaacttttcctcttcaaagatttactatctcgatactacaagagcttgaattactaggtttcgggttgaaaatcaaagaaaattggatagtggaggtgagggtttcgccgcaccgtaggaagagggtttcattcataagttttttttaaaaaaaaaactaaaaaaacacgatatatataatatatgtattaaactgataagaataacgttattaataataatattaataatattaataaaaactttattattaatatttatcttattatttcttagtcactaagaaatctataatttttgggtatttggtcaactctgagtaccccaaaatactctggtaaatctaaaaccaatttatcttaataatcccatcaatattactaactaaaactgttgtgacattttcggcctccaatcggatctccagggtcgctaaacctgaaaatatttttattttacaaataacttacattatatccacatattccaaataactctccttaattaataaattacacttatttatccacttatagccaaatttataattgatgctaattaagttagcaagatcataatcccactaattactacctaattacatcataatagataacaaaccctaattattcataattaggtttctaggatacaaccatcccctccttatagaaaatttgtcctcaaaatttacctaaataattcgggatattactcttatattcacgattctctacaactatttcttaactagtggattgtctcattctaaagtacattttctttccagtccaaaactttgataggttgttccccatataataaattagctcaaaatcgttacaactcagaatatggattgggtttgatacatacttttttagtatggagatatgaaacacattatatactctggacaacgcagtataaaaggcctaatgaatctagggtttaacttc

SEQ ID NO: 11679 - DNA, 606 bp, Cannabis sativa
tatccaccagtattttctcataagggcatcaagattccggcaagtagaaataggaaccttgttggtggacatagcatagatcggaattgacgaagcaactgacttgataagagttaaacgcctagcataggacaaagatttcatcttccaaccttctagcttcattctcatgctttccttaagtctattataatcttccacttttcttcttttgaaaatgattgggttccccagatgtttttcttcaccactgacttgatttatactcagaatactcagaatgtttctcttcggctcagcacttgtattcttagaaaacagaatacccgactttggtttgctacacgtctgtccagaccaggtctcataagtcgttagaaccttgagtagattccttgcatttgattcgtttgctcgagcaaaaaggatcgtgtcgtcagcaaacataaggtgagatatcgaaggacaagactgagcaattttgataccatggatgaggctcttctcttctgcctgagtgataagtctggacaaaacatcttggcaaaggagaaaaaggaacggagagagcggatccccttttctcaatcctcgttgaggaaaaat

SEQ ID NO: 11680 - DNA, 1142 bp, Cannabis sativa
ggaagatgaattctgtacaatatatatgaataacatcaatagaagaattgatgttcactacatttgtctttttctcttttttttttagaaaaatgatatttgtaaattttttaataaataattttttgtattattattgctatgtagtatttaaggtgttcaatattatactaacgtgatacctattttcaaatcatttattaaattaaaatttataggagttgatattgaaatgcaccgttaataatttttatagtgcttaagaccttaatgtgactcttaatatttttattatttatatgtatatatttttattaacttcaattcgattttttttccttaaggtgctcaataatatatcgatatagtactcaataaatagttgacatttttcaaatcatttattaaattaaaatttgtaggagcggatatgaaaatacaaaaataacggtatactaccttttgtggtctttgacatcttaatatgccccttaatattttagttattaaaatatacatttcttcattaatttcgattaaaattttaaatttttttccttaaggtactcaataccatatcgatgtggtacccaataattgattagcaattttctaaattatttattaaattaaaatttatgggagctgatattgaaatacattaatagaggtatgttactttttatggtacttgagaccttaatgtgactcttaatattttcgttattaatatgtacatacctttattaatttcgattagaattttaaattttttccttgaagatgctcaatagtataccgatgtgatactcaataattaattagcaattttctaaatcatttattaaattaaaatttgtggcaactgatataaaaatacacaaataacggtatgctacctttttgtggtactttacatcttaatgtgccccttaatgtacatttctttattaacttcgattaaaattttaaattttttccttgaggtgctcaataccatatcggtatggtacccaataattgattaacaattttctaaatcatttattaaattaaaatttatgggagctgatttgaaatgcactaataatggtatgctactttttgtcgtgcttgatattttaatgtgccccttaatattt

SEQ ID NO: 11681 - DNA, 538 bp, Cannabis sativa
gtaggtcactatagttcttcctagtggaggctagactcgtggcgcctattgtggtgacaagattcaccacattcgtagtattcatcgagattctaattgtgactagaacctgagtatttggacctacagtctgtgggtcttgagggagacccaaagatgcggatggtgtgacgagaattcttcttgtattaaccatggcatttgattagatacgatattctcactcttaatgaaagcaccaaactgttgatctcaaaaaatgatcaactaacaactgggtcgtataaatctgatgcttgccacgtgttacacaaatagaatgaaaaagcaataaacatagagatttgttatagaggttcagcccccttgtgattgtgggtaatgacctactccccttttggttgtatttataccgagggaaatattatccagatcactattggtgagatctgttatagcacccttaggattacaaagtaggccagcctagggtgcttactagccttaggtgttggctagcctagtgtaggcatgtgag

SEQ ID NO: 11682 - DNA, 656 bp, Cannabis sativa
ttcatcaagcacattatttaaaaaatctaaaccagtggtgttcaaggttcgatgagttgtttgtgcattgtcctgagcttgcaatactggcgatgaagggtaatatggttgctgggaagatagaatctccacaaattgttgagtttgtgattgttgtggtatagatccgctgctaataccaatttgaataaataagctggagttttcccgcattgatagactcccttaataccagcggtggggtcggcccctaataatgagttttccgccagtattgctctttttaaaatatatttttaattttttttaaaaaaaactaatgtcgatggcccccctaaatctgttggtataacctcattattagggacagaccttccccaccggtaataggcccgcccctaacaagaacaattgttgtagtgtataatgacttcatgtgttattatgcataatatgataatatatagaagatgaacgtgatctaaatgcactacttgaagagctaacagaagtgtcaagtttagaagttgagatggtagaatatgataatgctaagtttcaagaatattttgctagacataaaataattaaggataagaaagctcacattgagcttcgaaatacattaatcaaacacttgtggtgggacaaatata

SEQ ID NO: 11683 - DNA, 1046 bp, Cannabis sativa
  modified_base (790)..(793): a, c, t, g, unknown or other
aagtaacactgacgcaggtttgccgatctccctctctctctctatattccaactatgatagttaaaaacatttgtatttgtgagtaacctcagttacatgtaaaaaaaaaataataataactaccaatttactaaattatgctaatttttttttcccttaaaaattcactatgaattattaagatggttagatttaaatttttttatctaattttataaaaaattattacatggatgaaaattcaaggtacatgatttagtacatatgaaagtttgagagggaatgatcgatttggtagatatcaaagtctgtgagcatgatttagtacatagacaatcacttaaatagtaaaattgatttaacaatctcaatatttcaggagaatttttaacggccaaaaaaattcaaggggcacaatttagtatatgtcataattcggggaaaaaagtaataattagtctaaaaaaataatagagaaagtattttattatagctgtattatattttcaccgtatcaattaagtatgttaagtgtcaacttaaaaatatgtagagatatatctatttaataagtgatctaataatatatcatgtgtatttttgagttaacacttaatgataaaaaaaaaatactagtgcaataaaattgtaagataaaatacatttgttataatttttttaattaaaattattcgtgtaacaattataatattacacaaatattcttaagaaaataaaacaaaaaataataaaataaagaaaaattattctatatattatttttttaannnnttttttcaaatttacagtttaggtttctaaggtagttctccagtggtttctatgtgggttgctatacgatttttagttacaatttaggatgctttgctaattgcaattgaagtttctatgtagaattctgtaaaaatacaaaacaaactgttttaaagtgtaaaaataaaaaaattcctaaaataaaactactcttattatttattgattattttattatttaattttaaaagaaacattattgaatagtaat

SEQ ID NO: 11684 - DNA, 871 bp, Cannabis sativa
tcttttatttcttcctataactaaatgcattcaaatagtaaaaaaattatcttgttctatcttgattgatatctcattatcatagtgaaaattagcatagcacaatattatatatacatatatgttatacaaaaatgactagagggcacactcttcccatgctgagtatgagcttgttctgataattggaataaagtctctttctattggaatgtcaaagaaatatactacaaactttttgccaaaaattttattggactggaacttattttttttgcttaactgtacttgtacatactagatttcttttgtacttgtccatgctcttggtctagatggtgtaaatgtacttataatctattcagcagtttatttagactaaaatgtaaaccacaatgtttgatgaaacaataatttttacagagaaatttttttggttcactctttgacaaagtagtttctttatttttgatacagtaataaaatgtaaaccacaaattttgatgaattttatgggattgtactgaagtaaagttgttaagctgcatttggtgagatttagttgcattaggaaaagttacaaaaaaaatgtacgatcagaaaaaaaaaaaaaaatctctaattgctttgcatttgtgtaaaaatatatgtttgcagaaaaaatttgtcttattgacttctattcacttctattctcttcaataaaaatttgattttggagtccgttgagaagagacagtaattataagtacaaataattgtgttttttatttttatttattgtagaaactaaattagaatggtaggatggacattgaggattagaatccccatgttctcatgaattaatatgaaaaacataataaaaatt

SEQ ID NO: 11685 - DNA, 1435 bp, Cannabis sativa
ttctttttctcttttttttttgtagttcggcccatgagcctttttttagtacaatatggccgacaaagcagcttttaatacttcattttgtttcaagacaagtagctagctgggcaacttttaattccagagttatcatgctttgttatcttctaaaatgaatattttcccttaagattaagtaattgcacatgcaaatgttttttcgagcttgttattcacatgctttgtacgggtatagttaccccccgagtgatcgagaagacttatgactcttggtcacctttattgcacaagtttgattttgtctattcggctgttgggttcgagcagaccctttgtacacattttcaatggtaatttcataacttgctatagaaaataatagacacaattagaatgataattaacatctttattcatttattggtctgaatgtttttgttacagtagtaacttacatttattaaattataacagcaattacatgatctaactattctttagttaattaaaacataaaacaattagtttttctagactgtactttagagatggtcatctgacctaagtgccagtcattttatccaaacccttgagcgaggtccgctcagaaggacatctacttaagagtagatattcgagcattgtgtaccttaagggggtcatcagaccttgtacacttattggtagtattttcttaatttttccccattctaataccttggtactagaacaagttccatattttcatcataccaaccaagtttatatgctctagagtctgtgacttctattacttaatatggtgcttcctatttaagttcgagtacgccaggcgcgatatcttttgtgtttaagaacactcttctaaggaccatatcccccacaaagaatttcctcaccctcacttgcttgttgaagtaccgagacaccttttgctgataagctactagctttagctttgtcgaggctcttttatcttcaatttcatcaagtgattctgctaggagggcgtgattggtttcttgattataagtatgccttttgtgggatggaggttctaattcaacaggcagcattgcttcgtaaccataagccatggcgaatggtgtttattcggttgttgtcacattttcatggtgtctttgagtgtcttattaactaccttgacctaccgatttgtttgagggtgtgccattacagagaaactctcaatgattccatgtgttgtacaaaaatttgtgatcatttggctatcaaactgcttgccattgttcgagacactcttgtgcggaagtccaaactgacatatgatattttttactacaacatctagcactttcttagatgttatggttgctaggggctaagttctatccactttgtgaagtaatctaccacgaccaccgcatattgtaccccgtccttactt

SEQ ID NO: 11686 - DNA, 526 bp, Cannabis sativa
gaaaagtgaatgggcagtaatactctggtgaaaatgtcagctaagtttttttgtgaagatacatagaggagtttgatggagccttgttggaccttctctcgaatgaagaggcagtcaattttctcatgctttgtgtgttcatggtagacggggttctcactaatgtgcattgctgcagtgttgtcacagtaaagtaaggctggggtggagtgagtaatgccaaagtatttgaggagagcaaggatccatgtgagctcagaagtggcattttccatagctcgatactctgcttcagctgaagatcgaaacactgtcgttttttagatttctaggatacaagagagctgccaaggaagagacaatagccagaaatggatcttcgtgtgtcctggcaactcccccaatcagcaatcgagaagaaagaaatttgaacattttattgggagagacttgtctctacatatgctgatattgttagggcagtgttggatggaaagtaaaagccttgtccaggtgtggtttttag

SEQ ID NO: 11687 - DNA, 637 bp, Cannabis sativa
ttttaaggaaaaaaaattaattttacaatcttcaacaaatgttttaggaattttagtaaaagcatttctttaatataaaatattgttaaaaatatataataattggataatgccgacctagttttttttttttaaaaaaaaataatataaaaaatatatataatgtaaaagatgatacatttttgtatttttgttcctctcccacttgttttactagtttaataattaatcactactggttacacacctaattattcctttaattatcttttctattttcattttatttttgaaaaataaagtaataagaatagttggaaatgactcggcttccttctccatttaatttgtgtttcttatatcaaaagaaagaaatttattagtgctttactttttaggagtacaaatcatgagttgaccataccatatcaatatgaatgttagccatgccaatggatccaaatatttttttaagaaactaatttaatataatcttttcattattataactattaatgccatggtaactttaatcattgcaaccctaaaaacacaaaaataaatatagtcctaaaagataaggtaattctatagaatacttgaaaaagagttattttagtacaatatttttctattt

SEQ ID NO: 11688 - DNA, 595 bp, Cannabis sativa
ttctcatggtctaggatggaaacacatctaaagttggaacatcttcccagccaacactaagataaacttgatccacgaattggtgtggagcaaacaatagaaccaatggaagaagtagaaaatgtatgcatcgatgacagagatcccaccaaagtcattagagtagggaagaacctacctccaacagtgaagggaaaaattatctctatagtcaaggcaaatagtgacgtgttaacctggagttattctgacatgactggaataagtccccatgtaattttccatgctttgaacatagaccccaaggcgaattcagtcagacacaagtggagacctttagatcttgggagcttggaagtagtaaaaatagaagtagacaagctgacaaacatcaacttccttagggaagctctgtaccccacatggcttgccaatctgttttaggtcccaaagcctaatgggacatggagaacatgtataaattttatagatttgaataaagcttgtcccaaagactattttccacttccacacattgattagatagttgacacaacctcaagataccaactttggccttcatggatgcatactt

SEQ ID NO: 11689 - DNA, 981 bp, Cannabis sativa
aattttgtgtctgaattatgcaaagggtttgagcttttggctgatcctgaaaagggtctgattacttcagagagtcttagaaagaattctgcttttcttgggatgaggaatgagtaaagaagaggcagaggctatggttagagaaggagatcttgatggagatggtgctcttagtgagactgaattttgcatcttaatggtaagacttagcccaggaatgatggaagatgctgagatttggcttgagaaatcaattgatcaagagctaagcaaatcaaaatcatcaatttaattctccttttttttttttgtattatagatttttatagttgttggaatccaaaactcatattatgtttcttcacttgctaagaaatgttattattatcagtattgttgatcaaaatagtgagcaacactagaacatggaataggctacaagacaaggcatatattttataattcagtcagtctattattttctctatgtgcatatcaaaaatgaaaatttggaaaaggctggaatttccatatacctaatgttaattgggaacggaacatttgaatggtacgcaattagatgccaaaagaattaaatgtccaagtgagtggtatacaaagaagacaagagcaaataggttgaccacagagctgatatttcacacatgggacgtaaatcagacggaacaaattgttcaaatcataatatagggctttaatttggcttaaaaggtgcattttgatctactttttcaaaaggaaagaaaagactaattgctttaatcttttgcaatttccacccccaaaaattgatttcacctgtaagatttaatgcttaagtgggaaaatgatgagaaagcaaatacttcatcgtgggatcatcaaaaaagtgacggcattgccaataatagatgtttgagtgactgctgctgctgaatatggctaggaaatttccaaaaatgtagcctcatttaataatga

SEQ ID NO: 11690 - DNA, 655 bp, Cannabis sativa
aatatcaccaatgaagggaatctgaagatatggaaaaaagggaaagtcaagtcccagatttagtggtccgtttgagatcctagaaaggataggtcaggtagcctatcgactagccttaccccctgctttgtttggagatcataacatgtttcacatatcaatgcttcggaagtatgtgtcagatacgactcatattttaagctatgaagatattgaacttcaaacagacttgtcatacaaggaacaaatggtttagatcctagataggaaggagaaagtgttgcagaaaagactattccgctagttaaaatgttgtggaggaacatcaagattgaagaggcgacttgagagttagagtcacagatgcaggagcagtatccggagttgttcaggtaaatttcaaggacgaaattctataaggaggggatagttgtaataactaaaaaaatataacaatatttaattgggcatattttatgaaatatgtgatatatggatagtggagtaagattagtcttacttaagctaactatgagttgactagtgtaaaattgagttaatggataaataaagtgtaatttattaattgtagagattttatcaaattatgttggtattgtatatataatttttgaatacaaatattttcgagttc

SEQ ID NO: 11691 - DNA, 583 bp, Cannabis sativa
agtgtttcccttcttgttacaatgtgtataagtagaaagatcatgtgataattgctgaatacaccgatcgtgggattatgggataaatgcagaatacactgatcgtgggatcgtggatacgacatatctctgtaatgctaaatttgccaagtgttgatcattctgtgcggatcgctgattatcttgcgcagattgctgacgaggcatcttgctcgaattgggtttctccgaacagatactcacagttgcttccacatgtcaccatcatgtgatgccacgtcgtagtgcaaaaattgggataacattttccccctaagtctgtacgggacttcagaagttgcgtgtagacttcatccgagctgttctacctttggatggggtcacttgtcaaatgcatctgtctgagtctcgatgtgaggctgactgggcaccccttcgattttcggctaataaatgttctaacaattaatatttcgaaatctgtttttctctctccacggttgacggttgcacttgattatttttgaattcccatatttacttttaagagggaatcgaagcgtctgaggttcttttgaaatga

SEQ ID NO: 11692 - DNA, 728 bp, Cannabis sativa
aaaataaaatattattgaataactaagaccatcctcaattagagatataaaaattgtgctatatatttagcacaaaaaataattttataatatatttgcattaattttagtattgtaatacacaattacaaaacttaatataaaatttaatttcaattaatatttttatttaaaaaataataattttatcaataattttgttatgtaaaaaagaatttatatatatatatatatacatgtcaataattcataatttaatgctataactgaatatattaataaaaataataaaatcggcaaaaaaaattagattaaaagatagtgttttgtggtaatgcaaattttacatcatgataaatattatgttaaatttggcataacaaatactagagcatatatttgtaattatttattatgtacgaaatttgcaaatattatgtaaatatttgctatgtactaaatttataacactttacaacatactaaagcatatattttattcgatgagttatattttaactttgcattactttatttgtgaaaatgctctaagcttcgagatggcaattttactcataaatttgtttacctgtgggtaagggtagggtattacctgtgggtaagggtagagtattacttgttgaattagggtttagaataggataagtgtatgaaaagatgtactaaatgcgggtatagggtaagatacgggtataagtgtaccctgc

SEQ ID NO: 11693 - DNA, 952 bp, Cannabis sativa
  modified_base (290)..(301): a, c, t, g, unknown or other
tttgctctaacggattgttgccggattggtagatcgttgattgccgtttgtcaagtgtggagctagtgaacgaaggtggataggtgaaattgttgaagggtgtggtggaggtagagtttgacagaggagtgaaatgaaatttttatttttctaaaattaatttatctatgagttttgaaagttaaggtgatgtttggttgggagaaatgaaaatataggaataaaaatgaaaattagaatatgaatggaatggaataaaaaattaattaaaaaaattattaaattttttnnnnnnnnnnnntctttccttccattttaaaataaaatagtcattccatcaaattggtagaaagaacattctattggaatgatattctaatactataaaatgcaactagacaaatgaatggaatgaaaattgtttccattctatttaatttcattactaactaaatgccacctaaatttacgtatacatgacatagaaaataccataaaaaaagaccaaacttaaagctgccatatttaaataaaaaaaattaaatccatatattcagtgtaaattctgcatttaaaatcatctatactctttactttaaaatcatacatattcagtacattggactcactttgatgataaatttttgataggtatgtccaaaatacttaattacctataacaaagaatactttagtcttactcttattgatatttaatgaccaaacagggtcggtcctaaagtatatgagacttaaggcgaaattaaattttagggctcctatatgtatagtttaactattataaaaataatagttctagtacttatgtaatggtaaaggaattaatctcatgatctcttagttaaaagtaagacattttaccactacaccaaataatttttgttatatattttgacaaaatataagtaccaaatgatatttgccccatttt

SEQ ID NO: 11694 - DNA, 636 bp, Cannabis sativa
atttacatgtttgacaaataagacttctctgttattttttattaataattatgtaattattacctaattaataaacaaacatacgaagttgataattattctaaattaaatttttataattaaactattacactatgcattttgagaattatgtaaataaatctagctaaattagtaaatgtcgtattatataacaaagtctttctacattcaaatccatttttcacgttgtttgatttgattttgacccatatcaatgaaaactatttactttaattagttttcactttctttctttttttttttttgcaaagtaattaattttcacttttactttcactttaactttcacgttctcatgtgttttatgttttaatttttctttctttcttctaaagtggctttgttgaaaaaattgtctctattccttgaactttgaaaagtaacactccatttcatatcacatcaactattaattacttgatccaaggtttcgaatttatttatttaatttctgatgaaaaataaggaacacttgccaataactaaatccaccaagtcatgattgtttatgtggatgataatttcatttaatttatgtatctccagtaaacattttaggcccatttggcctag

SEQ ID NO: 11695 - DNA, 826 bp, Cannabis sativa
agttagttgggaattcttggaagttctgttgaatcactttaaacttccatcgagatttatcatgtggataatgacttgtttgaaagccacttcctattcgatcttgatgaatggaagagtgcaaggcatcttcaaaggcatgaagggattaagacagggagatccattatctcccctcttatttgtcatgataatggagtatttgaccaggagattattgctagcagccaaccaatccaagatcaggtatcactctttatgcaagaatcttaaagttatcaatctttgctttgcggatgacctgatgcttttctgcaaagggaacttaagttcaattcaggagataaaggaggttctggatgaatttagtgcaacttcaagtctggccatcaatactaacaagtctcacctctattttggggggtgaaagaggaaggcaaacaggctatgatgacagaactggcccttcatgaaggatcctatcctctaaaatatctaggagttcctctaagaccaacaaaatggaaagctgaagattgtggtgtgataatcaagaaaataaggcaaagacttcatacctgggcaacaaggcatctctcttttgcaagtagagctcaacttattcattctgttctgcttgggctaagaaactattggatgagcatttttatttttcctcatagtgttacaaaagaagttgagaaactttgcagagggttcttatgggaatggaatggaaatagaagcaaactccatgtggcttattgggaaaaaagtttgcctcccaaaagcttatggtggattgggattcaaagacggagtcaaa

SEQ ID NO: 11696 - DNA, 624 bp, Cannabis sativa
tttcttttttgccaaaggtaaaaaccaaaaacaacaattgtaaacaggatcttagtttatacttgttgaagttctcattccctctcaccatttttgtcgagctcaaaagaaacagggtaaggaagaagaagagaaacggaaaagagagaagaaagagaaaaaaatattcagtaatgagcacaatatcaagattatatacaagctcaatcgagcaaagaatacaatcaagcaaactaactcctaacaaccatacagcataaaacaaacatttgtaacagaaaaaccattagttaacttgctaactaccttgacactccccctcaaacttgaaattggtgctaccaacaatgccaagtttggtgctgaattgagtgaatcttgaattggaaatggcctttgtaaggccatcagcaatttgagctgcaataggaacatgatgaacttgaacaagtttctcttgtagtttttcactaacaaagtataggtcaagttcaatatgcttagtgcaagcatgtaaaacagaattggtagtgagtaaaattgtgctcatattgttacaccaaattgtaggtggtcgaggtaattgaacatggagttcaaaaaacaatgaattaatgcagccaa

SEQ ID NO: 11697 - DNA, 541 bp, Cannabis sativa
acatacaatatataatttctagccatagctaagagacacttacccctttgcatctagtactttcaactttggtcaaatcccacatttgaaacctgtaacaaatgcctggattcgaaactgcttcgtgtgattcatattttgtaaagatcattgctcggtacgaatatacaagtctgggaaagagtccaacacaagaacatattcttggctcccttctattttactgcaaattcaaaagaaacagataaggagaggggtaaatatatcaatacggcatagcttctagaaagaaagagttgttcttgaaagtacccagaaaataaaaatgaatataaaatctagtattttataagagctggtaatgaagcatgaagttctgccaagcattgaaagatccaattcaagagttgttctttaggaagctctagaagaagttcagcctgcaacaaagaaaagtcaattaaaataaaatagatcacaccattaagacatggaaatacaatcaatccacatcatgagactgattaccttgatttcattg

SEQ ID NO: 11698 - DNA, 857 bp, Cannabis sativa
aaacacctcactgtaaacaactaaacaactggtaaaagttaaataaaactctcttaagactactcctttggtaaacaaactgaataggaggcttatcagcttagaattagttaaccactaatggtctgatctttatacttgatacaatttctttgttttttgtataccatttataatactttcaaatcttcctcttgttgttttattgatctaaacatgtgtatttatatttaaaagccactttgtgaaaaggtatattttggatgatataataatttgtcttttatttgtagcacttgcagcttcctctgatggcaaaagaactgagagtaaagaagatgggctttctattgacattaaattacctattaaacatgttctgtcaagggaacttcaggtatatttgtatttgttttatgtgttttctcttgattttttcaattcatgactaatatgtcaaataatgttctcggttgtctatgcagctttacttcgataaagtcacggagcttacagcgaacaggcctggctttaccatttttagagaagtgttgatcagcttggcaacagattccggacttcaccctttagttccttattttatttacttcattgctgataaggtatgcatggcaaatggatgttgtattttcaacaaagttaattataacatattcttgatgctgttttaattgctcatttctgatgctgttttaagataatcttctttaggttacacaaaatatgaataattttcctctcctatttgctttgatgcgtcttgccagaagtcttcttcaaaatccaagtatacatatagaaccttatgtaagcagcttcttttttttttttttttt

SEQ ID NO: 11699 - DNA, 601 bp, Cannabis sativa
tgtgacttattgaagcaattaacagatgcaaaaactaacttggaagctctccaaactaggctacagcagcagcctttagtagcccatttacaccaacaagagaaagaagctcgggagaaagtgatcctaaaacagcagaattatacttcatttttaaaacaaaaggataaattggactgattgcaagatggggatacgaattctgccttatttcatgcttgcattaagcatagaatgagacaaaaccgtattctatctatagaaaaccagcagggttgcagagttagtgactcttctctcatctcagatgcctttcttgatttctataaaaatctgctgggcactacaagatctaacaggaagaaggttgagaaggctatcattagcaaggggcctttggttagttcgtagcaagcagtatgtctcttaaaggagttcactgaagatgatatcaaaaaaggctgtgtttagtattcctaggaataaatccccagggcctgatggtttctccagtagcttttacaaagacaattgggagataattgggagtgagatatgtggggctgtgaaatctttcttggaatctggtaacattttgaag

SEQ ID NO: 11700 - DNA, 561 bp, Cannabis sativa
aatggatgacttggaggagttcactttttgacccgatgcctcttcaaaaagctggagtaatcttgagatgctagcagccgcacctacagttgcttggcaaaataagaaggaatcgtcagcaaagaacatatgagtaagtgagggagcacgatgagcaatgcggcagccttggataagtctattctcttcaaacttttggattagagcagataacccttcagcacagataataaaaaggtaagttgatagtggatcaccttggcggatgccacgagacggacatataggatccaaaatgtgaccaccatgaacaaccttgtagcgaactgtcgatacacaagccataattaagtccacccatctactagcaaaacccatacgaagcattaccgctcttagaaagccccattcaacccgatcgtaagctttgctcatgtcaagctttagtgccatgaaacctttcttgccttttcttttttcgcttcaagtaatgcattacctcaaaagctaccatcacattatctgagattaggcgtcctgggatgaaagcactttgagtat

SEQ ID NO: 11701 - DNA, 617 bp, Cannabis sativa
cattaaaataaataaatagagtgtttaaaaatctattcaaaaatgtttggaaaattttagtttctgaaacaaaaaataaaaaaaaggagtaacaacaacttcaaaattatgtaaattattttgattttaaaaataatttttcgaaaataattttgagaaaatttaaaaagtccaatttctctccaaaaagaattttttaattaaaaaaataatgttttatttaaaatgactacttaaacaaaaatatatatatttttgaataataaacatatcattaaaataaataaatagagtgtacaaaaaagatggaccaaacccatccaaacaagtttctatttcatcctgaatatatgcacaactaattcataaaaatacacgaactagggatattttagaaaaattggtagcaaacttgaaaaataacataataaaatggttggagaaaacattcaacgctaaacaagcaaatgcttcaaaagaaaatggagacaaagatgcctccacaaattttgctcaaagatagtttgggcccccatcaaatttttctctaactccaacattagtaaactacaacatgatgcctgaaaatatacacacacacaaatagaggttagaat

SEQ ID NO: 11702 - DNA, 855 bp, Cannabis sativa
cgatgttctaagttatttttttttagtaagtaacaagaattttattgccaactttacaacttagtatcaagttatattcaagctatcaaaccaaattaaatcttttatactatatttccatcttttaaaatgagaaagcctagaaaaattttctcttttatttttacttacaagaaactttacagtataaacttaagcattccaaagagcttcattcttagctttctcttttattgagatatgctagtgaatagcggttatatactagctcgagaatctgtgtgaattgtctggttgtgagtacttagttacttgtgttcaaactgttgtgagcagcaacaagctccatgtttttacttgttttgcttattagggccagtccaccgacaccagtaagctagctagtagctaatcttgactttatgggctacaacatatataatatatgctagctagtgtatcgtttgttagaaatttaactagattatttaagggttgatcactagtggccgtactaggaattgtgcacaaattttctaattaaatctagtgtgaggattgggatcgcaattaagtaattatagacttataagactgaggttgaacctatagggattgtagttaagtacaataaaattaaacttttacttttatttagcaataaaataataaatttttaaagagaaaattagaactaaaagcagtaaaaacagaaaacaagtaaattagaatgcaaattgacaatgattagagttagggttattgatttcaattgtatcaatcttatatagcataatataatttaattcctaagatcaatttctatgcaaatatagcaggtttactcaagtaatt

SEQ ID NO: 11703 - DNA, 535 bp, Cannabis sativa
attcacccacaaggaatataaaataagagtttttttgctttttgttaagttgcacttaattgatctaagtttaaattttgagaattaaaccttctaaactactaaattagtaaaattcaggtcatccagtttattgtcactatggtctacttatgtgtacacttttgtacatgtgacacgtttatattggtatatataatattattatttaaaattatttcgaaatttatttaaaaattaaataaaattataagaataaaaaatataatatttaaaaaataaaaaaattataatttttaaatattaatattaggtatatcaatataaaatggatatgagtgtacatataagtcatttaagttggtaattaactataaaaaatagattacaccttaaatttattaatgaatgtgtagtttaaagggctttgctatcataatttatgaattaagtaaagtaaaataatagttgagaaaatttaaccgaaaaaaatagacttcataaagtaaagtttgatagtttattgactaattaa

SEQ ID NO: 11704 - DNA, 629 bp, Cannabis sativa
ccaagaacaatgaatcctcattttttgattccagaattaccatctatcttcacaattgatagttgcactataccttgcaaaccagtttaacccctgtataatatcagaattctctaaattcaacacagttgaaacagccactgtttccttgccctcacaacttggaaagggattagaccatatactaaaaaaaataacaagttctccaataagctaaaaggtactaggactagtcagtaacacaccattaaattttcacaaactttcaatcatcctaccatttccgttattgtaaccgtggacagtctcttttcaaatgacctgctaccccaccctgaaagcatgctctcgcatagcattcacttgctggtgtctcttgcatctcgaccttctagatgggttcacagatcttcgttcccaccacgtcgaaaactttggttaccttaaattctctttccaggacccataactaatgggtcgttagtccttttattatggttcattaggatctgcacccttatcaaatctgacattggacatcgaatctttcctcatactatatctcttttgattaaatctttaccccccccagcagtaggtgatacctcaatcacctgagcataaaacgg

SEQ ID NO: 11705 - DNA, 519 bp, Cannabis sativa
tcctaattaattaaccctaaagcaaataaatacttacaaaacatcttatttggccattttcactaaagacacttacagcacacagctcaataatttcaaaccaaaatattaaaatgctaccatgaccatgaaacctctttacatttttttttagttttttttttcattatatatttataatatatatcatgttaccactaatgttgttttaatattgagtggtgcagttacttaatttgttgatacgtcacaattcatgacttaattatactatagttaatggttcaattaattgaacatgcacacgtgtggtgtgtgtaaatatatgacttctcttatcgatataaatacctaattaatgtaactgtaattattcttaatttcatcagtatgaatttcgtgtattttcagttttcaatttttaaaattgtattttcaaaaataagaatagaaaacaactttttattattttaaaaatttaatggtatttagtacaaatttttaaaattatttttagat

SEQ ID NO: 11706 - DNA, 512 bp, Cannabis sativa
ttaattaaatttattttttattaatattgtaccgaaattatcatcacacccttacataactaatactcaatttcaaacataatagattatgctctttggagatggatgtgtaggtttgtcggaaagttgaggcaaaatttcgattagagaaaaatagagactattgtgaagtaataagggtaaaattagtagaataattgaaaaataagtaaacataataaattttgaaagagaataggaaaattaaaggtattaatttaaaagaagcatatagtataattttcttattatcgattatgtataagtctcaatttacatctcggtgatctatgatattattattaagctgacagaatcggggaataggatgtataccacttaatttttttttcacattaaaagatatttatatatatagaataaaatgattactaatcttttataactactaactaagtgagcttaaattaaccataattacatttagattctaaacaatacaattagtagta

SEQ ID NO: 11707 - DNA, 978 bp, Cannabis sativa
aatataatggtaaggaacatatggtaataggtgatgacagcaagcttgagattaagcatgttggtactggtaaacttgatacactagattccacacatttggtcttaaatgatatgctacatgttccatcaataactaagaatctaattagtgtttcaaaactaaccaatgataataatgtgtctattgaattctttccaattttttgttgtgtgaaggagctaacaacaggaaaggaggtgttgcaaggaacacttaaagatggtctctacagattaggcccaattccagcttgtttttccactactgtctcaagtttaaaccagtctagtgtgtcttctttcaattccctaaaggatatatggcataggcgtcttggccattcatccatttctgttttaaatcaagtgttaaggctgtccaatgtaaaaattaacagtagtgaaacacatagtttttgtgatgcatgtcagttcggaaaatcctactctttgccatttaaaaattctgatgcacatgctactcatgtccttgatttaatacataccgatttatggggacctgccccaattgcatctcacactaattatcgatattacattcatttcttggatgattttagtcgttttacatggatgtatcctttaaaacagaaatctgatgcattacaagccttcactcatttcaaaagtcttgttgaaaaccaacttgaaaggaaaattaaatagcttagaaccgattgcgggggaaaatttcaagcattttctcaacttgttaatgacagtgtcatttattttcatcattcatgtcctcacacgtctgaacaaaatagtcgtgtcgagcataagcatcgacacattgttgaaactggtctaaccttgcttgcttaagctcgtatgccccttaagtattggtttgatgctttccaaactgtagtatatttgattaatcgtctccctacatcagttcttaaaggaa

SEQ ID NO: 11708 - DNA, 978 bp, Cannabis sativa
ttgatttaagagtgttagttttacccgctaactttaacggaaaaaaaaactaaattgttaaatcaaattttttattagattgctacatttaataaaagagatatatattattctttaaaaacgaaaaaagaaaaaaaaagcactaggaataaacgatattgttcagtcgtgtataaaataaaatagttacgcgtgcaacaccttatttgaacttatttttagtgtgttaaattttttcgaattttttaaaagtttgtaggatgtcttaaataattataacgtacatgcacatgagaaagaattatttcgaataccaaatcagataaaggtgcatcaatgcatctattttaagcgagtgcattgtagaattttcttatattatatatatatcactaataagtcgactaaataaataatatataataaagggcgcttttacaatgtagcccactaaaataagtgtaatgaggcaacccctaactgtttcggcatctataagaattttttagtcctaattttttcatagtggtatacgctataattatgtaagataccttgcaaaattttaaaaaattcggaataattttcaatatagaaattaatgttcaaaccgtctatttcacacatgtataaaataaaaaagtcatgagtggaacacactctttgaactctattttcgacgtgttaaatttttctgaatttttcaaaattttgatagttgccttaaataattataatgtatacgaacataaaaaaaattggactaaatattttttcacataccaaaacagataagggtgtatcaatacacctgaaatgggtgtattgtaaaattttctaataataaatttaattaaaaaagagaagaaactatatatatatatatataaaaattaattctagaacatttagaaccattcctttaatttgtagcaagtttataataattaattcctaatggatttgtgttattttggt

SEQ ID NO: 11709 - DNA, 755 bp, Cannabis sativa
catgctgaatatgtactagtatgtactttacattgtaatgaaaattgctagcacttactatgatttctatctagtagcttttcttgctgagtcattgtgactcattggtgctccgtggtggaggtaattaggatagaagctgtcttcgatcatgagtcagagatctcccagcgatgtacatatcagtcgtggtctcttggcttccagaccccattttctatgtttgaaaatgtaatcttacttttgtaaatttgttataaaggaatttttataaacagggatccacatattataatggtactttgtatggaagttttattgtaatttaaaatttgaaaggattttaacctaaactacacttttcataaactaatagactagtgagaaataggtttgtaaaagcatacacgtggcgtccctgagggtcagggcattacagtaggcgtgtgagagagatgaagtgaggaagagagagagtttattagatacttagagcttaagattaggtttctagcttagaggcaactttggttttcaagctaaggttaaggcctttatataggagacctaaaaccctaggtttacaattcaaatcccttagtattcgtatagttttttagatatttataaaagaccaaagtgcccttgattctagatgttatttagccattctgttgggcttttagggcccaattcatagcccatagttgttgtcaagatgtagaagtgtccaggaatgcctatagtgcactcct

SEQ ID NO: 11710 - DNA, 575 bp, Cannabis sativa
  modified_base (201)..(203): a, c, t, g, unknown or other
taactcacaaaactacacttcatctacaacgaaaaaaaatgagttctcttaatagcatcagttatgaagtcctcctatcgacgtcaatgctatcatactattgggtctgaccttggcattggtatagaactagaggcaaccattctaaagcagcgttaaaagcttctctaataaagctgtcctatatatatatatatatannnatatatatatataaaaattgttaacacttctaaatcaacttattgaataatttaaggagtagcttttgacgctgaaaagtgaccaatttcgtaccgtttaataagtggtagcggcctcccaaagaataaaaaaaataaagggaataccacaaaaactatagtacttcactccttgtgaatcgctagtatagacctacttctacttcaagcttttattatcgtaaaagtgaattttcttacaagagaagtagaaaaaaactgactaagtctagcttcaaatcacaatttttaaagagagaaatagtaaggagagagaagccatgaccttgtagggagaatggaaagtgtcactacaacatttgacttcattag

SEQ ID NO: 11711 - DNA, 724 bp, Cannabis sativa
ccctttaattatatatttatttttggaataattgaatcataaattttttattttttcttttatattgtggggcaaatttttttttaaaatactatataagttttatactgtgtattgtgttaagttgtcactgttattttacggttattttttagttgttctattgttatttttagttattatgttttgtgttctactgttattttataaaaacacagtattttttaaaaaaaaatcgtgtgacggtatttttataaaagttaatctaaatttcagtatttttgtaaatttctctttattttttcttatattgaatgtggttatttaacaaaaattgttagtttaacaatttttttttattgttttcttataaaattaacaattaaaactaatgtcgttaaattaatcaattaattctattttttttcaaaaaaaataattttaaatgtctaaatttaatttatatattaaaatataacttagataattatttaaagtatcaataatttttttaatatatatcataatttaaatttaaattagacgttaattcaattaattaataatattttataacaaatttattaattatattgtttaaaatatttaaacttatgtgtctaaatttattaatcatatctaatagatgatgttcgttgtcttctgtcctttttttctagagttactatcactcatgtttgtaggcatgctaatcaagcagccc

SEQ ID NO: 11712 - DNA, 618 bp, Cannabis sativa
tttatgatatttgtttccatttttgtatataaattctagttgtttctagttcacacacacactcaaatgatattagttgtttctattttttacacactcttaatactagttgtttccatttttaatataatttgttttagtgtcagttgtttccattttttatttctaatttgacttgtttctatttttaatgtgtgttgtttctatttttttattatatttgtttccatttttcatatatatatatatatatatatgtatgagtgtaaattctagttgtttccatttcaaccacgcactcacaaaatactacttgtttccatttttaaatccgatacgtgagctgtttccaattttcatatatatatatatgagcttaaattccagttgtttccatttcacacaaacagacacacgctcaaatgatacttttttgtttctatttataatttgacttgtttatgctagttgtttccatttaaagattatgttgtttctattttttatggtatttgtacccattgtggttaaatactacttgtttctattttgatgttattgttttcatttttaatatgacttgtttctgttttaagtgtgaggtgttcgtatttttta

SEQ ID NO: 11713 - DNA, 531 bp, Cannabis sativa
agtctctttttctatttttgttcacctttaatagaactgtagaaaaacaattgaaaacagttgcatcttgtacttaccaccactcatcttttttaattttttattttattacactgaaattctttctaataatctattcatatgatgaaaatggccttgtcagcttggtatttagatgatcaaaagcttgccattcatttgagggcaaaaccctatgcccttaaaattttatttcatttcatatacatgaatttgctcctaccttcaaagaaaatgataactttttctacgagggcttaagatgctttaataaggtatgaacaaagtaggcctctcaagacttttgggcttttgtcactttcattgaaaaaagggacaagacaagacaatatggaagtcattaacctaccaagtaaatttccactagcttctcatgtaaaattaccaaactaaaccactcaaaaaactacaagtaattagtgcaaatttgtcaagaaaacgaatgccaaggaatcacaaacaaagttttga

SEQ ID NO: 11714 - DNA, 543 bp, Cannabis sativa
tttactgatttctgcattagacatatatcattaagagtttctcggtggttgcttatccacaagcaaatggacgagtaaaagtagttaaccaaactcttaaggatacattaaagaaacgtctggagcaagcaaaagagaattagcttgaacaactgcccgaagtactatgggtttatggcacaacagaataaacaacaactatattatacgatatgctcaaggtcctatttttactattttaaaaaatataggtccattttgtcatttaacaaaacagatagtccaatcgataacttttataaaacacagagtccaaaatagtatttacccaatttttaaacatttagtctttttgatagtatacatagtcatatacatgaaggtgtaatcggttgactacaatgttttgcttatttgtaattgaagctaaaatcttctgctcaaaagcgaatccttgtcaagcattttatttaagctctgttttttttcataacatttaatactaagcttttcttattaatatcatcaatgtttatacaaaat

SEQ ID NO: 11715 - DNA, 597 bp, Cannabis sativa
tttttttagctaaatttggctgcaatgttacatttcacctcaattttacaataatgctgaaatacattgaggataaaattaatcttttgtttttcaaagaatgatgtaaaatactaaaatagtcaacaaaaaaattaaaattcaaatgaaaaaaatcttgttaagaaaaaaatcttgttaaatatataaataaaatataaaaaattattaatataattaataaataatgaaaagtaaataaaaaagtgatatttattatgatgtaaaattattttgtgtcaaatttaacatattttttagccggtgttaaatttagactactttattgagagttcacttttatatgacaggctaaaatagagtattgttattgggtatcagtgcctaacaaaacgtaccatcttgcaattaattagttgtattccttaaaaattattacattaaattatatgagatatgatacttaattgtatcaatactaatattgacatatatgaaattattaagcactactagtactttttagtatttctcaactgaataaaatatatatgtgtaccacacttttagccattcattagaaatactttaatatat

SEQ ID NO: 11716 - DNA, 518 bp, Cannabis sativa
tgtcaatgaatcccttgtaaacatgattgtatcgaaaaaaatgttcatacctgtctaatggtaaagaattcaagactataatggcctagtcctcattttcgatcttgatgtcacagttctcaagatcaagaattatcttgttgaaatcatccatatgatcttcaacactcttccctggttgcattttgaatgagttaagttttttcttcagaaacaaacgatttaccagagactttgtcatgtacaaagactccaatttcttccataaaccagcagttgtggtttccttcgaaacctccctcaggtccttgtctccaagacttaagatgagtgcactgtgagccttttccaagatttcactcctctctgcatcaatcttgtctttgatcttgtcatcaccaagaattgcatcctgaattccttgctgaaccaagagagctcgcattttcaccatccactaactgaaatcatttttcccaccaaacttctcaatttcaaacttggcattccccatttct

SEQ ID NO: 11717 - DNA, 560 bp, Cannabis sativa
tttttggggggggggggggacagaacattttgtaccccgctgatactgtatatttatgcattgggtgatcaacagcttccctcaggaccttgaactggtcatttagagcaaccagcttcttttaataccaactgcattgagctgaggttgtggaactccactagtttgcacccttgatgtacacgctatgtatccatctcatccatagactctctttattgtttgcaattgcccaaatatatttacacatagctgccttattccattctgtcaatcttttaattcaacaccaccaacagcctttgtttggtgaagaacatcccaagcaatagatccagccccttgaaacatagcttgacctttccaaaagaaagctctacagatagcttctatattcttgatcacttttcttggcgaaatcataatttggctctaatatgcatgaatggaaattagcactgagttaatcaatacaattctccctgcaaaaggcaaggtccgtgagctccatgtcttgattcttgcactttctgtgagttaactatttacggggactaaac

SEQ ID NO: 11718 - DNA, 997 bp, Cannabis sativa
agggtcgggcttcagagaggggacaatggggaatcgcacgtaccaaagagactgaaatctcagagttacaggtggttatgggctggtcgaaaatcaagagggaaaaagtaggattgatgttaatgagcctatatcaggatataattttaaatttcaaaaagaggggttagttgtttattatactaagaggaggcgtgtggaagagggtatatgccaactggaggaaagtttgttgggttaagaaagtgagagggagatattgggctgaaatgatatatgtgtaaaaggaggggaagatactagcccattacattaggttgaaggagtgataaatgtggatatggacccacaaggtgaccacgtggaggaggttaggaatagggaaatttacatggtatattaacttttactatttttttacaaaaatactgctagacagtattttttactttttactgtgtttttttataagtttcatactgtagtatacagtgttaagttttcactggtgttctaccggtgttttttagttgttctactgttgttttgagttgttcggttttgtgttctgctggtgttttataaaaacacagtatttttgaaaacttttctgtgtgacattatttttgtaaaagttaacataaattccagtatttttgtacatttccctaggaataagggggtgaattagatacatcacatggtaaaagtggtattcaaaaaaaaaaaaaaacttgttattggcgggttctcctgttgggacccgccgggagttatgagtttgttaagttgaaatttccacaggcttgggaacccacgggttgttcaattccttaaggaaattgtttttcaaaagaaatccaatttaatttttttgtgtgagacattatgtaaaaaagagaaagttgaatgtgtgagagctttattgggctatgatggaagttttattgttgaggcccgtggtcaaagcggggttcttgcaatgtgtggaaaaatc

SEQ ID NO: 11719 - DNA, 674 bp, Cannabis sativa
aattcttcatacgtggtcaaatgtacttgtagtatatacatacgtagacaaggtctttctcagtgaattaaacactgctaattatgattgattatctaatgatggttatatattgcacatttcttcttctgcaagttatgatttacaaaatatgtatatgtataatttatatatgtggcaaaaatcagaacttgtatttttcttctatctgatctttatcatctaaattttgttgagtcaaataggtacgtgcatatttttattttaagagaggctgacagatatttttttgcatgtagcacctttctcgatgttatactgtcagttctatataatttaagaaaataatttttaaaaaatatcgttaactaattattgagcgtcacctataaaagatgttgagcacactgctagtgcccattataatgctatctctaaaacatcggtttgtcttttctaaatggggtactcctactaaaagcgtggcactaaattaagatcaaaagtagtatattttcaagcattattacaatgcaccaagatatctaatatgatataatattttataattagttagcagttttttataatatttattaaattaaaataactaagaccaaatattgaattgtattatatcttataaaaatgttaggcaccataaaacctttagc

SEQ ID NO: 11720 - DNA, 510 bp, Cannabis sativa
aaagaaaaaaaaaaaaaaagatgactgcttagtccctatgaaaccagttttgactctatgaaaaatcataacaaaacctgtgaaaccataaaaataaatttgtaaactcatacaatatgacaaacttaaaataaataaaatatgacaaaatatatttttttttcctcatataaaaaataaataaaatatgataaatttaaaataaatatatatattataaaaagaaaacactaagacataccataaaaaaaatttaagaagtaacttataaaattaaacgattgaaacaagtaaccagttatatcaaacaatcaattataataataacaaaaacaaataaatctataaaattagtttcaaccctataaaaatcataacaaaacataaataataaatagtaaaaatagttgaaaccaatttcattagtgaaacaaataaaaaaaagcacacacacaacaaaatactcacaaatatataataaaaacaaggaaaaattacactccacaacgt

SEQ ID NO: 11721 - DNA, 624 bp, Cannabis sativa
ccctaaaaataaagattttttagttagaaatattttagggtactcggagttgaccaaataccctaaaaataaagattttttagtggctaagaattgataagataactatcaataataaagtttttattaacattattaataatattatatattattattataatattataatattattttattatattattataagatacgtttatatatattggaggtcaaaaatattaaaccggttttagttaaaaatattttgaaatactcaaagttaactaaataccctaaaaatataaattttttagtggctaagaaataataagataactatcaataataaattttttattaatattattataatattatattattattatcaaacgtatctgctatgtttatatatatatatatgttttaagtttatattaaaagaacagtacaaacgaaactcctttctcttagttcaatgaaaccctcatccccttttattattttctttgattttcaactcgaaacctaatgatctaagctctgatagtagcgagataacaaatctttgaagaagaaaagcttaaggtaaagtttaattttattttatgttagaaataattggttttgtatagg

SEQ ID NO: 11722 - DNA, 760 bp, Cannabis sativa
aggatcaagagataacagctgctacagaaaagttagcagagtgccaagagacaatcataaacctcgggaagcagttaaaatcgttggctacaccgaaagaagctgtactcttcgataaagtaatcattaatccaagtaacactgataaaactgtcactaacaccaaaacaccaaccccgaaagaagataacaagaacaccaatcatcgaacatctctactagatcgaatgctagcagaagacgacactccaactaagaatttcaaatcacccgaaaccaaagaaatcgacaacaactcgactactacgaatactaaattaggttctcacaaggtaatagagccattagaaaacattattttccctaatggcaaagaacaagataagaataatgttgcagttgatatgttagctattgttccttcgaagaaacaagggagtggtgggggtttgtttaggaagttactttggagaaagaagaaaagtagtaagaaaatccctattccttttccttcataacgggaattattgctattatgatgtaagtgatgttaatgttgtgctgatcatgttcatgtttatgttcctaacatatgtggtttggtttgtaatagttccaaagttgcaaaaaaataaagtaatgataataataataatgaaaaagctttagtttatgtttacaattttttggtattgcgtttctactgtatatgctatgttatgtatatagggatatgtttacaatttttttatgccactta

SEQ ID NO: 11723 - DNA, 645 bp, Cannabis sativa
ttgattttcgtttgctagttcgacaatggtgttttggatttggtgatttgttgctaattgatgttgttctgggttttatagaaaggttagcatatcagtcttcaaattggtttgattgtttgatttgcatgcgcttattcatttttgttttctattttttctaattgtatttttttggcaactgaaacttgattcacgtcataattgctgatacggacggttaaaatttcatcttcattaacgttataggtaatattataaattagatgataattatgtatattgttaaaaaaaatcttttttctaacggtgttataaataatacaatactatagtttgaggtagcaagcaatagtcctcatggaaaattaaaatggagaacttactaaaatattagattttgggcaaatatttacaattgtactcccacacacggaaaaaattatatttatactgtcctgcctttctttttcttttacactgtaaacaccaaaaaaaaataaaataaggcctccatcttccacacacacggatagaaccaccatagtaatatgagaacaggcagaaaataactattaatttcgacgagataaagcaaaaacattaaaactattagtactaaggttgtcatggtttttctaatgt

SEQ ID NO: 11724 - DNA, 590 bp, Cannabis sativa
aaatagattgtagctaaaaataatctgtttaaaattaaaatatttatggaagtaattttttttcttcaaaattttgattcttaattttaaaattaaaaagtacaaataattttacggaactttttttttttaaaaacaaatattgttaccttaataatttgttactttttttgggaataattacatgaaacactaatttttataaaaaaatttacatcttaccttcaaagtttttttttttaacacttttacagtattctataaaaacacaagaaaataacaagaaattcacgtgaaagtaacattaaagcaacaatataacaacataaaataataatataaaaataacaaaaaaacaacaataaaataataagaatataacataaaaatacactaaaagaccgtattttatgtaaataaaatctaaaaaaatattaaaaattccatattttgtatttttttttattgtttttgtgtttttttttaaaaaattatcacttttgttgggtacaagaattaggcccaaaacaaaatgaccaaaatgcaattgggccatcaaagcccaccttctttctttctcagccttccct

SEQ ID NO: 11725 - DNA, 635 bp, Cannabis sativa
gctatatttgcgtttgttgatcgttataaattaaagctagagaattaaatttaataatttggggatatacggtttgttagagaaatatgtggttaagataattttttttaatttaaaaaaagattgtttaatttttggtttaattattgggtttatttattaacgagttatttattaacgagagatttattaacgagagatcaaacgtattgagatcaaacgtattaagatcaaacgtattaacatcgaacgtattaacatcgttaaatttaacagaatattctttatttttaaggtatattctgttaaaccaagaattgccgttagataggcacttttaatatataaagatatgtgggagtagtttatagtgttctactatttttagtgggacactatagactacacaattttttttaattaacattaaaataatatatttatgattaaatttttattttcatatacatagtatagtgtgagataatttaataaaattatataataataaaaattatatttttagtgttgtagttagaattggaaaaaattttactgttgaaatagtatcattttagtgttgatttgacaataaatttaagttttcacattagaattgcccttatttgtacatg

SEQ ID NO: 11726 - DNA, 528 bp, Cannabis sativa
aaccatacataacaagatgtccaaacagagtcatcgggagatatccgaccaaagatcgatttgcggataagtgagaaaattaattaatttagatcttagatcttagatctttaaattaaaaaaattaaaaaataaattaaaattttaaaactaattacgcgatataaaaaattatttatttttattagaaaattcatttagatattaaaaacaatatattaaaaatttaattcgtaaaaatatattatattaaaaactaaattttacaatatcaaacttgaatatattttatttttatcaaagaatgtaaatttgttaaagtaagcataacgttttttagtttaatttataacattttttttaaaataattttatattttaattgaatttttaattatttttctttatttattaaggtatgaatttataaatataaataagtttgattttttttttcttcaaaaaatcttagttcagttaaatttatttattagattctccataatttcgatttgattttttaagata

SEQ ID NO: 11727 - DNA, 755 bp, Cannabis sativa
tttttttttttttttgaaaaggggaaatttttatttgaaaaactatcatcccttacaattaatgaaagcaaatcagatggagcagaaagctcatcaagatcatacaatctgacgtaaaacaagaccaccttgcaatgcagtgagcggtcttatttgcagatcacttaacaaaagaaataaaaacattatgtaatgctgaaaggagcacttgacaatcttgaacaagtaatccaaactgagatggcatttgaaccgagccattaatagcctgaacaactactaaagaatcagtttcaacttccacatcagacacatttctcatcttcatccaactcaaagcctccttcacaccaacaacttcagtaatctcaggagacaccaacaacaaaggaaaaacagagataatattgtgatattgattgtattgattcatctgtaattatatcaatcattacacaggtgtatttatagtacaaaaaaggagaataattctgtaacaataaaatattctctatcaatatgattggctccttaggataatagaatcccatgaaatgggaaatagtctatgatagcacattaaggaggagaataatcaggtgtggacgactgctctttttctaacacttggatctatcaaataatagatttttaggaagaattcctactggtactcaattacaaagcttcaatgctactgtatatgccatgaataaattatcttgatccaaattctctagatcaagaattatctt

SEQ ID NO: 11728 - DNA, 704 bp, Cannabis sativa
acctgcctgctgagcttcgaagaagctctttcctattcttcccaaaaccagatcaatattagttgcagaatctcgaatacaataggcatttctttggtgccagatttccgagagagcacagccaagatagttgagtatatcgattctgctattgccttggtatatatcaactattgtttccagcaatgtagtcaaactatctgagattataccatcaattcttaaggggaaaagaccaccaaaccaaatagctctagcaaagttacaattaaagaaaagatgggaagcattttccaaatcataatcgcacaagctacaggtcttatcttgaaggaaatgaagccgatttttggtagggatagcctcattcaaaactctccacagcatcacagagttcctaggaaggactccctcttcccaaatccacttccaaatccttttacttggagcaaatctatgaacattatccacttggtaagcatctttaacagtaaaattacctttttgattgttcttccaataaatctggtctgggaaaggagctgggattctaggaatactgcagatccgattccctaactccgagccaaacacctgcttgataatctcatcattccacttgttttgaagagaaatgtcccccagagacttaatagtatatcctctgcctctaatactattcatcagttctttaaactcatgga

SEQ ID NO: 11729 - DNA, 532 bp, Cannabis sativa
agccctcaagattaaggggtggaataaagccatggacactgaaattttagccctcaaagccaacaatacctggaccttggtaccttatttagatgagtataatcttgtgggctgtaagtggatttttaaggaaaaattgaatgttgatggctctcatcaaagatgcaaagcaagacttgttgccaaaggtttccaccaaagacctgaccttgattttggggaaacctttagccctgcaattaaggcatccacagtctggattgtgcttaccattgctgtcaaccgaaattggagaatccaacaacttgacataaataatgccttcttgaatggcactctagaagaagatgtatacatggttcagccagagggatttgaagatcccaccaaaccaaaccatgtgtgaaaattacacaaatcattatacgggttgaaacaagctccaagagcttggtttgataaactcaaaggcactctactcgacaggaactttaagaactcaagggctgacacctctctattcttctacaaa

SEQ ID NO: 11730 - DNA, 548 bp, Cannabis sativa
aaagagccaagaatcagaatgaagctcaaattcagatcaaaatactgaaaggacaacaatctaacgtaaaaatcaaagcatgttcaaagcaagaaaatattgttcaagcattcatggcaaaatcaaccaaatcatctaaaatagcaagaatagaaagcttacccactacaagaaacggttgaggaagaatgtgggaagatcggatcgtaaaaataatgcaaaaatcttaggaaaatgatgcttggtgggttcggccctctagagagaaggaggagctatatctaatgtaaagttttagcgagagaaagtagaatatgaaagtgaagagtgaaaaaggcttttcctcccaaatgtacttatgtaaacatgtgggaccttttttcacttactttacctacacatcaaaaagacaattaaagcagttattttatacaacaaatgagatcatacagtcaaggcaaagtatttcaaaaggctaaaaacgcagcaacttttatttggctaagggctacagcaatcctaactgcactaacatacctagtaagtct

SEQ ID NO: 11731 - DNA, 532 bp, Cannabis sativa
agacgtctgtacggatagagacttaccaggtatgttagtgcggttaggattgctgtagccctttgccaaataaaagttgctgcatttttagccttttgaaatactttgccttgactgtatgatctcatttgttgtagaaaataactgcttcaattgtcttttcgatgtgtaggtaaagtacgtgaaaaaagggtcccacatgtttacataagtacttttggggggaaaagcctttttaacttttcacttttcatattctactttctctcgcttaaaatttactttagaaaaagctcctccttctctctagagggacgaacccaccaagcatcattttcctaagatttttgcattatttttacggtatgatcttcccacattcttcctcaacggtttcttgtagtgggtaagctttctattcctgctatttcacttgatttggttgatttttccatgaatgcttgaacactattttcttgctttgaacatgctttgatttaacgttaggttgttgtcctttcagtattttgat

SEQ ID NO: 11732 - DNA, 532 bp, Cannabis sativa
atgtatacacatgtttcaaaaaaaattaagatagatcggtattatggcttaaataaaaagaaaaatggtatttataggattaagttttaaatttggtctgtcagcgtaattttctctaaattataactatgtaatccattcctaataaattagagaagctcccacagttacaaaggaaacttcaagcccatataggtcatgtgttgagattgggagagtggatcctgggtttctctacttcacatgatagttctaggtgtaatatctcaaaaacttaattctggttaattaaactatatttaaaaaatatgtagtaataggtgtattaagggcataaatgggtaagattacaatcttactagaataattatgtgatagctaaggattttaatagaaatgaataaataaacatactttattaattatagagattttattggaatatatgagttgtatgcatgctatttatgaaataatttttttttcaagttcagcaatcgtggaaacccgattggttagctagaaatgttat

SEQ ID NO: 11733 - DNA, 833 bp, Cannabis sativa
atcggctattttatgaacaccccataaactatgaataagatataagatatatttaattaataaaaaagtttataattacaatataatgtttatatatttattttaaaaaaataatacttatatttatactttcaaaacatcaacgaattaaattttataaatttgtacatgaaaaatacaaaatcttacttttactataattttactttcacacgggtaggaaaacttttatactcttttgttatttaaatttctacacaagatggcgtgacatccactcgggtgacacatgatagattttatcacctagactgaagattctacccttgatgaacctgtcagatgttattttatcaagatctagatttattaacatgtatgtttgattataaaactataatctaacatcctaaatatgaattccctaaaacaatgaaataaacacataaaagtttatagaaaaccttacattggttgcagcaaaattataaaattatatgactcaatgactcatactcatttcgttttttagatctctaacccttgatcctttctgtcgcagagtatgatcaagatttgaacctgaattctacttcagttgatagaattctacacaatctttcacactatttttgacttgaattgtgtgggcaactcctcaatcactataggcttcgaaattttaaggagagaagaagaagatttcgacaataaggtggctcttttctattttctatttgtttgatagagagagaattaggttaagcctagaaaataagagccatcttattatatttataggataagttctagtgttaggtttagaattaaaa

SEQ ID NO: 11734 - DNA, 1192 bp, Cannabis sativa
  modified_base (914)..(916): a, c, t, g, unknown or other
  modified_base (1130)..(1134): a, c, t, g, unknown or other
tcagattttaatattatttctctatgcagaccagtttaaagatggcttatgcttactctcgagctaagtcggctgcctctaagaatgacgccatttccaacatcatgcgggcagaagtagacttggctaggaaggatgccgatgaagccagggttcagcttggggctgtctggatggaactgggagaggtcaacaagaaacttcttgtggctgagaagaaggtggccgagctgactaaagatctacatgcctctgatcaacttaaagttgccattgcctccttgtcaaaggaagtgaccaccctttaagaggaaagggaggttcttcgagctttcttgcgcaggttggaagaagagaagaagaccaaggaggaggagcttgaagctgaggttgagaagtataagtcaaaggtcgagcagcatagagccgaagtggcaaggctcggagggaaagtgaatgccttagagacagctggtctcaagattttctatgacttctgaaaggctaatccccaggcaaactttgattacttaggtgataccaaagacatgtttctctagtactgcacttctcaggtggcctacggggactccgaggcgaccacttccacctctggcctaaatgttgaagtgcctcccactcagacaaacaatcctccagctccaactgacccagaagacccgtacaaagagcctgggactccagccgtttgaatactttctttttctatctcttttatatctgttcaaccataaggccttttttaagacaaagtgaccgaccaagcggtccttaaacttggaattatttttcatttttcagacaacaggctgaccgggcagcctttaatcccggttttacatgcttttgttatctttactgaatttcatctctgtttataatcatcgtgaaannntgtttattttatttttacgaaatgttttgtacaggtatagatgtcccccaagtgaccgagcagacttatgactcttggtcacttatactatttcgcgagtgtgctttttttttgcctgtttggggttttgggctcgaccaaaccttttgtacgcacttgatggtaaattaatagcatgctagtagattcgaatcaatttgaattttgaaataannnnntttattcatttattgatcgaaaacatgtctattacgtagtaacttacatcaaagctat

SEQ ID NO: 11735 - DNA, 700 bp, Cannabis sativa
  modified_base (226)..(231): a, c, t, g, unknown or other
cacctccttcttctctccttctcgccatggacatttctagtttggggatggtggcgatggcgatggctgggaaggaaggaaggaagatggtggtgatggctgggaaggaagggaatggtggtgggtggtggctgggaaggattcagggtttagggttcggctggtggtttcgggatcccgtagaaaatgcttcatcgtggacaaagaaaaagaaaaagaaagaaannnnnnaaagaaaaaaaaaaagaaaaattattttttatttataatttttttaatttattaatttataattaattttttattttttttaaatgattttttaggtggaccaataaaaattgtgtcacgtgtacactgtatccagtgcaacatggcacttaatggatagaaatattaaattgtgaatgcgaatattgaaagttttaccgcccaaatttaaattttggaggttaagtgaaaccaaaatgaaaattttgggagttttgacgccatttaccctaaaaatatattataatttcttcttcttcttttttatatatttttttcattctaaaaatagctatatatctatttatataggtttctaagatctttcctttaccattttttttcttttatttatttatttaaaaaaaaaaagaggaaaagaaataattgcaaatttctacataattacagtactccgtacgtagtccca

SEQ ID NO: 11736 - DNA, 511 bp, Cannabis sativa
aagtgctacatacagtggtttgcttactatcatttttccgttcatctccgcaagctacaaactcaacaaaaagaaggtaattaccaacaagaaaataaaaaaatgattaaaaacactaaataaaaaacagagtgaaaaaacaaaactgcctgtaggcttattactcacagctcgagatgcttcctcggcagtggataaagcaacaaatccagatcccctgctcacgccactaggttctcgcatgacctatatatatctccaataaaaatgtaaaatcagcaacaattataaataaaggcttcttatttcacaaaatgaaatgcaggaaacaacacaaaccttgcatgaagtaattgtaccaaactcagagaacaattccttcagcttttcatcagtcacactatcatctagatttttaacatagagattcagtccttcatttttgtcaacagtctccttaacagtctgctcaaatttgccttttaattccatctctctttcagcttttttc

SEQ ID NO: 11737 - DNA, 1140 bp, Cannabis sativa
aaattaataacaatcaagggatcacccagatcaaactactgagtagagaaaccttactaattagaataaaaactattcctcccattaaagaaatttaaaaaaaaaaggattaaataccatcacatcagacgttttgtctctgccactaccacgaggatcactacagccactcagtagaatcatcaccacagaaaaatttgacaaaagacatgaaatccccacccatatctccattgtgaatcccaacctctacgaaccactgacacccattcgagatcatctctgccagactactcatcaaaagcaagaatgccatccctaaagaacaaaaacccaacacgatggccagatgaaaaaggagcagatccatgacgacgaagccccttgacccaaatagggacactcctcgtgaacccaaccccacaacaaatctgatcaaagccaatcctaaccagcaagcgaaaccccaaagattgaaaaacaaacgacatcaatcctccatctaggagtgttcacagattggtttggtctgaatttttaaaattttcaaaccaaaccagttttatggttttttttaaaaaattcaaaaccaagccaccagaccaattaaaagatcaaaccagattaaaccaaaccacgcaaaaacagattggtttggttcgaaccatagtttgtatttcgtagttattttaattttttttcaataattatttatttttttagtatttttgtttacttttaataagtttataatacataaataacaataaaaaattattatcgtaacaatataatttcaatatcaatattctacctaaagttgattttgtcaaaaaaaaatatattaagtatatataataattatacggattggtttgttttgaaccgccactgagatttttaaaactatgactgaactagcgaatataaaatggtccgaattgatcaaattattcacaccagattcttttggtccgatctcaaatagtttggtccagattgattagggtttagaatcacgaattacggattatatgaacactcctacctccatccaaaatcttcttcaagcgcttgaacaatagccatagccatgaccacaacaaaacccagaactaggtcggtgaaccatggctgaag

SEQ ID NO: 11738 - DNA, 501 bp, Cannabis sativa
agggcataaaacccaacaatgagtgcacctagtaatgctagtaggctatccatgatggactcacctactagtacaaaggtaaaaggggaaggaaaacatgcataacaaaaatttataacgagagaacaaccattcgtgtagctaaataaaggaggcaacaatgacaattacacacttaaaattttattaagtgggaaaagcaaaaacaacacatggaaggatatatttaagacctcgagaggtagagtaacgacaatcatctccaattcgcgaggccacattacggtcgtcactgaccatcatccatgggtggtctcgggatgcaccaccccgaccccccataaggtggtctcggggtgcaccacccccacccccataaggtggtttcagggtgacacactctgaccctcacttgagagtggtgcccctacaactgcaaaaaaaaaaacaacaaaaatgcagatttactcggagtgtaccccgtgttggaaattattttac

SEQ ID NO: 11739 - DNA, 640 bp, Cannabis sativa
gaccaatgctccacacaaatacaaggactggaacccattgtgtttgtagaatttttgtgagcaatcttccactgactaaagtaagacaacgcaacagccattaccccatttgcaacaatttttttactttgtcaaacaagcccatttcttgctttctaaagagaccaacaaatcattgcaagatgtcaaatcaaagtcttcaaaaatcctatgaccagatcataaaactatctttaaaaaacagtggtcgaaaggctgcaaataaccccatcaactcgctgccaacaagctttggctaaaggacactcaaccaaaatatatatggaggattgattcatccataccttggcacaccaaataaatgacgaccacatcaacatgtcaaccttttaactggatcagtattggtaaacacctagaatatgccctccaaagtaagtctttaaccttaggaggaattttgagttaccataaagccttccaaatgccttaataattatcttccaaccacttaccgtaaagcactttgagaaacttgtaagcactctttaccgaataaactcctgaagtctctttaaactaataccactcatccatagtattggataccttaaaatatctccaatagagagctataaat

SEQ ID NO: 11740 - DNA, 684 bp, Cannabis sativa
ggccactttggatgaagtaatgaagggcccggtagtctacaaaaactttgcatgtcgctccaatggctgagaagctgatgagctacattagacactcacttgggcccaccagttggaaaaaatcattactatttttggaatcaaaccctcaagcttgggggtctaccactgtcttcctaaggacgaagagacacctaatcataactacaacgacttcggggcgtggagccaaacccacttaatgttcgaggccatgcttccgcttcaggattattgattttttggtcttcgttggtctttcaccctaccaacttattccataagcctaccgcctgttatcaggtttgtatattttttatgtttccaggaaattggccccgcccagttcggctgagatttcgtacttttatgaactatcagtccccaaaaaggggacaagtttaaagacggtttttacaaactctaggcccatccggccaatgagggcccggtacctttcatctttcagaagaacgtgaaggaataccgccatcagtttttcttttcctccaacttcaaagcctttgagcttccggatctactgacagactaggtcagggttcctcccatgcaccgcaccgcccccactcaactctttgtaaaccatgcacaagtttttgctggttataaaaagaaagagttgaa

SEQ ID NO: 11741 - DNA, 874 bp, Cannabis sativa
acaaaatcatgtttcaaccctaaacaccgattaaagggtaggcattagcagattttgtagttgagtgtaggggcaaagaagggagcacttcaaaaaacaacccggagcctgtaaaagaacattagtcgagcagcagcgaagacaaaccaacctggaagctacatgtagatgggttggccacagatcaactattcggtgcaaggattgcccttttcacacctcaggggcaacatctacacggggcagtcaaatttgggtagagcatccaaaaatgaagcacaatatgaagcccttattcccggcctaaaacttgctcaggaattgcatgctaaacacattgagatctgtagtgactcacagttagtggtaaatcatgtatctggagagtacgaagctaagggagaaaagatgatagcctatctaagaaaaatacatgacctgctcgcataattagaagttatgccctcaagcaaattctaagagaagaaaatacaactgctgatgcactagcccgacttgcaagcaccaatataaatgataaagctaatttaatccccatccaattccttgaaaattctagtatcactggcgcagaagagattgaaacaattgacacatcttcgaactggatgacgccaatagtagcctacctaaacactagggaattctcaagtaacaggaacgaagctcggaaaatgaggagaaaggttgtacagtacatcatcgtagatggagtcatgtatagaaaaggattctccatgccattactcaggtgtgttacataagaagaagatgcatgacttttatctaaggtacacgatggattctatggaaaccacgcagctggacaaagtattgttggaatttattttac

SEQ ID NO: 11742 - DNA, 509 bp, Cannabis sativa
acacaagtaaatgtaaacaaaattgtctttttaaaagtttactgtaaatgtagtaatcatcacttgttgactcaaatggtggagactctgtgcttggtaatataggaatatcatttgtttgattggaatcttaagctaaaattatgtaaatttgtatatatatatatatatgtttcctattgaagtattgctagtctcccaactcctaaggtcattaatagttttgttaattcttttttatcataaagaggttgcacactagttctctgactatttttagcaggttgtgttgagaagttatataaattttaaaatatatcttaaataattataatgtatacaattataaaaaaaaaaaaaatctcttcgatactgaaactaatagagagtgcatcagaaagtgtattgtagaaatattttataaatatttatttactgtttaacaattttgttctcatttattataaagatgttccacgcatttcctctctaggaatattcttataggt

SEQ ID NO: 11743 - DNA, 1114 bp, Cannabis sativa
attttcttcaattcataaacttactctaaaccctttcagcttagtgcatttgttaccacatttgcttttccaggatagtagagaatctcgcagtcataatccttaactaattataaccgtcgttgctgcctcatattaaaatccttctgagtgaaaaaaatacatgagcttttgtgatctgtgtagattttgcactttttgccatacaggtaatggcgccaaactttcaaagcaaaaacactgctgctaactcaatatcatgggtgggataccgctgttcatactccttcaattgcctagatgcataggcaataacttttccaccaagataccatccttcttcatcacatgccctaagaaacttacttggggtagccaaaatttacacttcttgaatttagcatacaacttatgctcctggagacgttgcaatatcatcagaagatgttttccatgtgcctcttttgaatcggaaaagatcagaatgtcatcaatgaagacaattacaaaatcatctaaaaagtccttgaacactcggttcattaagtccatgaatgatgccaaagcatttgttaatctgaaggacatcaccaagaattcatagtgtccataccgggtacaaaaagctatcttgggaatatcctcctctcgaatcctcaactggtgatgactagatcaaagatcgatcttagaaaagacggtctttctctgcaattgatcaaacagatcatctatccatggcaaaggatacttattcgttaccgtcaatttatttagctctcggtatttaatacacacctgtaaggttccgtccttcttctttacaaacaaaactggtgcacccaaaggtgaggtactctatcttgtaaattttaagtccaacagtccatgtaattgaaccttcaacttttttagctctgcaggtgccatccgatacggaactttacatacaggctctgccctcggtatcagatcaatttcgaagtcaatctcccgctttggtggtaacccagtagttcctctaaaaagacatccaatcccaacaataacccgacatttcgaatgtcaatcctaacgccctgctatttctaaaatttataaccatatttaagtg

SEQ ID NO: 11744 - DNA, 511 bp, Cannabis sativa
agaagaagaaagaaagaaagaagagagcaagggaataacagatcctatgctatataatagtgtcataacagttattgaaagtatcaatttttctgtctcggtcagtagatgctgatctctctctctcccccctgtagatctatctgctgaaacaaaagcagatagtattgaagagatatttgagagagagatctgcgcttgggatgaaagaggcaaatctatctgcttttacaaaaacatggttagaactttactactacgaagaagatctagaagaggatctaacaagtacccatttgcagaaaaatggagaattcatcagggagaaaagaaacctagtatttcacttttcacgacaagaccccagcagccaaatccccgaagaaattttcaagaggctgtggtggttcatggattggagatattcatcatgtatagtacagcacatctcgtgccccttgcgattgagagaaagagagagaagaagtttgagatttgtgaagatagaaga

SEQ ID NO: 11745 - DNA, 547 bp, Cannabis sativa
ttgaggactaatttggaaaggaaatagagacaagttgatgaaaaaatatacaaaaattgagggccaaccatgcaaataaaccataaatccattaaataaacacaagcaaaaagatacttttatgcaactaactatgaaaggtcaaattccactgaagttttgatgctttcatagcactttcatcttaaacaaatcaaccaagtttattgagcactaaaaaaaaaaaatcttttaaaactaagaatgttcaagccaccatcgaactttttagtcccatatggtgttttgtagggtaaaaataagagagaaaagcaccatcaatatccaatcatatacttggtctgtgaatcccaaaattccttggtttgcttcaagattatcactctttctgcattcattctctccttccagtagtccttgcacctgcaaaatgttattgagatttagaacggtaatagtttttcgctataaaatgaaatggcgattattggtactttgtttaccttctttttaatagcatatcaagttccaacatctgcactgattt

SEQ ID NO: 11746 - DNA, 1034 bp, Cannabis sativa
  modified_base (359)..(359): a, c, t, g, unknown or other
gaccattacaccaagtaaaggtatcaatgtcattagtaaggtcttcaaaatcacactcctccacaactttcctgaacccatccatagaatttaaattcttctccctaccccctgcttttctttcgcatgaaggacttcattaaaatcacccccaataagccacgggccatgagtttcatctctaatgcgatgaagcatagcccaaaaattatgtctttggcttctaaccggatcaccatacaccgcagtaaaattccgcaccatcgaattcaaatcacagacagaagaatgaatatgaaatctagaatgagatagaatttttaccttaaaatcggcttcccacaacagcattaaaccancgctaagccccaccctttccaccaaaaaaaactcactgaaacccaatctcctcgccacaatctcagcttgactattcagtaatttcgattcagaaataaagatcaaattcggcttcaactttacaattctcaagtggagagcattgaacgtctcagggttgccgagtccctggacattccaccatagaactaacattgtgatcggtgaccttgcatctcaaggtgcgccgctttatcatcttcgtttaagacagataaatcctcctttccagaaatattcaaccttacttgctccccaatctcaccactgatgtcatcatgcccatcttctctccccttattgcccaatcgagaagcttttcctcgagccaaaactttttctgatttaagatttcgaccattcgcaccgttctccgctttttccttttcatcaatccagcccgttgcaaaacccgtcaccattcatgggaggctagacacctgactttccattgttctctccatctcaatttcacaattagccctttttccccctggttcatcatcgatctccatatcgctcgctgcctccctctccttcgtcggccgtttcttagaatggtctgccgatgcttcctcatctctctctttactacgatggctgatcacacttctcccttctctcttttctccctt

SEQ ID NO: 11747 - DNA, 717 bp, Cannabis sativa
taaaaaatactactgtgtagataatgacagagccactcaatgagtaggagcatgtagccctccaattccaaaaaaaaaaaaaaaaaatcttacatattaaatttataaaaaaatataataattatgtatagttaataacaatttaccttccaaataaattttttaactcgataaacttatacaaaaatatagcatatttatatattttttattttattttttaattttaaaacaaaattaattaataaaaagtttagaaattcaaccttcatgaaaatggcatcaccatttggaatcttctcaaacatatctcctgccacatgttcaacacctgcaacaatatatataattaaaattaattaaaattatataattattattttagctaatttttttttaattaaaaaatatactattttgaaattagtattttgtaaaagttacagattggatcttttattttattaaatgacaaattgaagcctgtatttttcaaaatagtactaaatagtactctgaactgtttttttgtcaaaacaaaacttaataatacccaatctaaaagtattataacaaaactaattatattttctacatctattcatgatagaaattattttcaagttgattataataataaaaataaaaaaattattaaaaattaagatcaaggttctattattttaaaaaacttaggatctattttattatttaaca

SEQ ID NO: 11748 - DNA, 549 bp, Cannabis sativa
ctctctctctctctctactcatctcttcactttattgattcttgataagattggtcttggataagcttgaatttgtggggatctttggtgctagagttattgaggatcttgaggtagtttctcacttatttatttttactttgctgctaagatttggatgtttaaagcatgtttaggttgctttatgttcttgagttgcatgagtatggaattgagttagttttgatgttgtatgcaagattgtgttgttaattcatggatattgcctttagagatgtttttgatgtgttatttttaatgtggctttgagtttaaatctaaatttgtgttgtggttattgctttgtgatagctgaaagtatggttgctgtgagcaagcttgagttcacggaactcaagcttggaactttaatggcactttgtcatttttaatatggtgttggcttctgttacttgggttgtgttctattgatgatattaggcctgtttgagctgttgttagtgtttaattgtgtggtatagcaagctttagttcaagaactcaaaggtt

SEQ ID NO: 11749 - DNA, 507 bp, Cannabis sativa
aatcaaactttagtccttgagttctttgctaattgacccgggaggtaaaatgaaatggtgaaagtgataggtaaaaatgttctagtcatgacacaagatattcatgcattttattcgctcccaaccttctcacgtgagaagcaacatctccgaattattgagaaggatgaagagattgactatgttgatgtggctgagacaattgtgtacccggtcctgaaatttcatgagtatgatggagaaccttatcaattgtattgctgtgaattaaaataggtaactcgtgcatggttgaactttttgaatggtcagttggtgtctagtaaacactttttctgatgcttagattgataggctgaaatatgcgtatgccattatgaagggttttaatttgaatgggggtgatattattcagaggagctttgacacaatggtggaaggagcacccagtggaggacttagttagctgatgtcattactgattttatgtgaagcttatggagttct

SEQ ID NO: 11750 - DNA, 575 bp, Cannabis sativa
tgaatacattaaagttgttgattgcaaatttagctgattaacgaggagtctaattacgatctaattttgtttataactgtcacgtgtgaaatgataataaatgtaaaagacacacaaatttatagagattcggcccctttgatcaagtaatgacctactccctttttttgaattcactcttgagataataccaaacagattaaaggctgaaatatttatatttctagctatggctctcttcaatattacgatgatgagaatgtgtacgtgaatacttgggaagtgatgagaagaaaagagagagtttaatgacttagtgcttccgagctcttaagtgcatgtgttgaatggatgaattcaggtcccttacacgtacggttaagaccttttatttagcgttagggttttacaagttgttattcaaaaatacataacaaatggaaaatatccctagaaaatagggcagttacactctgacgaggctttcctacttttgtaggcagttcaagttgttctgaagttgtaggtgtgttgtagacgatttagaatagtttggaaggcttatgggaaaaaca

SEQ ID NO: 11751 - DNA, 601 bp, Cannabis sativa
aataaatgtttttgatctacccacatagaagagagtgtaatgaacactgctcttgataccactctcaacatcatagccacagtacccctcaaactttattcacaaaataaacatcacaattcttttttaaggaatgataagccaaattggggttacatgcccaatgtgaaaaagaattaattattttggtccaataaactaactaaacatattttaaagtatatgttcatgaatcctgaacatgttataagttatctttattttataggacttgataatatataatatcatacattattaattataaagattattatatattaacaccgacactaagtgaacaattcttaactatgttagcttacatagaatattttaatattcgtacttgaactaagaaatactaatgtcaataaaattaagtatacgtcaatatcgacatcaaacatagataatgagacaattgagattgtatatcgacttaatgaatggatgacttcggcttagctagatagatcgtactgtgcacgcgtgaccggtagaaaggaggattttgagtcagtatcggctgcttatttaaaagcattactattaggcatca

SEQ ID NO: 11752 - DNA, 952 bp, Cannabis sativa
  modified_base (465)..(478): a, c, t, g, unknown or other
ccagaccaggacctggaccccatcctcgacccctgcccctgccccagacctcgaacccaaacctaagtccggactcgttcccagcctgaccctgaacctcggatccgacttaaataaaatcaaaaaataaaaataaatttacagaacacacttttattttctattttttaaaattgaaaaacaaaagttattataaaacacatttttgtttttcaaaaacaaaaattttactttcatttttatgagtaaagaatttaaaaataaaaatattaccaaacacttatttttactttaacctcattgcaaatgtttataaactttatatatattttttgttttaattttttgtcatcaaatatttaagatattgaatttttggcaaaaatttacaattttattgtcacacagaattttttataaaaatattgtttttttataaaataaccgtaaaacaacaaaacagannnnnnnnnnnnnnagtggaacaactaaaaaataactgcggaataacagtgaaaacttaacacaatacatagtataaaaaatacacagtatttttgcaaaaaaattccgccccacagtaaaaaaataaaaaaaaaaaagtaaaaaatttcagtatgtggtgtaaaaatccctaaaaagaaataaaaattcccctaaatataatgatatatacaagtataaaactcaattatttatactaaaattaatcctaggacttttctaagacactaataaatttttgtagggacattaggttttcaaatttcaattatcaataatgttcacataagaacagaaatgtttgcgtatttatcaaaagttagtgaacaaaactacaaaatgtacaaattaattacgtaacgatactaacaagtgttacaattacaattaaaagtcttcaaagtcaattatgttagctcaaaaaattaaaccaaaagtcctctcttta

SEQ ID NO: 11753 - DNA, 783 bp, Cannabis sativa
tttcaaaactttgtaaataaattcacccttctgccccttaatccgattggctccaaatatacttggaagcatggcagtacatgtgagagactggactggggtgtagttaaccacaaatggcataatattttcccccataccaccctctttcaccttggcttctatggttcggatcacagagttattaagataactctcactgatgcgagtatgctgcctccaaaacacaaacgatttttgtttgaaaatttttggctcacggagccatctttctatgaaactgtcaagggaagttggcaccatggctctcccaatcaagtccctctaacccttgactatttcctgcttaagcagcaaatgtgtgttgatgatatcaaaagctggaacgctggttttaacagtctttctcgtagaattagtactctagaaaactcaatcaatgccattcattccaaccttcccctttccagagatgaaattcaggaggcagctgccttacaatctcagctggattcccttctctataaagatgagattctgtggaagcaacgatctaaaattcattggctgcaagcaggtgataaaaacaccaaatactttcacagtaaagccactgctacgaggaaaacaaatttcattcgaaagcttaagtgcgaggatggcagagtggtcacttctgttgatgatatatcaagagaagtgtcttcctttttcaataacctctttaagactcaggaaactgatagtcatgctacccagtatctcctatctgccattaataaa

SEQ ID NO: 11754 - DNA, 649 bp, Cannabis sativa
ccacaaaataatactatgctttggtaaatttgaaccactcccatacctctttgctccaatggacaagagtttgaggaggactcaaaaccaaatatccttcctttatggagtaggcctctctatcaaattgttgctgatcaatgcatgctttgaatttgctctttaacagttacaattttcttccaataccagctactttaagtggaggcaatgcccaccaatcatcttccttaatgtatattagaagtgttcatccaacttaatctgcactattttattcatggtgcatctgatcaacactaagtgcagattttatattttagatccaattcaatccgtatataactcaaatctaatccaatccaatctgtaaaagtgctaattggatcgattattttagattgattactttttaatattgaactatttaatatttattaaaaatatattttttatcacataactaacgataaataaaataaattattgttattttatgtctctaataataaattaaaataaataaaataacaaatttaaacgaagaagaaaaaaaaattgtatgtataaaaaatgtttaattttgtttagattatattttccttataaatggaatatgcatttaaccaccgtgttttaaaatataggg

SEQ ID NO: 11755 - DNA, 524 bp, Cannabis sativa
tatatcagatttttacatatatttaaatgtgtggacctactactaaattgcattaatatttagttgatacctaataatattgagaatattgttgttgggttcttcttaactaaattctaattaataatatataattggttgaatgtatttttctcacatccatgcttaattatattattcataataatgttgttatttttgtacttactatgtaaagtggtcataggtgggtgtgtgagtgttggaggtcctgggttcgagtcccaattaaaacatgttgtaatatataaatgcttaaataaaaaaaaatactatgtatagtttgagatgcaaagtgggtgattagaaaatagtgtctaagtgtcatgacgttattactctaattaaatattaaatcttattatataatttatttaataaatattacaaaacatcactaactaattaaaaagtagcaccgtcttgtcttatagtgatgagatgcatagtataatgtttatatgtttttgtgtacatctcaatgt

SEQ ID NO: 11756 - DNA, 654 bp, Cannabis sativa
ccacttgacatggttgtatcattaacaagagctttgtcgggtaatgtgtaagcttgacacatggacgaatgacattctctcttgttcatgaacgagtgaccttctctcttggctatgttcaagtgatttagggccaagcttgtctgagtgaccctcttcattggcttaactgagtaacttcaaggtcatcttggctgagtgaccttcttcttggcttgatggccatgttttttctagggttttgccaagtgactttctctctatcatggtcgagtgacttcaaggccacaatggctgagtgacattcttcttggtcatggctgagtatctagggccaagcatggtcaagcgaccctattctttagcttggtcgactgacttcaagattgtatgtccgagtgactttctctcttcaccatagccgagtgacctagggccaagcatggttgagtgactttctttctttgcttgaccgagtgacttcaaggatttatgggtgagtgacttccactcttggccatggctgagtgacctagggccaagcatggccgagtgaatttctttcttggccatggtcgaatgacctagggccaagcttggccgagtgactttcttccttagcttgttcatgtgacttcaaggttgtatggtcga

SEQ ID NO: 11757 - DNA, 987 bp, Cannabis sativa
  modified_base (170)..(171): a, c, t, g, unknown or other
tgaaatgatgcaggtaatatctttgaaaaattctataatatatggtctatatccaaaataatttgttactcaattttttttttcacgtaaattataattattaaatacatctcgtaaaattttaaaaaattcggaaaatgtattcaaacagtgtgttgtacgcgtgactnntttattttatacacatgtaaaataaactatttgaatattattttctatattaaaaattattctaaaattctcaaaattttgtaggatatcttaaatagctataacataatttagacaaacaaattcttctaaatgtccaaacaaaatagagggtgcatcaataaacctattttaaagagatgtattgtagaatcactcaatatctttatctttatccataaaatgtaaccgtttttattgaaatattttaaacatataaaaatattagaaaattctacaatgcacctcttttcaagggatgcatttatgcacccctatctgttttagcatttgaaataattttttagtcaaattttttttatgatcatgtacgttataactatttaagacattctgcaaaattttaagaaatttggaaaaatttagcacgccgaatttcttaaaattttacatgatgttttgaaataattataatttacataaccatgagaaaaaattatttcgataactaaaacgaacagaaatgtatcagtgcatcccttctaagggggtgcattatagaattttccaaaatattttgttaaatttaagatggtaatataattatggatgagcagcaggctgttcttcaatattttgttcagaggcatctgatctgcaatatttggttgagaactcaagtgctcaagattaatagtagctgagtttgtgtgttcacttacctcttgctgactttgaatggcagatggtgttccaagggaaggtgtagatagattgttggagttgttatcagctatagaggtgacattaggttgg

SEQ ID NO: 11758 - DNA, 688 bp, Cannabis sativa
ttagtaaaattaatgtgcataataattttcataatatatacctaattctattatcaggactggccagagggtagggtggtcggagcccatgctttgggccccaccattttggaggctctcaaaaaattaaaattaatatatatacacagaaaaaaaaaaaatatatcatataaattttaattcaataaatatcacagtaaatttacagctcaagtggtacccgaaaaaagatatggatgctatgaatcttattttattgaaatagatttatttatttatttaacataaaaatataatattttggagtaaatattaatatatatatatatatttttataaaattactctaatatataatgtagagtagtactttaaggtacaaattggtaaaaaaaaaataatataatttttgacacattattttttttttcttacaaaaatgctaaaatatatagtacttcagtagagatgttattagtaagtaaatattacattatcgagttaacttacatggcaagatttttttttttttttttggttatatggagataaaaaacttaacattgatatttgtatcaaaacttaaataatatttattttaaaattttgtaaaaaaaaaaactcatttcaaatttcgcctcaagcctcttaatatgttgagacggccctatctattatgtttaagata

SEQ ID NO: 11759 - DNA, 677 bp, Cannabis sativa
gtcttaaataactacatagtatatgagcataaaaaacataaacttaaaaattctctcaaataccgaaacaaataagaattgagagagtgtacattgtagaatttttttttttaatatatgtgacatgttacacacgagaaagtccaagtgttattgggtactagtagtgtccaatactttttataggtgtcaccccatgattagttagtaatatttcgtaaaatctatttttttaagttatatgaaacatgatacttaattacatcatagtcgtataatgtcgagagaggtgctaagcatctctttgaactaagctatacaactaattatactcttttttttttttggaaaattaccaatagtgtatacatataattattttcttaaagtggccacaaagtatgttttctattccaaccaaaataataaaaagtgaaatatttgatatttattagggctcgtttggtagactgtgtaaatgtcgtattgtattaactacgtttggataaaatattgtattgtattgtattaattattacgaccataattttttttagatagaattattacaaatataaattttaatacaatgtcaatcgtattatttaatacatataacaaattatccgcattaattagcttgtattatataatttttacaaatagtttggagttgg

SEQ ID NO: 11760 - DNA, 1152 bp, Cannabis sativa
  modified_base (159)..(173): a, c, t, g, unknown or other
  modified_base (333)..(336): a, c, t, g, unknown or other
acaccgcctgtgatagtgttagtactacgaattattgagtgtcactcagtagaaacctagctccaatgggtgcagtgagttctttaggagtatagtgacgtaatctacaccacaggtaacttgattacatactatgtgtcatgggacccataaacaccnnnnnnnnnnnnnnngtactacgaatggttgagtgtcgctcagtagaaccctagctcgaatgggttcagtgagttctttaggagaatcgtgacgtaatctacactacagctgcttgattacatactatgtgtcacgagacccataaacaccgctagtgatagtgtgagtactacnnnnggttgagtgtcactcagtagaaccctagcttgaatgggttcaatgagttctttaggagaataattcccaacaacttaagactggggacaattaagaatgggtactagtctaaaattagtacaactcctaaaaaggaaatggtttaaaccgtattaaattaaagtattctaggagtaaatatgtccgaaattatagtttacatttaaaaataattctctttatctcattatattcaaatattgagtaaacaagtgataccatactgtatttacgatgtgaagtactctgtacaaatattgatgtacgttattttcaaacttgaacttattgaaatatgggagatccagcttctgatttagattgaaatacgttccgaacatatttttattaaattgattatgttgttaaagctttgcctcttggaggttcaatattcaaagtattatttcaaatgaaagtattgattacattgcaactgtattaataaatagcgaataataatctcgtgacgctactagtgacaccgatgcaactaactttattcccgaaaccactaaacacgtactaatgtagtgagaagcagtgattgcaaccgtactaataaatagcgaacaataatctcgtgaggctactagtgacaccgatactctacaactaacttaattcccgaaaccacaacacacgtacttatgtagtgagaacaagtgatcgcaacagtactaataaatagcgaacaataatctcgtgaggctactagtgaaaccgataccctgtaactaacttaattcccggaaccacaacacacgtacttatgta

SEQ ID NO: 11761 - DNA, 745 bp, Cannabis sativa
atatatatatatttattttttaatgccgaatatatatatttatgtaaattatttagtaaaaaaaattaattgtttaatttaaaattatgttattctataaatttaatgtgtaaatttgatgtattttaaaaaatgtaatacgttataaagttaactgttattgtcaaatatttggagaaaagttttttaaatagaaaagattttgggtttaagtaaaaagtttatttatttaatttggtattgtaaaaattaactagttgttttaatttagtttaggtataattataaattgttattagataaaattaaagtttaattagttaaattttaattattttttatgcaataagtttaaatttaattagtttgatttaattatttaattaataaataattgataattttttgtaggtatttatttgtagtggtaccatttgaaaaatttggggacgctatattaattatggtaagctacttaaactttttttttattgtagtgtttaacattattaatttcaattatgtttagacattactggtgatcttattcgagtacgttgattggaagctttattaggcatgataggttactaaaattatgttgttaatatatttaattggtgaagtgtatgtattaacagtaatatatatttgtatatttttagtttatacatatttataaataagttgataattattatgaagattaaaattttatttacttttacattaatttgatgacttt

SEQ ID NO: 11762 - DNA, 857 bp, Cannabis sativa
tgtattttatccttaaaacattaagctccttctaaatgatatttcgaaagactaatataattatcgaaatgagcgctctatcatttattgcgtttacccaaactcaaaggaaactatcgttttacttcaaaatagctatagaagttatagattccatatctatgatcaacgctcccactcaattgcaccaccgaattcctaagatgtaagtatgggctagtgctacgggtaagctggtaacaaacaagtcaaagaacatgtatagtacaatgaagctagaacctaaccatctcaagattgagatcaattgacctaagatcaattaagtgacatcaacttagaaatgatataacagtaagtttaagatatcttttccactgtcaatatcgatctagtctaatgtatagctgatacatcttatacaagttcactttgccaatgtcttggaaaagacattccacttatccaagtataagtaaattacatcgttaattatcacgttagtataaatctagtgcactaataaatcacgggactatataatttgaagcatataattataattatttttcactgtgttgacattactataattgtgaatagctatatgttcggaatttaatagaacttatatattaaacctaaaatcatgtaataaacatgtgaacaaagcacatgacaaagtcaagacataacttctgatttttattgataataaataagattacattaaatttggttttatttagggcatgtaattccagcacacagtgttgggcaccacttttaataattattacaagatggtgtttatcttgaaaacatattgatctctagggatggcaattatacacgcg

SEQ ID NO: 11763 - DNA, 846 bp, Cannabis sativa
agttgcaaccgaggatgtaacttttttctccaaattttggtccatatagcatttgactcattaaatcgttcatgttgatggatccagtaggcacttttaactgaaaagttccccgatttcgcagccttccaaaacagcttgtctttcccttctctcagaggcttgatattgagaatggccttcgcaacattatcttcaaagcaggaacgaattagaccttcattccactgacgcgtgccatccacaaaaagattggaaaccttgttaaaagcatgaattctattatagctgaagctgtctttgatttcttgtatagacttccacgggacccaaggagtagtccaaagatctgtatcgccattagcaatgactaccccagcccctttcaagcaaacatctctagtctgaataatgcttttccagatcatagaatcttgatcctttttctccaccacccaagcattgactgaagaacaatattttcccaaaagtacattcacccataatttttctttctgttgaaggaccatccagcagagctttgagagtaaagctatattcatatcttggaatcgcctaaaacccaatcccccacaattcttcggttggcataaatcaccccaagatttcaacgcacagaaacggtccttgtccggatgtataccaacccaccaaaatcttgccacatgcttatctagttcttcacacgttgattttggaaccagagaggttgacatgaagtaagtaggaatactttgtagaaccgaactcaccaaggttgttcgcgctgcttgagatagacacttagctttccacccgtcaatacgattgagaactttttgtttt

SEQ ID NO: 11764 - DNA, 533 bp, Cannabis sativa
ggatggattgaaaatagaatttcaccaaaatatactacaaaaaaactaccattaataactttttagtcacaacataattttttgtgactaaatgtgacttttataagttacaacaaaaaattacttatgactaaatcatagtatttaaatacaaattgtgattaatttagttttagtcttaacaagtgttgtgactaaaaatacatttagttataattttgtgactaatatctttagtaacagatgttttagttataacataaaaataataatttataataattcacagttttttcattttggtcacaaattttaaaatttgtgatgaaaagtaaacttttttgtatagataataaaaaagtcaaacacattaaaatatattactaaaattttataaagcaaccaatatagttaaagaaattcgaaacgatttgttggattggtaatgaggtttctcagctttctttcttaattagtcctgctagcctccttaccttctaaaaaaaagataaagaaatgaaataaaaataatt

SEQ ID NO: 11765 - DNA, 960 bp, Cannabis sativa
tagaagtaaaactttaattttaacatacttaacttctatcctcatgggattgacctcactcttggtgagtctattacttgtaaacgatacgtgtacttgcgtgttgaatttaccacaacaataccacactacaataacttaggaattgaaacacaatttagttgtgaaccctcttagccaaatttccactttgattgcttcagtgaatgccatgtactcaacttttgtagaggatagagcaacaactttttgaagattagatttccaatacacacatccacctaagattttgaatacataatctattatggacctcctattgtaaatgctactagcataatctgagtccacgaactctgtgactacagtctcaatctccttgttactatagtgcacaagtcctaggtgttaggatttatgtcctaaataaaatatatttcaatgtaatcttatttactaattaacaaaagatcagaaatcattttatattgctaggtttacatgttacttttatgattatatatttaatatataaattctgttaaatgtcagacatattgttattcatgatatattatagtattgtttacaaagttaaaaataatcatgattatgtgcttcaaactctttagtcccatgatttatcattgagcttaatttacactgacgtgataatcaacgatgtggtttacttacacttggacaagggaaatgtcttttctagggtgttgacctcagaatttggccaatcgacagcagaatcatattcaatattaatgattaccacgtgttacacaataagaaaaagaaagtaaaagagacaccaaattttaaagaggttcggccccttgaattagcgggtaatgatctactcccctttttgttttattgatactagagataatactactcagatcacaagtgttgtgaaatcaaaagtagctttcttaagatcacaat

SEQ ID NO: 11766 - DNA, 884 bp, Cannabis sativa
tttgacctgaagctgatggtagatatccaagactttcttaattgcaagataagaactctcattttcttgatagaatagaagactatcatcaacaaaaaatagatgggaaatcggtggagcatgtctagtaagtttgaacccactcagatgaccattattctgttctagctgcaacattcttgataatccttcagagtaaataagaaataagtatggagataatgggcaaccctatcgaagacctctagttggaattagtgaggtcgtgacctctccattcaagagaaatgagaaactgttcgtagtcaagcaacccataataagagatatccatctatcatcgaaacccattttttgcatgactttttcaatgaaatgtcattcaacgcgatcgaaagctttgctcatatctaactttaaagaagcaattcttttttggcatgctgttttgtttttgatggcattgatcaacttaaaggcaaagagacattgtctgtgatcaaacaatttggcaagaaagcactttgtgtgtctgagataactattgggagaacttctttaaatcgattgacaaggaccttggtgattagcttggaaatgacattacatagactgattggaaagtagtcttggagtccctgaggctttttaatcttcagaattagagtgataagtgtcttatttaaagaagttggatcaacaccctcattcaaaacactcaaaactgccttagtgaccagatccctcacaataggccaattttgttggtaaaacatcgtggacattccatctattcctgggcttttgtcaggagccatcgaatgcaaagcatgttgaatttcagttgtagtaaatggttgagtaagattggaattcattgatgg

SEQ ID NO: 11767 - DNA, 657 bp, Cannabis sativa
cctaatcacactcaattggatttgaattcactaaccactcacgttatggtaaattaaactcaataattacctatattgaaaaaaaatatattgtattatatataataaataattaatttaggctaatgtgtgaatgaaaaattaaagtcttaaatatagtctattgatagctgctaataaatacaaatttagtcaagaatttaatcactgtaataacggtgattattctgattgttatcagaaattatagtaaagattataattgatcaatatcattaattttgtagaatttttggcattaattcctttgcgttcccacttgtattcaaccccatatgaagcctataaaaatgagacttcaccttgaatcacttattaaaaagctctcttgtgttaatcttctttgatttttcataagtcttaaagtgatagagtaatatattaattcgagtttattggagtagtaaaagtggtgtattcttctactcgttagtcattgtatcataagaagtaggggtggacatccgatccaatccaacctttttttccccatcctatccaatccaattagacctcaaaatccaatccaattactaattggattgaatcagtttttttaattgaatatccaactacacacttaaattttaatattaa

SEQ ID NO: 11768 - DNA, 705 bp, Cannabis sativa
aatatcattaatatgtaagtgaaatagctaattaaatttaaaaaataaaataaaaaatcataaaaatagataaatcttaaaaaatccataaaatagaaaaatgacaattgtaaaatgatagaatgtcatgccacataccccaacaacacaattatatagatatatagattgatattgattagaaaagtaaaatatcacattcccaaaaaatagaaaagtaaaagacaattacactaaacgatgtcattaaactttttttttttaaaaaaaaaaaaattatattaaactattttttatttttcgtaaatataaatttatatgaaattatcaaattagaaaagtgaaaataaccagagttattccattacatatgtaaaaagtatgggtgtttaacaaaattcacaaaccgccgaataaaccgctcaaactaaaccgaataaattgacaaaaaatacaacccgaaataatacaatgaaaatccaaatcgctcaaatatattggatggtttataaattaaaaaacaactttttagttaaattttgtaaaattttccttaaaagtgaatttttaagaaactttaaaataaagaaagattttagaacatctatttagcatatttttagtacaattttttaaaaaatttaaaccttttctattataagtgctcttatttcattaccattactcattatttattaatcaatt

SEQ ID NO: 11769 - DNA, 627 bp, Cannabis sativa
ttttttgtaatatttatgaatgttgcaaatggaaactattttttcaacatcaaatatatgtttggctgtatatttagtttttagaattatcttttgtcttttcaaaagtgagaatagaaaatattttttttgtcgttttaaaaatttaatattgtttgactaatattttctaaaaattattttaaaattttttttactaaaaaaaataattaatattcaacaccacaccacgatatgaattaagcctcaccccaaattagtcctctcagacaacatagacgtagacccgccagatcccaagttcgaccctagactttagaccccatactctgcacctcaaaccctagattgaaaccctcgatctcaatcccagatctcggccaaacccagactcataaaaatgatagacaaaaaaataaaaattatttttttaaaaaaaaacacaacattttaatattatttaatttttaattttttagaactgtttttaaaaaatttcacccatacagtttttctaatttagttacaaagataaacacccctttatttgtagctataaacttttcatactatgcagatctccgcgtagtcttgcgctactccctctcgcactaagcatggtagcaa

SEQ ID NO: 11770 - DNA, 562 bp, Cannabis sativa
gagtcgactattgtgatactttttgtcatgttgctaaattgacacctgtttgactttttatttctatggcagctactaatcattggtatttgcatcagcttgatattaaaaataattttcttcatggagatcttcaagaataggtgtaaatggagcaacctcttgggtttgtttcccagggggagttaaggtgggtttgtcgtctttacaaatctttatatggtttgaaacaaagtcctcgtgttcgattcagtaaatttagtcagactgttgaaaaatttagtttgttaaaagtaagttagaccattttgtgctctataaaagatttactactagtatcatcttgttagttttgtatgtggatgacatcattattaatggaaatgatactaaagggcatctcatccctcaaatctttcattcatatcatgtttcacacaaagaatttaggggtgctcaagtattttttgggagtagaagttactcagagtaaacaaggtatttctatcttagagaaaatatgtacttggtttgttaaatgagacaaaaaaattaggagtaa

SEQ ID NO: 11771 - DNA, 625 bp, Cannabis sativa
tcggatgttttcgtgagcagtaagtagcagatctcccctgattttgccttagattggtcattttgcacataacaacccaggtggggattgttcttccttatgaggaattcaatctcccacttcaaactctgacacttgttggtgtcatggccaaagtcattgtgaaattggcaaaacttcgacatgtccctctttctcatctctgttttgatgcgaaggggcttcttatatgggacagttctttgaggggccatgtagatggtctcgagtttctctgttaggaggttgaaacaagtgaacttctcttccttatctttctagttttgtggtgtgggagaagtattgtacttcccctttttggccttgtttcttccaaagttgttgtttcacttgcccccattgttcatgccactagaggtctgagcaaaagtgctagcgaatgcaagcacatttagaagtcatggggctgtagggcaccctgagactgcctattgccgacttgctctatttaggcttgacagacagcttcctccagcttgataaagccataaagtctgtcaagaaactccttcatgttgttggtgtagattctctagatatatttccaaaagtcacaaaatggaag

SEQ ID NO: 11772 - DNA, 528 bp, Cannabis sativa
tcttcatcatatcttaattaatattataagtattttttgaaggtagaaaatatatagtcaagtaatgtaagtttgttctaatgtgtaattccttattgcaatctctgtgggtgaacaagtatttatagattgatatgcaagacttacgtaattaagcttctctttgattgttcttttcgtttttctctttttggtttactttatttttcatttttgtgattttattttcctgaaaaagatgggaaggattataatgatttgatatatataaatgcatgtatttacgttaactactatatataataattgcttatatataaaaaaaaattggacaaatttgtgtctggtctttttagcttgtttcgatcatcaagttctgatatctctcacattatttatttaataaaattgtatgagatttaatattaaattaaaccaataacaatatgtcacctcttgttattagacagcttaaggtgccccttagtatttattattctttattttctctaattttaatttagttat

SEQ ID NO: 11773 - DNA, 647 bp, Cannabis sativa
aattatatatatattttaaaaatagaattaacattaagagtcattttcgattaaaatattttttaatataattaagaataaatattattttgaacttcttatcttattttattaaatgatgaatttgatcttttatttctcaaaatagtacattaaactaattttttgtcaaaataaaaattaataataactcgatttaaagttgttatgataaaactgagttcattttcttttctattcttgctagttattttatttaagttggttatattaaaaaaataaaaattatcgaaaattgaactcaatgtattattttgtacaattttaaaaaatacagagttcaatttgttattttttttttaaaaaaaaagatttaattagtaacttttacaaaacacgatatcaaaaataacttttacgagtgttgagaggttctttatctatgatttatttatttggtattgttattcaaaattataaaaatttactttccgagatcagaaatgtttttgtttttttattagacgatcaactaatttagttgttcatcactttgctcgagctttcatttttttatcttgattgtgtttttaatttagaaatatcccattttcaaaaaaaaaaatttagaaatatcccaattaatt

SEQ ID NO: 11774 - DNA, 582 bp, Cannabis sativa
  modified_base (122)..(124): a, c, t, g, unknown or other
aatgaaagagtttagaacatctgctataacgtatttttagtgcagttgtttaaatttttaaaaagctctttattttaaagaagttaatgtaagtgctctgcggtattaaacactatcatatnnnaggaaaaaataaattataatttttgcacatgctaaataccattaaatagctagggaacaatataactttagtatgagtgttactattgccgacctaatttattttatataacaatttgcattgtacttaattatatttggcatccactagtctttttaaaactataaataattaatttatgattctaaaaactgaatttaaataataaaagaaatactatttgtacaattaaatatttgattctattttcaaaacctttaaattatttaaaaaaatataaaaattgttggatacattcaataactacacaatgtacatattataatataaaaaaaaattaagttgcaatttcaccaaatattacaaaaaatagaaacactcttaataaccatttaaaaataaataaccaatacattttactatatattattatagggtaatattattttagattgtaa

SEQ ID NO: 11775 - DNA, 733 bp, Cannabis sativa
tattcttgaatagaggttctactggaataaagtaagagtttctataaaactaccaaggtataaaaattactaatttataaagagaatcttaaaataagtaatttaaaatttatgtcatatataatttcatgggagtaatttttaaaaataaagtataataaaacttatcttattgaaatttcttagattcttaaataattgagcgattaataaataaaaaatcacattggcctataacaaagattaataaataaaaaatcacattggcctataacaaatatacaaaatccaattatcgttacactttacttaatgataatatttattaaagtatgaatttaaaattcaatgctagaaaagtattctaaattataattgctatgaatcaaacacttatgttagaagtctatcctgctaccttacattatattaattttaagaaaatgaatagtaataacttctccccttcaaatccttggaagatgcgagtgaaaaaagtatacctaatagataaacatgcaaaatttagttaacacactacttaatgatagtattaaataaaagtatgaattttaattttactgttgaaaacttatctttgatattggagtgttattgctactttataccattcttagacatcttcaatggagtgctaaaaaaaacagtttattgttatattttaacacacttgaaaaaaaaaaattaccattgtaatagtattctaaaaaat

SEQ ID NO: 11776 - DNA, 512 bp, Cannabis sativa
aacgagtttcaatcctataagtcattacctaattattcttctcaaacaattatttttttcttttttgaaatggacatacaaattttttcaaaattaaaattgtaaattttgtattccaaatgaaatggaagatgcatttttaactaactattgccatagcattctcaatacactggttgccattctgtttacttaagctgtgcattgtgctaattaaactttttttatcaggttaaactctctgattatattgggaagaaatatgttattctcttcttctatcctctggacttcacattcgtttgtcctacaggtttgttgacaataaacaatttttttttggacaataaacaattttaatttggtatttcaggcatattgatgctcaataatatactcttctttgtgacttaatccatttttgcagagattactgctttcagtgaccgccatgcagagtttgaggctataaacacagaaattttgggtgtttctgtggacagtgtggtaag

SEQ ID NO: 11777 - DNA, 552 bp, Cannabis sativa
ttaattaaatgtaattggctgataaatattgtaacattatattttgatatatctacagatactatgtttagttatatttttagaagaattttatttttggtaactaaaatagataagtcacatattatgaacactttctttattttattttattttttttaaagaaaacattaatagaaaatatttttcaaatatgtgaagagagtttaattttttttttttttttttaaatatgttgagtttaaatttaaattgcaatctttaaatatgtgaattgcaatttatagctacattttatgtaagagaacatatatactctgtatatatattatttatacatataaagaaattaaaaagatctgatttttttaaaaaaaacagtagggagggaattaatgttcactattttggtcaattaaataaattatattaattcttatattgcattatagttatatttgaagtagtaaatatatgtcgaggaggccaagtaagtatttttatgataattaatatgctaaatacatattattttatagttttaattaattt

SEQ ID NO: 11778 - DNA, 549 bp, Cannabis sativa
atacatataaatatatatgtatactttctaaactttgtaattaaagccatatcctatataagatacattactcaaaagacacgatgagagtgtgagaatgtaaagaagagtgaaaaaggaagctcaacctttgaaaaggaaggcttgaggctttatatataactaactaacagaaatgaaaagccaaaaataactgatcctcactatctttaacatccccctcaagttacactcattggacttgagtgttaacttgtctctgagatagttgaactgaggaatgtgaagaggttttgtaaggatatctgcagtctagtatacgaaatctacatatctaacatccaagttgttatcaagaactctgtttcgagcaaagtgaacatcgatttctatatgcttgattcgggcatgataaactggattcgatgctagagaaccagcacctaagttgtcacaccataacacaggagtagttgacactgggagagctaactcagtgagaatagattccaaccatatcaattgtgaggtagctagagcaagagctct

SEQ ID NO: 11779 - DNA, 537 bp, Cannabis sativa
ccttgtgactcacatgtgctatggggtgcaagcaaaggaaaaaaaagctagatcaaccatgaggtgacaatcttctccagcaatgtacatattgaccttgccggcctgtgtgccgggttgccatgatttgttttgggctgtatctattgtgtattttggttttatatttttgaggcatcgttgtatatagttcttttgtaaaaaaatttataacatggatcccctgaacacgctttttatgccgttataatgtccgtttttagtgttttattttagttaagtttttaatattatcatggttttttataattaattaatctactagtattaaactagtttataaaatcacacatagcgtccctatagattagggctttacaatctttcacaacttgtgtaaacatcggttcacggagccacgcattctcgaatctaaagctctgtttaccaacaaccacatcattattcctaggaataagaagaattgggcaatgatctgaactggaaatatcgagattaaggagtttagctgatgtg

SEQ ID NO: 11780 - DNA, 820 bp, Cannabis sativa
  modified_base (343)..(346): a, c, t, g, unknown or other
  modified_base (452)..(460): a, c, t, g, unknown or other
tttcttaaatatatgaaagaactaaatatgaaatctatttatgtatgtagtaaaatatttttaacttatattcagcggtgaactcatgaaattttaccaatgttgatgtaaaatttaaataaataataaatatatataattaaaaaattattaaaattataatactatatattcgtaaatcagtaataaaatatatactataaatgctaaaatatgaaaatgtaaagggactagaatttcttctaagtattatatgggtccaacagtgtttcactacaaaaaaatgctacttttaataacaaccttttagtcacaatatttagtgactaaatgtgacttttannnncaataaaaagttacttgtgactaaaacatagtatttagttacaggttgtcactaatttaattttagtcacaataaatattgtgattaaaacacatttagtcacaannnnnnnnnatttttgtgactaatatttttagctacggaccttttagtcacaacacaataaattaataaaatatattaatataattattttatcaaagtattataattaaaaaaaaaagtgaaattatttgaatttaatacaaaaaataaattaacgtaaataaaataaataaaaaataataaaaattgcagtatctaaaattattgactaatgttgctaataaaataaaagtttggggattaatttattaaaaagaatgtttgagaataaacttgccaaaatatagtttggggactaattaatttataaaaaaataaaaaaattgagaactaatttaccaaatcttatataatttagggatctacaac

SEQ ID NO: 11781 - DNA, 624 bp, Cannabis sativa
ataaatttcttaatttctactctttatctcatacataagtatatttctgtctcgtgtctcacactgttttattctctattatatgtaagctacgctctttgttataaatgtcgtggtcatcgtctttttttcattgatggatttcacaaggttttctaatgggaattgtgttcggtcgaaatctaagtttacgaagaggtgttccgaatttgagtttctgggttcgaagagtgtgatggtatcgtaagtgacttttagtttcttttctttttttttttaaaaaaaaaatataaaaaatagtatctgatttttgtatacgatttaaaagaattttagtttgttttattttattttatcaagtaatatttattttaatttaggtaaaaattttaaaaaaaaaatgaaataatcattatagtacattaacggaagttagtgggtaccaacaacaatttgttaaaatgaggttttgagtattaatgccaaaatttttagaattttggtatttattagcaacaaaacataaaatataggtacttatgctctaaatttttcttaaaacaacaaacataaatgaaatagtgtgtgtagtaaatggattagcaaaatataaaattggtaatc

SEQ ID NO: 11782 - DNA, 816 bp, Cannabis sativa
attttttttagtcacataaaattagactctcttagattttctttagtcacataaaattttaaataaatactattttaaatcttgtgttttacaaaagttattaattagactctctattttattaaatgacaaaatagatcctatattttctaaaatggtaaaaataggattttgagcttaattttcgacaacttttttttaatataaccaacttaaagatatctcctaacataaacaaatacaaaaaatgtaaacaattttgtgataacacctttaaatcaaattattattaaattttacattgtatttaaaatatcttgtaacttttttaaaaaaaaaaattaataatttatatttctaaaattttagttcaacaatttgttttactttatgtattaaaaaaaaatacaagtactgtaacaaaatatttaaaccatattttcgatactataaattatttaaaaaattttaaaaatatagataatatattaaataactaaagtgtactctatcataaacaaaatgaaattattttacattgaaattaggataggaatatatattgtgcaaccaattcttttgatactcaggaattagttgtgttgtgcaaaatagcttggggaagactactttttcatctgcaagctattaaggagggcctgcaactgggaataaggtgacggtttccgcactttattcttgaatctaattgtcttcaagctatccaattgatccgaaacaaagaggacgggatataaatggagaactagaggacattcgtagattattattgtatgataatgttgctgatatttt

SEQ ID NO: 11783 - DNA, 552 bp, Cannabis sativa
ttgatagctgaataggcacatgttctatttttttaaagtgagcagtaattagtaatctactcttgatcgcgatctgaccaggctagttcttggttttgtaggatgttctattagaatggatgctaggcgaaacacgagaagccagggtaattcggtcgaatccagtggggttagggagtttagggtgcccaccgcaagctgcccaggattggaaaaacaggtttgcagtaatgcaagccagaattaatgaacaagatgaagagattagacgtctgaggaaacatggtgctcctgcaatgcctgctcctgtggtgcaggtggcccttgtccctattgtgcagccagggccagttgctgttgtgaatcaaatagaaccactgtatgaaaggtttcgtaagcaggcacatccagttattctagaaggtccagatgttatgaaagctgatcagtggctaactgtaatcactcaaattctaaattttatggaagtcactagcaatgccagaatggcttttgcaacatttcaattgaattttatgtgtaatagcacta

SEQ ID NO: 11784 - DNA, 644 bp, Cannabis sativa
acaaccactagttgaatatcttttgaatagttgtggcatatacggtaagaactcgtcaactaactttgtggccggaaaatctatgtaaaactcagaaacaagatgataatgaagatgaaaggaaatacaagtttttatgggtaagagatttctttctattgtattcaatatatgagttccaccataggatttacaaccccctctcacatttgagaatggggtatttataggctctaaaagcatgagttacatagtggtcccaaatagacaagctgtcactttctggctgcaaaccacaggtgcaggaggtggtattgtgccttgtacctttgtctagtcaggtggtcccacgttgcagaagttatgactgtagcgtacccttggtcgggtcctcagaccttgcaaatgcagtgcctccactactcatacctcattgctttcaaagcttccaagagttgtgactgcaacgtacccttggttgggtcctcaaaccttgcaggtgcaatacccccacccccacttctcatacctccttgcttttagagcttgcaggagacgtggttgcacgcttttcccttgcacaccttgtccttggattcctcctccaacgacactatcgccaatgtgcattcaaatctcacctt

SEQ ID NO: 11785 - DNA, 528 bp, Cannabis sativa
caaattatttacaataattaggaaaaaaaattgctaaatttctttccagaataaaacgtgtgataagtcatacttattaatagcaattcactaaaaaaatttccaataaaaattaaacaaaacacccaaaatattcagtgtatcaactgagcattttttttttctttttaaaaaaatagaacttttctagaaattttctttaaaaaaattcttaagataaagatgatattcagttttttatagggatgtaaacggggcagggtgagtgcgaggattgctcccccacccataccttcttttaaaattcaccccatacccattctaatacccgtttaaattaaagcgggagcgggatggggattacacgacgagggaaggattcccatcaaatacccattacatatatatttttgaaaaaaaatgatgtctcaaagaggattaaaataaaataatcataaaaacttagtaaaacaataaatttaagtgaaataatatgtatagtacaaaaaaaaagagtataatcaataa

SEQ ID NO: 11786 - DNA, 561 bp, Cannabis sativa
gatacaattaatcaactttactgtatctagcaatatataatattgttatgtaaaaacgtaggtggttccacttcatcactaagttaggttgtaaaatttaagtatttaaggaaagaaaggagaccggtgatcatgcagcccaagcccaactcgattaaatttttgtaattggtgacatatatcgatcgcgaagtgaaatgaatatatacatgcatgatacaacacacactcaactcaatagatgtgcattaataatttataatactaaagttaaattaaaaagaaatttgttaaaacataattaaaaatttagactatttttttaatataccacatttaaataaatattttaaatattctctaaatactctaaaattcaaaattacccttacaattcaaaaactctcttcttccacactctctctgtctaacttccttccctctctctctgttattcccagcccaaaccttttaaaccccgactgttcacgagctccgaccgaccaagacgacccacgaccaaatcttccttcagccaggaccaagactacccacaaccca

SEQ ID NO: 11787 - DNA, 964 bp, Cannabis sativa
aaaaataaataaaaaaattaataactattagcagcgaactatccgcctctaatactccacccctaatacccctatatataccccatcaaaccctcattccccatttccccatcatttctcttcaaaactcaaatcctaatttctcatccccattccggccacccattttgttcttgttgttcttcctcaaaaatcctcccaaggtatgtgtattttattactccgcccatttttgttgtttgttgagtttttgttgaagattgatatgttttatttaattttattactcctattccgtttttctctttgttgttttaattgatattttttggctttctttatttttgaacctagcaccggccagagccggaggagggttgttttcgtgcaaaagttcaaaataaacagccccaaagtctcaaacaactcactgtaagccatctccaatctccattgttgttaacattttttttttaaaaaaaatatctttgtttatttcaagatcactgtaaatgatttagggtttggattattaatttttggattcttttattgatctgctctgtctgtgtatatatatatatatttgttctttgtatatatatctgcgtatatatatttttgctctgcctgtgtatatatattatatcagtatatatttttgaaagataatatattttttgtgtattacatatatagattatttaaatgtatatgtaaaatatatatgtgatttttatttatttgtatatatatatatataaggtatatataattacgatagatttatttatattctaaatatattttatacagtttatttatatatattttattgtatgttatttgtattttttaaatttatttctgtctttaaaatcattattttttgttattttttcagattcattaaaaagatctttaggaatttcaaggaagtggacacaatttttttttttttttt

SEQ ID NO: 11788 - DNA, 831 bp, Cannabis sativa
acattatgttctcgtagtctgcctttactgcaagttcttcatgacggagagtcttccaaccaacttcttctacatagtgcccataataaccatgacaatgcctctccccaaatcattccaatctcaaaccaactacgccctttactacctcgcatcagtcaaatgaacatgcctcctttttctacatttcctacaactgccactacctctacttaggagtttccaaacactacttccactaccaccactaatacaaatcctaaacctattatacctgatttcctacatctatatacctgatcttggtcatgggacaacatcccatacttctccacacaatcttttttccacctacccgctcttgaccccattacaaccatctggtccactaccttacctaaatcacacaaccataccagtaacttctaccttcaccaccacatcgcccattgccactacatcaagggattaagaaaatatctcaccgaacagtaattctaagagaccaaatgactccttgcctgtgcggaaaatgcttaaacgatcttgggttattggtggagcaacatcttcttcttcattaggggaagatggttttgtgcctttcatttctattactgcatatttaaaggacatcactgacataacagtgaaggttgcaatgcaacctcgcatttttccatgaattttccatgaaaatccttagttggaatgctcggggtttggggaacccgagtgcattcagacaccttcaattgcttgtccaacaacaatcgccccatattttgtttcttatggaaaccaatcttagtattaattatgttttccatt

SEQ ID NO: 11789 - DNA, 745 bp, Cannabis sativa
taaaggctatagttgcattagaaggaaaaagtcacttaactaattttcttttaatttgatgattatacactaaaatagtaaaacatttccataaatattttcttataataatgaagtctcacaaatttgttaaatttattaaggggacgtttagtaatacttttattttttatttttttaatcacaaaaataaaagtaaaatttgtatttttaaaaaataaaaatgtgttctataaccacttttgctttttaattttttaaaaaaggaaacaaaaatgtgttctataactttcatttttattttgattttatttaagtcggttctaggttcgggtctgggttgtggtcgtggtccgagtccagtactagagacggagcctgagttcgagtcacaaggtccaggttggggtcagagtccaaaatattgattaagaaaaaaaaactgtttaaaaaaattttaaaagtgattttgtttttgttcttaaaatttttaaaattttgattctcaattaaaaaattgaaaaatgaaaacagttttatagaatatgttattaaaaaatatttttacttttctaataaaaaaaagaaactgattaaaaaagtattaccaaacgtactctaaaataattataatttttatgtaaggtaaacacaaataaaaaaaatctaagttagttcaaaaataaataaataaataaacgaaatctaagatgcatcactaaatacaataataataaatataggt

SEQ ID NO: 11790 - DNA, 1474 bp, Cannabis sativa
  modified_base (1056)..(1056): a, c, t, g, unknown or other
  modified_base (1304)..(1319): a, c, t, g, unknown or other
ccatccacaaataacttccaagtatcagtgtctcgttgaacaagcggactttcttctagagttattccttctattaagaaatctgccaaagcctggcccttgatgatgttcgagggtgataggttatgtcgaactgccccagttcaattgaccattttatcaatcttctaaaagcatctggttttgataaaacttgtctcaagggttgatcagtcaatacttttattgggtgtgcctagaagtaaggccgtaacatgcgagacacgtggatgaggcataaggcaagtttttcaagagggggatacctcgactctgcccccagtaacctcttactaacacagtaaacatgttgctggtgcttttcctcttctcgcactattgctacactaatcacatctttcgagacagctagatagaggagtaatgtctttctagttactggttttgccagaactgaaggggttgccaaatgccttttaatactctgaaaggcctcctcgcactcttctgtctactcgaatttcttgttgcctcgcattacattgaaaaagggcaaacacttatcaatcgactttgaaatgaatctgttaagtgcagccatccttcctgttagggcttggacatcctttggctttgttggtgatggcatatctatctaagccttgattttctcaggatttgcttcaatgcccctcacgttgactatgaatcccagaaattttcctgaggaaactccaaaggaatacttttttgggttaagcttcatattgtacttctttaatatttcgaaccactctgcgaggtctgtggtatgacttttttgggtcctcctggaatgagtggtctgagtgcttgggccaccctcaggttgggtcctcctagagcaagtggtctatttagattgagagttggaaggcccattggcttttttccaggacggtgaggggtttcttcatgtgatgtatcaacattctctccatttctagccatgaagaaaattattttttgtatgtaaggaggttcttttctgagcttttttcacgaaggctctcaatnaaagcaccaaactattaacgccaattttcattaactatatttgagctctaacagtgatagatttgcatagaaaataaaagcaaaaaaagaaaggtatgaacacaaaggttttttcacgtggttttacagttaaaattttgtatagtccacgagtcaatcttattagatttcttatacaactctcatgcctcctttctttaatggtttttttatccctttttcagtgtaacttgcctctatttataatnnnnnnnnnnnnnnnntaattacatagttgactgatatctaacaataattatcccctgaaatcgtacggtttgatttaaaccacgtaaaataaatgtggttaatttttgaaaatcacacagctgtgataggtccatttttaccgggtcaaggttgttggaatttattttac

SEQ ID NO: 11791 - DNA, 617 bp, Cannabis sativa
tagtaaaaatttcctatcggtaggtaacttttttttttactataaattttagatcttgtagttattatgatataaggtgtatacttttattataagactgattgtatacaattaaaattttatacatattattataataatatttaatgttatatttatttaaaaaagaataaaatgatattaataattaaaaagtttattaaattttaattattatttttataaagctaatttaaattatttttatataagtattttttttaaaaaaaataattttacttacaaattttattttcaatttgtagtggacattaggagaggagatcggagctcgccgattggagttgagatttgtttttatttttttctttctctggtttagaaaatggttttactaattcatcttcatattgttttttttttttttactttggtttgtatgtccatacataatatagttttggtttgtatctttagtaaaaattaatgtaatgtttgtacagaaaatgatattttctgttggtggttgttgttctatgactggggttgtttgccttttacattgacatgcttcaatcattttttaaagaaaaatgcttcaagaacatgtaaaattt

SEQ ID NO: 11792 - DNA, 1165 bp, Cannabis sativa
agaacaaaaatagtgttgttagaaaacagacgtcagaaacacaaggcatgaaaatcaagaagctcagaaataagacaaagtaaaatgcaaagtgactgcccgcacgagactcagaagtccatcatcacctgacatcactctgattttagacagaacaactttcccttttccgagtaagggagagggtggccgaacaggtgaaatgggctccctgatgcgaatcacatgttcaacaggcctgggcagggctggaagtttctttttcctcttcaaaggggtcatctgctcttcctcgtcctcatctttaggattcaagggctcttgagcatactattttaccctggcacctcctttcaacttagcttcctgcttaagttgaataagctcatcctcctaatgagctcgttcaggccgtccagggccagatatcctcttcttccccaaaatggacttaagagtaaagtccttgggataaagcccgtacctcacaaaattatcatcggaggttaattggataatattccggtcttcccctagcaaccgggtaagtttctgagctctatccctaagagcaggagtaagatgaggatagtgatatgtcagaatctactgaaaccgagtccgggtaatgctcggatccttcaccatgaagtattcatcagcaaaacgccctattttgctgatggccttgtcatccattccggtcaaccacttgaagcccgactgagagaaatagaagtaccccaacctaccctatttgggggtggacttcaaatcaaaccccatccttgggaagcgtagaggacaaagagggcggacaaatacttaatgcccttaagagtgattttggccgggcagacaatgaaaaagtctgccacatccttgaagtatttatgcaagggaatcaatgctccttgctgaccatgggcccccgaccaggcgcacatccccttgtcagggtttgtggcacgattatcgtgggtgggaatgtagcagtccagctcgcccaggtatccgccctggtcaagagttcgaaggcgcgcctccgtaatcttggacgcatctggcgcccaaggcaccctgccttttatgagcaaccgccgcagtgaactccttagtgacgaagtccacaccctcaacaaggacatctccgtcagcatcgact

SEQ ID NO: 11793 - DNA, 942 bp, Cannabis sativa
ataagggaaaatgattcaaggtaaccggttggagtaggtaaacgaaaagtaaattaagcattgcattggatttggcgctcatgtttcttttacattaaaataattagtaattttacacactttcgacaatattgattttgcctccaaaatatacaatttgttaagaatcctcctgaatttttacagttatagaaatttaatccttctattaggttacgtcccattattccgtttaaatgttaacatgtctttgtaaaaattagtagcaatttttctccttataaactttaacaactattaaatcgtattccctcaaagagcaaaaatgctacttattctttctattatatatgaatccccttttcacatttcttccattttccttaagccatcttaatcatccctatctattataattaagagcattttaggaagattggagtgacccgttcttgaatcccaatcatccagacgtgacaactaatggatacctagagttgactaagaccgaccttgatcaaagttaattatgttagtttttagggttcatatcagagtcccagcggaagagaagaatgtagtttttataaaaaaaaaaatatttgttgaattcgatatgaaccttaaaccctggatctcagcacaataatacattatacaaacctaactaattagtatagagatttacctcttgctgcctattaggattttcttgctacttttcgtataatcaaaacgaacatccaatccagtataagaactcgtcaaagacttcacaagagtgtctttcagatcagcctcaacaaaagatggcagcctgaagtatttttaaaataaaatagtcatttcaccaaaatggtggaaagagtattccattggaatgtcattctaatactttaaaatgccaccaaataaagaagaatgaaaattgtttcctttcta

SEQ ID NO: 11794 - DNA, 685 bp, Cannabis sativa
aaaaagattaactgtctccctatattcctataaatagcgccataatctatggaaaaagggacggcaaaatttgagagagaaaatattattattcaaaaattgatattgtattttgtactaaaagatatccctagtaatgactcgtgaagtatgtagattttaactacaaaaccaggtaaaatatcttgtgtttattaattatatattcatttttgtagtatatttattgcaaaaaggctatttaatttgattaacaaaaatctgcgttaacagttcagtgctttcattgagagtcttggtgataaaaactctgaaaaaattcctccttataaatattatctacccatactcaatgggtggtgatgatcaacacaacaataatcaatttgaggaaacaacccattgccctggcaaagagcccatgggatctcaaagacccaacacttttgaaataccacgttcaaggaggaacgatggtaatggagagtgccaataaccagatacgtgcctaggagtgaagatgcttatgacccaactagatacgatccattggtggagttggaaaataggccactttgacaatggctgaattaaactgacgaaacactgagttggagtgagaggctacagcagccagggtcgcacaggtgatagttcctccgaaccaacctgatcctatagcaag

SEQ ID NO: 11795 - DNA, 593 bp, Cannabis sativa
gctgtctccactgagaatgcattaacaacattgatgttgtcacttgtcagtagtaagtactcaatgttagtgaaattgtaatttttgtcaagttttactagtacaaactctatgcttataaaattggacgaaaattacaattttattaacattaggtatatatgcttaaaaaaattattagatgatgtttggttggaagtaataaaatggaatgaaataattttattctattttgtttagttacattttaaagtattccaatatcattcaaatgaaatagtttttccatcattttgttagaacgactattttattttaaaataaaagaaatgaccattctactgaaaaagagaaaattttttaataatttttttactaatttttttgtacgtttcaaattcaatttcattctatttctattctcattctcatttttattcttatattttaattcttttcaattaaataccacaataatacttatgctgcaatttttatttattttttattgaaacataattattccttaaataaataatatgtgtgcccatagtggtggctttcatataattaatattagtatgtagatataa

SEQ ID NO: 11796 - DNA, 555 bp, Cannabis sativa
ttcatatgccataaatctgtctagacacggtgaaattttatttttctttttttttttttctgctttggcttataacatgacatatatagtatttaaatgaaatgtgtgaatcaattttgacttgatatatatatacacgtataaaacaaaaggtggtattacacccttttttatttgactttttttatttgactttttttatttgacttttcttatttgacttttcatatatatatatatatatatatatctaatccacaatttcaagtaagtgggctaataaacatttttggttaccgtactttatatatataaatacatataggatatcattattttttattgtgcttttagataacaaatagagttttgaggatattcgttttctcatgcgaccacgtcaggtttgcaaattttaaatgtgcttggcgtatatatatatgtatgaaacgattatacgatgaacacacacatttaaaaaattcttcaggctggtttgctcatgtattttgtcaattttttataacgatatttttttagttaccatttttttat

SEQ ID NO: 11797 - DNA, 575 bp, Cannabis sativa
gaagtttacctaataaggtgtgcaatttatcttattttaagataattatttggcacgatatttacttaataaggcgtgtcgtttacctttttttaaggtagttatttaccttttaagtgataaattatattttggtttaccttatttaaggcataaaacatgttgtttaccttattaaagtacgaagtttacttaagaaggcgtgtcatttatcttatttcaaggtaataatttgaaacgatgtttacctaataagacgcatcgtttaccttattttaagatagttgtttaccttttgaatgataaactatgtttttgtttaccttatttaaggcacggagtttacctaataagacatgtcgtttaccttattttaaggtagttgcttacttttttagtgataaattatgttttagtttaccttatttaaggcacatagtttaccaaaataaggcatgttgtttaccttatttaaggcacaaagtttatctaataagacatgtcatttatcttattttaaggtagttatttggcacaatattttacctaacaaggtgtgtcgtttactttatttt

SEQ ID NO: 11798 - DNA, 572 bp, Cannabis sativa
tattcactcccttttgttttttttccccaaaactgaaatgacatatttcattaacaaatgttatttggtaaaattaattatttttagcacaataagggttggtaattagttacaattttttctattttaatttaattttttttataaaaacataccaaaatattgcctttctacactttattgattttttttttttaaatattaacaatactgaaaaaaaaaattaaacttttttttttatatatataataaatcagaatatcttgaattatcattaatgttagtaaattattcaaaacttttaacttctttacaaaaaataatgttgtaattaaaaaaaaacctctagcatttatttttaagattgaatgttaaaataaaaaaaaaatattaaaagacaacaatgatgtcatatcgctattgatataaataagtactatgaaaccccacgtaatttaatttagtcactatggagtatcattaactaataataaaacattacctttagatagtgctagatacatagtataagtatgctttaaaataaaaaagttgttcttaaaactactcct

SEQ ID NO: 11799 - DNA, 568 bp, Cannabis sativa
  modified_base (314)..(319): a, c, t, g, unknown or other
actaaagataaaactctcaaaaccatagatagagaaaaatgttagagattttattacaatggaagataaatcaagatatataaaagtcaattgtaaaaataatacaaggacaataaaagagattaattaaatagatgctacaacacacttataacacacttatatacaccttatatacactatatatattatatatataaaggaaaggtagaataagaagattacaatacatgtaacataatacatatattgagtgtagattagtgatgatcaccatgacttgaacaatgtattacacctttgtccataagctnnnnnnccctatctctaagcactaaaggaactctcataggaataactttaggaattataaagctttagagttttctagcaatgtagtatgagcaccttagacctctttatatagtatttaggatattatcatttgaaactcatactcataaccccctatggatgttatggactcaaatgtaactcatgcatataccataactcctatagcattaagaatttcaaatttataccgtccccacttcaagcctccatt

SEQ ID NO: 11800 - DNA, 702 bp, Cannabis sativa
  modified_base (469)..(487): a, c, t, g, unknown or other
gtgccctttagcatttctcaattacattattggtattatttgtttccgagttagtagtagttgttgttgttgttctttagctttctttttggtgaagatgttcgatattttttttttttaaaaaaaaagttatattaagaatgtgttgtgtatgttagccaagttctagttgatgttgtttgtgataagaaatagagtaaatactattttggtctctgtgttttgtaaaagttattgattggaccttgtgttttgttaaatgacaaaatagaccctgtagtttttaaaatagtaaaaataggatcctgagcttactttttgacaattttgtttttctttaatataatcaacttgaaaataattcctaatacgaacagatacagaaaatgtaaacaattttatcataacacttttagatctgattataattaaattttattttgataaaaaatcaattcagggtcctatnnnnnnnnnnnnnnnnnnnacagggtctattttgtcatttaattaaacagagagttcaattgataacttttgcaaaatacagggtctaaaatcgtatttaccctaagaaatacatgtattttttatttggttttattattgcattttgcattatgcttatgaacagtttgagaaatgtgttactaacttttgttaatcggtctgcaattggcctaattggcaggcatcacaaaa

SEQ ID NO: 11801 - DNA, 626 bp, Cannabis sativa
tattattattaggtgtaatgttttcgcttatcaatactttttcatattaattcttttaattttggtatgtttacttacggattagggaatgtgtttgattagtaattacttaaagggaatgagaatgaatggtatgctattgattcctgtataattgtttactatattttaaaaagagagaaagtagtgagaactatacaaattaggaaaaaaaataaaaggaaaagttctctcctgtttttataaggaataccttcccctttccctttcctaactaatttattttaattttaattttattaattaaaaataaaaaagataagtataccatttaaaaatctataaacagaaaaaaaaaaattatatgttctaataatgacaattttatcaaattaaagcattatgattactttttctagttatgtaaacaaaataatatgattttggttttcttttcggacaatttaataaacagcataataaaatattattttcgattattttcgaatttaaatcgatacatttcttccattgattattctgattctaattacaatttaataaacgtgccataaattttttaaggaataatgggaacaaaatacgtgaaacccaccttaatttgt

SEQ ID NO: 11802 - DNA, 614 bp, Cannabis sativa
tatgtggtgtaaaaaaaccctttatattaatgtcttggatatgatgaaacaagagatttacctataactattattgcatatcagaagaactttcccctattattttaactaaaatataaaaaagaaaagggcatgagttcgaatccaatactcagcatttggaataaagtattcaaaataatttgattatagataatattatgaaggagaacatgattgtagggaaatacgtaaattgtggttgtgtagggtaatatgtaatcatattctcgttaattaaattatattgtttggttgagtacaacaatcttatatattttttaaaaaattaaaatgaaaatacttttattatatctgtttaatgttaattatacataaaaataaaataattattcattaaactaatatatttattaattaataaatattaaattttattgtatttaataataattaaaatgaatatttttatatattttatcactatattatatatttttattcgctatgtcatttatgtacaccatctgtataacatttatgtataatgcatatatatatatatattattgctaataacatagatataaatcagttaaaaatataaaattaat

SEQ ID NO: 11803 - DNA, 654 bp, Cannabis sativa
atatatgaatcaataaaatcgcaataattgcttatgtacctaagtaatcaatggctaattttccattggaaaatcgacccgttgatctatggtttgcaaaatccctaccgtaaggagggaaatttgctttgacgagagttggtaaattattgttgttaccaacatctacaatcgaatctccaaatataaaaactgcaggcactaactgtgttttaacacaatttttttgtagcataatgaaaatgatcatcatgatcatgagcacaatttgggtgtaacatacacttgtggaagccattaatgattcggattggtgagtaattagttaagtacgtagtaaagagaagtccaactaggaaacttttagctgaaatagaagaattaatggattgatgaagctattaacacaagaagttatatatatatataacttctttaatttataggattaatggggtcatgatcaccatctttgaattttgtttataatatgactttttattcagctgatcacatgcatgattacaattaattatacaagtagttatatatatatatataataatgtttagtaaacatcttatcttgcatggaattaatcaaattaatgcatgtgatggaacctgctacatgctctcttataaatataaatgt

SEQ ID NO: 11804 - DNA, 833 bp, Cannabis sativa
gcattaccagtgaatttatccttctttccattaccttgcttgttaccgttgttatacctcttcccatttgaatttgagctgctagggtattgtggatctgaatagatgttcctctcgaggtgatatgttgctggtttttcttttgtccgacagtatccacacgccgaacagcctcctcaaccttaatgaacccatctgctcgatcaaaaaatttagccattgaccccacagtcagccttgtgatgtccttcaatagctctcctagtggctcaatgccccccagtattgcggccaaccttccttcttcagtcaaccccttaacttttgtagcttcggtcataaacctattgatataagctccgagggggtcccttggcatttgctttacttcgaccaggtcttcaaggtgcaagggaagttgacaagagaaggaaaattgtgcacggatctttgatgagaaggcattacatgaggtagaccttcctagaggcaatttaaaataccattgttgggcagcctctgcgagtgtggcaagaaaatttctgcattagacatcacctcttaccccttgcaagtccatctgcatctcaaaatactttaaatgtaataaaggatcttcttttcctatatatatatattttccaggttgccattatgaactttgggggtaattcgaggacttcaatctcaggggagagtggtgatccgtgtgctcggtcgagttcgagattagtgagttttgggccagttaggccttaaaccatgtttttaagttgatctagttgtgtttacacaaatggatgaacttgttgggatctctttgaactagatcc

SEQ ID NO: 11805 - DNA, 957 bp, Cannabis sativa
gcgccaccgcgcatactctacatgtaaacctttctcttacatgttttccagttttagtagagattccaaatccctgggtgctcctgaccaggtgtcgataatcctagtcacacaatctcgaattttcacaaataaggttaactcctggttccatacttataaaatatattcatggcatttaaaattcagataatcacatagagctcggaaggagctttctaatgatataaagaactcccaaatcggagttcggaatcaaaagttatggattttcaaagtttgcactcaaactgcccacaaattcaagggcgctgggcatgctcagaccatgccgcggcacttgggttccaaacccagaaaccagcatgcattttcacgaatttcagttgccaaacacttccaaatcaacccaaaagcataaacaaactctcaattcacaaggttagattactagaaaccaatagagagttttaaacacataattcatgcatcatatttcaatattaaaccccaaaattcagattgcataatcaactcaaaatcatgctcaaactccaaaaattcaagctcttgaacttgagcttaaattccaacaaacccaaatactttcagcagcaaccacctgaaaacaaattgaattcaagacatgaggaaaaaccctagaattctatcaagagctcaaataacttccccaccaagaattcaagcaaaacataaccaaatcaacaaaagaacactacttcatgcaacatataaattatcatcatcatcatcatcatattcatgcatttccaacacttaaattcagcaagcaaaatgagaatcaaaagtataaaaactacctcaagaatcactccaaaggcaagcacaataatcccccaacacttcacttcaatttttaagctaaacccaagcaattcaccaaaagaattttgaaactttcaaagagggtttgag

SEQ ID NO: 11806 - DNA, 1032 bp, Cannabis sativa
gatgctttccccacatatgtatatatactgatatacataatacatattgtattgagaattgctaaaaggcatcatgtgcttagtactttccttggtgtcatatcgctattagtaattaattatcgggtcccatataacttaagaaaataaattttaggcaatatcgctaactaatcataatgcgccacctatagaaggtgctgggcaccactagtacccaataacaatctcatagagcattgctattaggcaccagtggtgcctagcactttctcgacatgtctcgttgcgattgactagtgatacttcctaaaaactattgtattaaactatatggaacccaatacttagtatgaccaataacgatattgacatatatgagggtgctaagcactactggttgtcctttaacattttatatgtattgatgcaaaagcagagaaactctactccaacaccaatgaaaataaaattatattatgtatattgtttggctgtttggaattggagtttataagttgtgaaggataaaaaattatacatgccttggaaaatgaaagagtgctgtattataaaataatataatatcatacagtacaaggtaaatttattactctattcgcaaacatgaattatgaaatgacaaaattttattggaaattatttcatatattaattttaattttttaaaatttacggtttgagttgatttagtagtttttatgtggattactatgtaaattttagttgctccgttgattgttatgtgagttgttatataaatttttgtaaaaatataaaaaaaaaaaaataaataaaaattactttgaaatgtaaaaataaaaaaatctcaattttattagtctaacccttaaacagaactaatttattaaaaattttaagacttataaggaacatgaaaaagactttatagttcattctagcaataattataaataaacattgtcttattattattattattattattttcgatcaagaaaaatgaattttattaatcaactggacata

SEQ ID NO: 11807 - DNA, 682 bp, Cannabis sativa
taaaatacatttcaccaaattatttttaatacattttaagataatgcatattgctgttgatcaaattcaatcaagtatcaatcttatagacttattcataaagtcattaccaatatcaacatttgagaaggtggttcacaagattagaattcgtcgattaaaagatgtccacgaatgcctaaataagggggagttagtttacactatactctttttcttttcaccaagtatttcagcaaggtttgtaataagacagtttttatggatatccaagggagagtgttatgaaatattatttatagatgtccaaatcaccaccttaattataaccattaatgatggattatattttcctttactacattgatttagtttctcattcttttagtcatatttttgtataaatagagttcatcctattgaaataaacaactgaaaaatttccattcaatttctctttctctcttcatcttcttcttcttttcttcttatatattttatattattttataccacatacttgtttgtagattttttttctcaatgcaattatttcatactattatctatagaatataaacctagccaagtaatatagatgtattttttattcttaagcactagtttccttaatccctaagaatacagggagttaaactagtggactaccattggcgttatt

SEQ ID NO: 11808 - DNA, 919 bp, Cannabis sativa
atatagtatttatactacaaatatcatttacaagaacaacatagaacaccacaaatgtcacacgaactgcagtaattttttttggttaatttttattgaatttccattgggaaatttgactaattatgcatttattgggttaaaattattttcctaaacctaagctgtttaatattggtagaataagtcattttttttctttctaaaatctcattttacccctcccatttgaacaacccccctctctccctttccccctttctctctcgctctcagtaaacacgtacacggaggagcacacaatcagaccacccacactacctacgactcacggaccacctcgacctcgcgaccacaccacccatcaccgacaatgtcttcgtcaaagggtaatccctaattttttcatgaatttttaactgtaattatttttttcacgatttagggttaaagcaattagatttagggttaggtctgtgtttgtagtggacaatatgtgatttttgaggtttttaggctcggatctgtgttttggggggaatttgcgattttcacctagcccaatgcaggtccgatgtaggcccgatataaggctcgatggtagtttaatgttgaaggggttgaaggttgaagaagatagctcgataggtctgatatagggcccgatagtgggctcgatggtcctcataattttaatttttattgtgacacgataggtctgatatagggcccgatatgtccgatattctcttgttgatattggacctattaggccctatatcagacccactgtttcacaataaaacttaaaattttgaggaccatcgggcttattatcgggccttatatcgggcctatcaagctatcttcttcaaccttcaaccttttcaacactaacctatcatcgggccctatatca

SEQ ID NO: 11809 - DNA, 997 bp, Cannabis sativa
tatttttgagaaaggctttttgtactggctctcacccactcaacagctgattgtctttgatgttgataagaaggtattctcaacaatgacaagtcccctccctcctgacttaacaatgaaaactctgattcttgggtctcgggtcaagctagtagatttagggtatatggggttagtgtatgaaactctaagcggtttaagaatctagtttagtataacccataatgcacaaggacaaatctctgaatggaaataatatgatcccattcaaatttttcatgatgaaaagtttgtaagtattcaatcccatcaaagatggccacagtagtggaaactcccaaacgtcattctactttcgaatactccagctagagaggctcttctcttcaactttcacaatttcatggtagctcagaacttgtgcatctaccatatggacaaaagtacaccacaaggtaccattttatttatcttttcaatatctttaattatcttaatccttattatactaaatacttttttctattatagacgaaatcatttaataaagataggaattaaagaacttggaagaagttgaatttgaaaaaatgctgatggtgttttaggaagaagctgaataagttttcattaaacacttgccatttgactgttttaatttactacaggattttataaacttggttgtaaatattattactatgttttattataggattttacttcgttgtaggttttactacaggattttatatacttggttgtaaatactaattttgaaacaaaccaaaacaaaagaatagtgatttatataatgtaaaagtatatcactcacaataatttttaaactatgtgggacttttgggactttttgaaaattagctctcatattactaaaagcataaaaaatattaaaaaattgtgaaaaataatgaaaaaaaagaaaaacgaattcacatcactatctacatagaagaaggaaaaaataaaacaatta

SEQ ID NO: 11810 - DNA, 514 bp, Cannabis sativa
tcgaatcagctggtccataaaaaatggtctttaatattaataacatttattttttagatttggttcaatattattatatagagcattgctattaagttttgttcagtactttttataggtgacaccttaaaattagttagcaatattttttaaaaattatttttttaagttatatgagatccgctacttaattataccaataaaaatataataccaattataagtactaaaaaaattgataaaacaaaaaaaaaatactgaaaaaacaaattatcaacaaattaagtttcccgatatataataatcttaattaccattattaataacattatttcattttttattatttttaatttctttatataaatcaaatttatataacaatatcaaaaatagaatttttattataataaaataaataaatatatatatggtatatgatgctaaacaagtttccataaatattgttaatttatgatcatgatttttgaaaactcgattttgttttggattg

SEQ ID NO: 11811 - DNA, 716 bp, Cannabis sativa
tggggcttcatccttatgaagttccagcaacgatgatctttgcgagggaatcgacctataaaatcccttgaagacacacaaggcagggaatccaatccgaacctcgacttcctcctttaactcacctttcaactctccaccttaagatcgaaggcaaatcttttgtaaacacattatactgtaatcctactatcaatttcaaaatattcctactaagctttctcttcttcaagaggaacacggtagatcgaaataaagtccattccttttgtattaatattcatcgaccaaattagagcctaataaaatagacttgtgaactaaggataattaacgcttgaaccacgtaaaaaatctgttatctatattcttaccatttgtgtttttattactttcttaagctcaataattattcggtttccgaaaaactcggtaaacattattattattattgctttcaatatgttttactaacatttgtgtttaatctatacttcatacaactgaacactaaagtttaattaaatatattttccaaatattactatacaaaaaacactatttaactttgtttcatcttttacttttaaaactcataattaaaaacctaatataaaacatagtatacttgcatcataacctagtatatatatagggttgaatattaattagatatagagtgttgttctgtcccataaatagtaatttggctttgg

SEQ ID NO: 11812 - DNA, 560 bp, Cannabis sativa
gaggacaccctgaagaagtgccttcaggaagcaaaggggaactaacttgaattgctcctagaggtcctatggtcgcataggactaccgagaagacagccaccgagcaaactccattcgctctagcttatggctatgaggcgatgttgcctgtagagctggtgccatcatctcacaggaggaaaacctatgacgaggataccaataacatcctactggcagaattccttgacgaagcagaagaaagaagagatcaaggcaacctaatgctgtaggcctaccagcaaaagatagcaaggcacttcaacaagcaagtcaaggataagaaattcttcataggagacttgttactccgaagagtgttcctggataccaaagatttagaaagttggagtgttcgaacctaagtgggaaggcccctataaagttacagagataactagtaagggagcctacaagttaggaaggtacaacaagaacatgaagctcattctcctaccaagatattttaattgagaacacctttgcaaatacaaacagtaatcagcttacagaacactac

SEQ ID NO: 11813 - DNA, 685 bp, Cannabis sativa
caaatctcatcaagtatacaaaattatgggattttgaaatactttttaagtttcatgcagaactagagtttagaggggaagggttagagagtaggaagaatgtgatttttgtcaatacaaatgacgactcaaaagtacaagtctctgaaggccaatccagtattgccaagttaaatagtaaccaagagtaatcctaaatcaacaagaaagcagtttggaaccaaaaacagaacaacagaattaccaataagagcattgtatcaaatgggagaaaccatcatcggcatactaaacctacaaaaagataaacatattgaatcctagaaatcctagaaggtgattatgcacaacttagagacaagaagtacgaactggggtgggggtagtctaagacaagtgatctctttctctttttcaaaaaaaagaaaaaagaaaaaagagactagaagtatatttgtatttgtatcaatacagtaggggtttactcagggattttaattgtgcatctgactctgagtctggcccaatcagtggaagtggaagtctttgtttcaagttgttgttggttcacagtgtataaggggtagaattatatagttttgaagctttacacaggatgttttagttatgggatatggttaaatatattggttggctcagattaaaacacttaagtctgttgaaa

SEQ ID NO: 11814 - DNA, 807 bp, Cannabis sativa
taataattaaagagcctactatggactcttacatgaaattgattatcgttttcaatgagtaaatttacaattttccgatttttacgtatttcaaaattttttattttatttttatgacatggaattgaaattatatacatagaaatgttaaaaaacaccaatagtgctaggcaccacctaaagtgtcatatcactattggtactattggtataattaaatatcaatttccacataatttaatttaatacttatatgaaatattgttaatcattcgtaaagcgccactagtgcctcataggaatgctcttatatataatcaaaaggtgataaaatatatataaacataattaaataaaattactttcacaacaagacacttaaaatgacatttgacttcaccaaattcatcttcaaactactttcaagataaatatcctaactataacagatcgagtggcttccttgtttataaagaatgccccaagacatcaatcttgacttgacaacacctaataatgataaaccaaactgatttattggctactcaataacagttgaagatctctgcaacatgatttttgcaattactttacaactgaagttgtgcacgtcattaaaatcaatcagtggtcttgtcaaatttctgggcaattttagagattttttctgttaagttgttgaaagggattgacactgatacttacgtgcaatttcagaagaattgtttactatggtctctatagatgtcagctatattacaagattatcaacattaagagataaggacttttatgcaaagattaata

SEQ ID NO: 11815 - DNA, 505 bp, Cannabis sativa
ttagtaatctacttaatagtaaaccatcaatatagagtgagagaaaatctgaacaaatttttgtaccactcccattgaagttagatcgagcttatagtccttcaagctcattgtatgaaccaattgcttcataaaccatatatatttaaatatatgtatttatattacacactttaaatctcatattaaaattgtatctcataaacttgagaataggtagattttaacaacaatatttttatctaaattatcaattattgcaaaagcataatcaagtacttagaagaaactctttcatagtgtttattataaaatcaagcaacaatcaaacttaaaaaagcaacccattactaaaatcacataattaagaaagcattctctaacaaaaaacttcaatgttttatgagagtaagtttcactgcctcccataataggagaaacttcatctgtaaaaacaaaaacacaagaaaccaaacttggtagatgaatcataaaaattacttca

SEQ ID NO: 11816 - DNA, 624 bp, Cannabis sativa
agaggcacattcaacattgccatatacaaattgctagtgaaaaaaaaaaatagaaataaatagtaaaggtatgggaaaaagaaagaaataaattaggcattattatataattgttaattataacatgtataattaaaataagagtgttgtcattttttttcataatcttatatacagaaaagggcttaaatgtaacgaactttttaatttatcggtatttttttattttttattttaattttaacagaatatactattacttaatataatatttttttattaattttataatattattatataaatttaaaaataataattatacagatattttatataaaaaaatttaaatttaaaatacttaaatattataaatatttttaatcacatttttaattctgttggtttaactttgaataaaataagaaataattctactcaatcggttcaccgcgatatcacttgatttttattatacatataaaatacgtatatatataacaatgacattacttaattaaaaaaattgcatgtattgtattaacattacctaatttaacctaattaaaaaaaaaaactaattatacttaagtgtattgtattatacgtaacatcaacctaata

SEQ ID NO: 11817 - DNA, 722 bp, Cannabis sativa
ataggtcaccaaattttttatcttccgtgggcaagcgtcagcttccatacatggtcttacgactttgcaaagttgtttcatgccacaaataaattcgaacacttgaaaaattcgtcgggcaggcaaattcacatctcttacaacccacagagttctttgttcttggagcacattattattatacttaacctattcaaaaaaaatttaaataattcatcgtgtgtaaaatagaatttaaatatttaattatatgtgtgtctattttattttataagcactacaaaaaaaacagtaatttttagtcacaacataaatttttttttatgactgacttttaattagtcacaacaaaaaactacttgtgactaaaacatagtatttaagtacaagttgtcactaatttacttttagttacaacaagtattagactaaaagtacaatatttattcacaatcaattatgatttttgtgactaatacctttagtcacgcacaaaaattataatttgttatgactgaatttgttaatttagtcagaatacttattgtaactaaaactaaattggtaataacatgaatctaaaaggtagattttactcacaagtaattttttgttgtaactaaaattgacatttaatcacaaaaaaaattatgatgtgactaagaggttgtcactaaaggtagctttttttgtagtagctattaggtaccttaaggtgttga

SEQ ID NO: 11818 - DNA, 1162 bp, Cannabis sativa
cttcttgttggtgagctgtgttgttgtcatatggcgctaattttgtccacgtaagcaatgacacatcaagtaggcaaaaattaagataacaacctttttttttttcatatatttttttgtttatatcatgtataattttttctaatgaaatttatataatttttttttatcataatatctaaaatatatttatttaataagtgtattttttaagaatatgcaaaggaagattgtttttttcaattaaagatatatattttacatgtaaaaaaatatatattagggggcttttcaatgcacccctaaaataggtgtattgatgcacctctatttgtttcgacattcagaagaattatttagtctattttttttatagtcgtgtatgttatagttatataagatattttgcaaagttttgagaaattcaaaataatttacaatagaaagcaatgttcaaatagtttatttcacacgtgtataaaataaaaaagtcacgcgtgcaacagatagtttaaccctatttttagcgtgttagatttttccgaattacttaacatcttctaggatgtcgtaaataactataatatacacgatcataaaaatattaaaccagaaaagtctctcgaatgtccaaatagataggagtgcattggtactccctttaggaggtgcattgtagaattttctatattttatataaaataaaattattaaaatagagtgactttatttgaaccctattaagtatgatattaaaaaagaataagttgaaaataatttttaaaaattcctctaaatatttttgttttaaaaaaaagttcacattatgttgtgttagttttaatacttattttatatttatatttttgtttaaaattatgtatattttttttttaataaaatttcatataattattttttttttaattttttgtcataatatttataatataatttgttttttttaatacgtatattttttaagaatataaattagaagatttttttttaaaaaaaaataatgtaaattaaagatatatattttatgaaaaacaaaattgttaaaatgctgtatttttataaattttttaaatgtaaatatttgtaccctgaaaactgataaatacaaatactctactttaatatttttgttttacataaa

SEQ ID NO: 11819 - DNA, 1086 bp, Cannabis sativa
catctaaaatggaccgatgaacatctttatgcttagcaccactaagcaaaaactattcaacaaaataaagaactgccaacttaacagcatcctcatcaaaatcacgccacctctttgtggtaaaacattccctaacagattctttagtaatagaggatgaggttggtcaatatttcatagaaagactgttaacgtcttgcttaaaatccaacacactacaatcaccttcacaatctaaaccagttatcaatgtaaactcctcaatgctaaacataatcctaataccacgaatcataacccacaattcagcatcattaggctgctgaacctcccgcaacaacaacccgtgaaaaacttgcggttgaactttgaaatcaagaagcttaatgaaatggccaaaacaggtttttgaaaacatttcaagctgcttagaagaaagacaagtcctaatattatctataaccttgtatgaagcagtggagacggcttttgcaagaaacaaattcttttggtcatatatgtaattccattcctacaacagttccaacaaaaacatcacaaaaacaataaaagactaaaaagttaaaatacaaaatactaaataagtaacaaaacaaaaatgtactagtaaaaaatagaaacaaaaatacataccttacgaggatttttttttgggaatatcaaagtcttcaaacttcgctgaactcttaggagagacctgaaagtaggtataacaataaaaatataagcaaaaaattcgaactaaataaataattttcaaaaaatatgaaaaacaaacatcatctaagcatcaaaaaaaaaaccaaaaagcaaccataaaacaacattttaaaaacacccaaacataaacagcctaaaagatgacaaccgggaaaaaacatatcaacaacaatctgcaaaacatgaaattactataaaaattgttaattgtgaaattaaattacacaacactgaaactactgaaaataaacattaaaacaactatttagaaaaagctaattttactctaaaataacaatcaaacaatgaattaaaaacaagggaaaaatgttatgaaacacaaaa

SEQ ID NO: 11820 - DNA, 1200 bp, Cannabis sativa
  modified_base (100)..(103): a, c, t, g, unknown or other
tgttggacaaaattcacaaggtacaacatcgagatttactttgcaggtcaaacacattcagtaaaacattagtaaaattaaataaaaagaaaccaaattnnnntagaattcaactatattgatattaactaaaacagtctctgacaacggcgccaaaaatttattgtgataaatttaacatccaagtatacgtatcattttaacaagtaatactcacgtaagtgagttgtttctatgaggactgtagctaagtaccaatcaattgaattgttgtttctatttggcaatcgaataaatggattttgaaactaaataaactaagaaaaaaaattaaataaaacaaacaaataaaaagtagtttaacaatagatgtatagtttcaattgctttgattacccaattattaacactaattaactattcttcttcctcctatatgatgacagatgataattaacctaaactctttttagatcataagattcttaaattgcatgtcaactactgcatctctgagatagtacaataaacaattcgcattaagcaataatctaaaggtcccacaagctatgtgaatactctcgtttcacttcaaaatctatgtttgtttatttaaagtattctcaatactcacttttcagattttgtattgagatcatagatcatgcataaggtggccaatcaaacacatgtaataaaaacaaatatgaataaatcacaataatagggaaagaaagaacaatcaaatagcattactctatgaaataatctcagtcaatatccatcaaatccctaaataaggagtttagctcataattaaatccataattaaactaaacacaaataaaaacataagaaatcaagagaagagaaagaaattagatggaggattgtcacgaatcgcccacgctcgctccaagagtcttcttcttgtgtttctagagttccattctgtctatctccactaaaatttgtgaccccctttcattaaaataaagttttttagccaaaattgagaaaagatgaagttgtccatgtcccgtacggagccgtggtcgtgaccatagatagtctagttgcgaccactgtagaaaagtgaaaaaaaaaaaccattctgcccacttttggtcgcaaccacaacatttttggtcgtgaccacggaattcgatttcctgcttcaacatctctcagtaaaatatg

SEQ ID NO: 11821 - DNA, 750 bp, Cannabis sativa
gtacaattctgaaaatcctcaagcatactccaaatcttaatcgctgtcgcccttgttttccaacaaggaggtaatttacgcactatcaaagcttgcaccaggagcaaagcatcagaggcaatggctatggaacggaagccacattcccgacttaattgcaaagcccagaaaattgccgaggcttctacatccattgcagaagctgcttctgttctcttagcagaccaaaaccacttccccaattgcctgtcctggcaacccactgctattccagcttccccatctttccaagaggtgtctgtgatcaataatccctgagtatcactaggaatttcccatactttgtctgttggaatcttcaaactattatcatccctctgcgcactactctgaacagagagaaggtcctccaatctttgcaacatgttgagtcttacctgcatagtttggaaaataattagtatcgataatagttcaaagacatgatttctttagtaataatttgttctggtaacgacagaatttgttcatgagaaattatatcttatcctgcaactgattacactcattagtatcacgaccgtaattgttctggtaacaacagaatttgttcatgtccctcttccttgactctttgaaaggaagaggtttatgaaacgacaatgttgactaagtggttgtatatatcccctctcttggaaacaagagaatggaataggtggtgacgcaaggctcataatctcgcaaggg

SEQ ID NO: 11822 - DNA, 621 bp, Cannabis sativa
ctggtttgtatagggctataccaacaagacatctggatggacggtaccaggaatggtcgatttttgtattttaactataactatttactcgggtgttttttttagacgtcctatatactattttaaagcttgtgaaaagatctacattatggtatgtgatttagagccaaaatatgtattttattttagggtgttttcatcatgtagttcggtagaaaaccctaaagtctatacaagtattaaaaagtgttctagaatagacacttataaattttacgttactgtgacttagggcctccgatcgtcgaatattttttcactcaaattgaccgacacacctgattacaaaattatggtatgattagtataatagatgcaaatatgcacatatttcagatatacaagtgtcggatagaaaaatagccaactaactcgaagtcaaataagcattgataaatcaccaatgaggaggttagaataatatataaataaaaagaacacatagaattatagaggttcgaccctcttatgtgtgggtaatgacctagtcctattttagttgtattacttatgagataataccaggtagatcactaggaaagataaagtgatttctagcta

SEQ ID NO: 11823 - DNA, 503 bp, Cannabis sativa
  modified_base (91)..(91): a, c, t, g, unknown or other
  modified_base (238)..(246): a, c, t, g, unknown or other
aaaaatgtggagctggtttgtaataatttctgattatttttggtttgggaaatttacatgttatattaacttttgtcatttttttacaaanatactgtcagatggtattttttactttttttattgtatttctttataagtttcatactgcagtatactgtgttaagttttcactgatattttactggtgttctcctgttgttttgagttgtcttgctttgtgttttactggtgtttnnnnnnnnnacagtatttttgaaaatatttctgtgtgacagtatttttgtaaaaattaacttaaattttagtatttttgtaagttttccttttaaaaaatgtggagctggtttgtaattatttctgattattttttgaaagagtaaataacattttaactacaaagttctcatgtacataattgttgagtttgcatgaacgagagctttactttcttcacgggttaacctaacctaatacataccagtatgaaagcaaagcaaagg

SEQ ID NO: 11824 - DNA, 595 bp, Cannabis sativa
aatgaaaaataaatacatatatatattgatgaagtcaataccacgcgcgtatacgcacgtgaatgaaatgacttaaaaaattggaatggaccgtaaaattacgcgcgtatttagaacgtgagttgacgttttcaaaaattaaataatttaattttgattgtatctatgtgtgtatatgataatgaaactatttcatttattttggagcgctttattctccagctgcactcccttcaacatttattaaataaataaataccaatattataaattataatttgctaatgtgcgccttattcttttttagaagaatttttttattgcatatagaaatatgatttttttttttaaataaaataaaaagtgaaagaaaagttagcaattataagattaagtattttgtgactaattaataagattaagtatttccaattagtgttgtttaatattctagcttaactttttttttatatggtgattacaattatttatgaatttacaatataaatatttgtaaatcgtacgtaggattctcttcgaaataggataacttatcgtgtaactaaagagcatattttgtcaaactatattaact

SEQ ID NO: 11825 - DNA, 553 bp, Cannabis sativa
caatcactttattacttgcttcatgataattaataataaggggataatttaagattcatttgtatgattatacaaaattatggttttcaatattttaatattataaaataatacaatgaatatgagtatactgcccccccaaaaaaatacatagggtcaaattttattacacattagagtaattatactctattttaaaatagagcattgatgtaaggcactgcgtaacatcatttaaacatagtatattgcgattagttaacaatattttatagaagttattttatatgagattcgatacttgattgtagcatgttaaaagatgttaagcaccttttaacaattctccttaaaatacaatgtgtgtttagatgtcaagtagttacatatgaattctcatttttatatttgacaaatgagttagtaattaaatagtttaataacattaattatctacaaataataatatattataattacacataattctcatagaaggccatgaaaattaatgaatgtactgaaaacccctacattatcttcaattagatga

SEQ ID NO: 11826 - DNA, 584 bp, Cannabis sativa
aattaccatattactcctctaactgcctatataatagttaaaaaattattttatactcttttagccattttcactctcaaagaaaattagtgcaacatttattttctctctgaaatcttcgaagaactctctaaccgaagctcgatctttagcattcattcaagcacattcaagaatacatgcattattattttaaatttctctgtgaaatcttgaattttgaaacgcttcttcaatgattcgagactagaaattttagggcttttgatttttgatgttaatacacgcccatgacatatatattttcaaatttttagcttttcctcactgtttttctaggaactattataaattctccattcagaatttttggatattttccaagttcttcatcattcattaaacctctcaatttaggaatttcattattagaatgaaatttattccttttttcttttaaattggcctggtcagcatatttgatatgtttttttttcgaaaaatttatatttctatccggttcttacctctttgtcttcattcttttgtagatgaatcctgatgaatactagggaggtaaccat

SEQ ID NO: 11827 - DNA, 515 bp, Cannabis sativa
atttggtatgatattttctataactctttggttttagtatttatagcacttgaaattataagacacaagttatattatattattactagttatggttacacacaatacaataaatacatgtagtaataaagtgtaactactttcattattattttcttaatatgtgcacccaaatataattttgtgattgaggtatcattttttattttattttttttagaaaaatcattttttatttattaatataacacttacaacaaagtacaattacttttcatgataaatttttattagtaaaaacataaaatttttgtgtaaatgtaatttttaatcaaaacaaaaaattacttgtgactaacacatagtacttaaatataaattatcactaatttaattttaatcacaacaaatattgtgactaaaaacatattttaatcacaacaaacttgtgactaataccgtcttttacaacataattaagtgaaacaaacataataatttaaatacaatttctt

SEQ ID NO: 11828 - DNA, 650 bp, Cannabis sativa
ttttacttttctttatttcattaagaaaaaataaacaaagaacaataaagtcaagattgtgtttggaagaaatgagataatgaaggttctgaacatcttataattcttaaggtataattttttttgctttatttttctatatatcttttttaaaactgaataatgatttctgtatataatatattaaacataaagacttacttatctttttaccttgcaaagctcttcaaagaacgataagtattcatgtatttaataatgttgactgctctaacttcatcagtttatagttctaaattattcgagcactaaattattccaaaacaaattaattgttcaaataataatttaaaattagttaccaaattctaaaatgaaaaatttattaaaacttaaataaaattaatatttatgtgactcgacactactatattcaatttatcaacaaaaaatggacaactcaattatatgcggactcgacttgaataaaaagtgtaaaatataaaaattacacactattgtctgtcgaaataaaggaagattaaaatctacccatgaatatcataactcattttaataattgaataactcataactaccaagtcataactcatactcattttttcccccacaaaaaaaaaatgttctct

SEQ ID NO: 11829 - DNA, 1059 bp, Cannabis sativa
  modified_base (479)..(481): a, c, t, g, unknown or other
ccagctcgctgctagggttattatgggtattcaagttcccaacgaaatgaccaagcgtatctaaatcaatgttagcattgatccattaaaagcggatgaatcacagatttgtgattttcaaataataaccgtatttatttacgtgggacgtaattaaagcccacaattttggggaaatattgttgtggaatttgaatttgattgtaattaaaggccaccctatgtcactataaataggggcagaatgtattgaaaaatggacaaaaaatctttgagagaaaaaaccctagtttgtatcaaaataatctgaataaaattgactcgtggactatgcagagttaactgcaaaaccacgtaaaaacttggtgttgttcttgctttattattttttcttacattacaactcatttctgtgctaatcctatcacgaaataggcttattatcgttaacgaaaatttgcgttaacagtttggtgctnnnattgagagcctacgtgaaaaaagctcagaaaaaatccctcctgaccaaaggaaaaacttttctccatggctgacaacggggaaaataatgatacttatcttgaagagactactcgctgtcctggaaaaaagccaggggcccacggaggcctcccaactccacgaacaacttgatctacacgatcgacacgttcaaggacgaaccaacctaaaggtggccaaaaccacgaaactgggaatgaagtacccaacaatgatggtggcagcactcctagaatttggggtttttatgaccccaatagatacatgctagtagtagagttggaaaatcgccaactcaagcgataatcggtagaggcaaactgacaaaacgttgagttggaacaggaggcagccgcagctagggcggctcaagaaaatgacgcttaaaacaaacctgatcctgcggtaaggaggccacaaggcagacctcatggcacccgaaccagtaggcaagaacaacctggggtgactgaggatgcccataatgatgagcaactaaatgattttagctcatcgtcaagaagagcctcgaagacc

SEQ ID NO: 11830 - DNA, 704 bp, Cannabis sativa
  modified_base (490)..(491): a, c, t, g, unknown or other
tttgcaatctgaaacaatgagatccggttgtatgcttcgctggtggcaccatgacagagcataggtgagagcatgagcttccattagaagtgccgaatgagtgcctgtccagggtgtagcaactgacagcaacataccgcctttgttgttgaatagagccataccaaatcctgtcatattggaatttatattctgggctgcatctactgacagttctaagttgaaggtgggcatattttcatgagaagcagcagctgaggatgaaggatgagaccccgatgtagccaaattcgtgttgttttgttgatacaaatccaagtaatcagaggtggtttgtatcataagagcagggatgattcttttctggtgatggagaaactcattcctgcaatgccaactcttccaaaccaaacaaaggaaaaattgatagtctctatccgtgaatgatgaagcagcaacatgtagaatttccctacaagttagttccatnnttttaaaatgaaagaggagaattgagttaatttccataccttctggatagttgaacacctgaaaatagcatgctctagggtctcaatgtggtgatgacaacgacagcaactaggacaacaactaggtgaaggaatgattttccttgtatgcatattgtggctagtgggaagaatgtcatgataggccctcccaatgaagtgtttaacttttgg

SEQ ID NO: 11831 - DNA, 899 bp, Cannabis sativa
aagacatattttaaagataaaattattattataaatttactttaaaaaaataattaaaaaaaagagataaaattcattacttttaatggtatttcttagaaaatttgtgagagaagtttttctatttcttttcttccttatttaattaaactctttttttttttttttttattatttaataaatctataacttatataaaagtgtcaatgtttttaggctttttcatattgaattacacatatatccttttagaatatatattacttcacaatacaaataaattacatgcaaatgataaaattttgggtttttttttttttttcttattacacatatactcttttaaattagtatagcttgtaaatatattcttatcttaacattttttctctatcattttgaaaaataaatatatagtaaatttacaaagcattatttagtataaccaatgattcaaatcaaatggagattaaaaacaaaataaacttcacctaaaaaaaacaaacaaaataaacttttaaataattaaaaatgaatttgtaattttaatattaaaaaaatattatgataactaacattaatttttttttttaatttttaagaaaaaataatatagattttttaaaggaaaataacatagaaaatttaaacacacaaaattataaaatttttaacttatgtaagagaaaaaaaattaactaagttgaaagggaaattatttgcccataaaaaataaatatatatacattatattttcaaaaaaaaaaaaatattaacttaattaattaagtcttgtgaaaaatattccaataaaattaataaaatatcaaagagtaaatttaattaatataatatataatttaaataaagaaatgtaaaaaattggactccctcacca

SEQ ID NO: 11832 - DNA, 589 bp, Cannabis sativa
tttaaatattaaaaaatatagtagcatctcgtaactatttaatgtttatataccgcgggccaaagaagtatcccaaaaccactaaagtaacattacagtcccaactggacttgtaactatactattacgggtactgagaacttactcgacacaaccattacaaactcaaaatattctactgcaaccaaactggttatgcgacacactagttatttcatgttgtagaagacaataatttacttgtgctccttagtattcttactaaaatccttggtactactaactatatcctctctagctaacattttctttatggacatatttacgagaatgagaattaatagtataatattgatttctatacaattatttaatatgttttagctagaaatagagaaagtagtagaaaataaaggaaaagattgtccccatttgtataggaatatatttctcatatttcctaacttattttatttttattttaattttattcataaaaaataaaaaagacaatatgctttttaaaaatctataaacaaaaaataattttttttttgaaagcaataaaaaataatttcatgttctaaca

SEQ ID NO: 11833 - DNA, 676 bp, Cannabis sativa
ccatattgagagcaatagtaatttttctatcattctctccattttaagtagcaatttgagtttacatttcatctttttcttcatctcatttcgatcttgaagcataagttgattttctggccacaagttggtcgacgagttctcaccaacattgcaatcttaaattctaatatggtatcagatctaaattaaactctaacgagtatcctactaaatttaaaatttgcccaaaaagacgagcctaaaagagtcacttgtgattgagccgtgcaatattagtgagtaaaaaataaccaccatcttgagagaatgttagagggtctcacattggctactcctcttattgtcaattggttttgaaacaaaataacatgcaccttaccactcacctattcctacttcctcaaccatatacttccacattctaataagaaatatttcttatttcgattgaacgataagagcttgttaatgatgagagtcattattaaatgatcttataactctatttagttattgatatttttgagtctcacttaccggaacaaaaatattatagattggttaaaaatctttgaaatataaatatatacagtatatatatatttatatatatatatatgttagttcctacctatactataccaattgctgcagaaaaacatgaagttatcat

SEQ ID NO: 11834 - DNA, 733 bp, Cannabis sativa
accattatattaaacaacttgacagccttctcaggaaaatgagctttcccataagccctaaaaactgtaacaaaacatttctcagttaaaacccgcttttcacgtttaacctgatccaaaaccttttccatcgacctaaaatcgcccagactcgcatagttttggatgagtgaataaaatgtggaatcccccaatttataggagcccaatctgggactttctctgaaagcctccccggataatgggttctcgattccatcatcatcttcgttatctagatgaaggtccttctcggaagctttattcagtggaattgcaataacagaaaagtaacaaagttgaagtggaggagctgattgaagaagtgatgagaaacttgttagcttctctggactctttcgaaacgatttgcgtagaagacttgagtaacatgtcgagcattttagcattgatttcaaaagggctcctttctaagttatctaattgaaactggaaataggttgcaatggatgagaaaataaatgaataataacgagtttttgtaaaatcataatttgatgtacacaagctcaaaagataacatattgatttattctctaaaaaatatgattaatattttatgttaatcttagccaattaattaaataactaattaatattagtatcaaatagaaagtttgtacatgtttataccttctttcaccgaaagaaatagtataaatatatatatata

SEQ ID NO: 11835 - DNA, 628 bp, Cannabis sativa
ttgagcacccaaggcactaggtgctccaggcatccaatgcccaggttaacataatgtcaacttagggcacttttagcaactatattgaagatgtatccttagaattttctttgccttcatacaaacaaggaaacaaatgcttttaggaaagaaacgtattgacctggaggccaaagtgggggcccaacatccaacttgacactttgtcaaccaaggccacttccaacagcagtttagataaaatcttctctgaaaattctctattttcctcaacaattaatatttgagtgctttcggaaaacaaacagagccatttgggtggttagaactgggacccaatgctcatgttgacactttgtcaacctgggctatttttaaggggtttttatgagaagtcttctagccatattctatgttttttttaaagattaagatacaagtgttttttgggaatcaaacggagtcatctggtggcaaaaatcttgacccaatgcccaggttgacacatgacactggggctagtgcccaagttgacatttgtcaacctaggatgtttccaatcaaatttccaaaaaagtgtttttagacattatttctatcatctaaaataacaaagatacaagtgatt

SEQ ID NO: 11836 - DNA, 709 bp, Cannabis sativa
gttatctttcatattctttgttttctccatttactttatttaagatttttattaatttgatcatcattattaataagtgattaatcaactgtacctacatttaatactatagaaaaatttaaaagataaactattaatattatttagttttttttttatttttaaaataatattatttagtctttattaagaattaaagatgtaatataatttttattatatctaagttgtgtacagaaaaataaaagaagaaaaaaagaagttcaataatactaataataatttatacatttcaaatctcaaataataataaaaaataaaataatacaaataatatatcaaattaattttataaatttacaattaggagtaatgatgttgaattttataaactaaattaacattcatttgtacatttcttttgtttaattattgttttcttttaaaactaatcaattttttttgttcctaaatattttagttaacctttattatttatttaattattttattttacttttaatatgtattattaattattaaattaaacataagagagcttatgtgacatctagatactttttaaactatttttcctttttttttgttacattttctaaataaaaaaaatcattcattagtagtatattaatagtgtctttttattttttataacgcacatctagggatgcacaatatatatagttag

SEQ ID NO: 11837 - DNA, 506 bp, Cannabis sativa
cttttctcagcaaaactaaagggctggacaaagctcttggtaatatcattggtgagtatgtggatgtctatgaagattctctcaacgaggggtggggaccttttctgtgtgtcagagttaaaattgatacaacaaaactattgttgaggggtagaattatcactttacagcaagcaaaggaaaagttttgggtaaaatgcagatatgaaagactactcgaatattgtatggagtgtgggcgtttggggcatccttttgataagtgcctcatttatcttagaaagatggacaatggtgaagaactagatttggaatataggcctaccatgaagggtttaccactaccaatttcaagttatgaccgttatcgaactgacttctcaaagggtaatgcttgaccattactcactcgtttggccaaaaattccttaatctatgcaattccaagtttgaaaaatcgagatcctccacatccaagacaactgattagaggcaacctccacact

SEQ ID NO: 11838 - DNA, 784 bp, Cannabis sativa
tagttttgggcaacaccaatcttattatggatgagaaccaatacaatattataaaattttgagaagtagaaacttaagcatatcaatatcttataatatttactatttctatgaattatgccaattctaattttaatttgcagactagattaatatactgtcaaaatatataaataacaaacaaccatagctaaccatattgcctttacttagaatatgtttggtttaatggaatgagaattgcaataaaatcattattaccattacattgtttgttttaactttgtaatgactttacaatgtaatgatcattacattatatattataatccccattacattataaaacataattagacaaaacatgtttttacttttatttaactttaaataataaaaataataaaattaagaatgtttttgtcaatatactttttactttattcaattacaatgctcattacaatgttaaaccaaacatcataatactattcccattacaattcttattctattatattactatttatattaccattaccattcctattacattacatcaaaacaaacattaccttaatgacattttaacacttgataattcaacaagtgagacattttgtgtgataataataatattcttactattattagagaacaaccattgtatcatgggataatggtccagccaagagtgatgggttacatttttaccagctttaattatatgacagaataagtgagaagggaatgactaaagtcatcaactttcttaaagttgggt

SEQ ID NO: 11839 - DNA, 780 bp, Cannabis sativa
cacagcggttgatatgtacattgtcaagagacctcagactcgtggctgatccacttttcccttccctttacctgcaccacgaagcacccgcaagtcacaaagactcagtaagaaaagtgaataaaatacaaacaatgcataatacgagaaaccacaacattgtataaccaacaagttcatcacccaatacaaacatttatccaatgcgtattcaaaaaatttataaacaattattcatcttataagacgaaccgacattgatgtctcataaagcatcattaccactcgttaaccacgagcttcaaatgtcactatcgttgctcgataaagtaatcgataagtaagaaacttatctgtggtttcaaggtgagtaattactcattttagcaacggtaattaccgagtatttaccttaattataatcgatccacaaatcataataattgtttctcatatgagatgcttagtagtgcaaataacttttcgtacctcaatccaatatcaggtgtgcaggccgacctgagtggaattatgctcgacgatccagggtcctatgtcacgataacgaaacttggtgaacaatttaatcaaattccagaataaaccctaattttgcaacaggacaaaccctaatccccactgacttagaaatagcttaaacttctaaaaataccctattctaggctctagaaaacaccccaagccaaaaccaggttcgagaaaaaaccctaaaatttcctttgctggccatcaaaaccagttccttagtggcctgtagaa

SEQ ID NO: 11840 - DNA, 510 bp, Cannabis sativa
taataataataataatgggaaaaacaataaatttcaagcgcagcaaaataataaagaaacgaagcaaaataattaactcagtttggtaaaattattaaactcgcaaaaagaggtatatttcacttatcacttcaaaattatatttactctctatctcaatctctctatccaaatcccaatacactatttgcttcttcctcactctcaccacacaacaaacttacatacacttctcttttcacaactcactatttttctctacacacacacctctctcacacaaaaaatatatatttataaagttacaaaacatgggcatcaaaaaaccttggggactgagatattccaaaactttcttaagaagattcatcaaaatatggccaccaagcagactttctttttcccacaattaataattcccatcaaaacatctcaaattttatgaaagacaccatctttgaagtttcctgtgtagatctgaatcttgactctgataccacttgttgggaa

SEQ ID NO: 11841 - DNA, 641 bp, Cannabis sativa
attaaaattgttttcaaaatttttaacacctatatgtgaccaaaatcacatccatggacttttcttaaatcttcatttactctcaaatattcatttgcttcatacaacatgaattgttcttcaagtttggctatcttcctcaagagacccaaaatcagttctctacactttctacaagattcaacatccatccattcaaagaacttacatcctccatcagcctggataaattttcaaaataactattgtgtttacttattatgaacagtaataataaacttaaacatggggggaaaatgtaagtcttacacttggaaatctgcacctcctgaaccaaagacctaggtttgctttcgtattcaatgttcttgcaatccacaactacaactacaaccacaataggaattttgaggttccctttcatggattgaaccaccagctcatcttgaccttcgactgttgataccacaactactgtaagaatcctccacatcaattattctcaatctttgtcgaagctttgttttttacaagcttcatccaacattaacgttttcaaatgttcgagttgggggatatacaatttgggattcaggtattagatttgggttttgagataaaagttggcttttaattaatta

SEQ ID NO: 11842 - DNA, 626 bp, Cannabis sativa
aacacttttatgtttatgtgtgttgtgtgtaatcgcatttgcaaatgaccattcttaatatttgacttaccatcacattgacattgatatatgtttgtgtttcaaatattatttaataaattaaaatgtgtaataaccaatattaatgaaggaataataatttgtcaatatttttctttgtgaatatatatatgttcatatattaaaaattgggtgtgattgtaatttcacaataacgattaaaattgtctaacgacccatcaatttaaaaaaattacttatagtcacaataaaatttgtgattaaaaagtgaaaaaagtttaactaattataaatcgtcatttataatatttaaaaaacctgtatattcaaaaaaaaaaaagaaaaaaaaaactgtaactaaaagtattagtcacaaaaaaatacaaattgtaattactaaatgtatttttagtcgcaatatttgttgtgactaaaactaaagtagtaacaaatagtatcaaaacactatgttttattgacatataactttttgttttgactaaaagtcacaaaaaaaaattatattatcactaaaagtaatatttttttgtaatgtgtagtgattgaccatgatatctaataca

SEQ ID NO: 11843 - DNA, 686 bp, Cannabis sativa
aatgctacaaaatagcacaacatggcacgtaaaatatgtccttaagcatgacatggaacgagaagtacgaagggctcaacacacaagcacgaataaaccagcctgaaaagcacaaatgtgacaagcccaaaaacatgacacgacatattgaaaaatttataatttaataataataataagatataaatttatcgatataaattagttaaaatgataataaaacttaaatataatattgaatattatagttctataattaaacctattaaaatatggaaaattaatatgatatattaatttatttatagagtgtgatataaaaatttgagtatttataagtaaatattcaaaatctaatgatgttaataatttttttatatgattatttataaaatattcaaatgttatataaatataactaaagctttaaaatatacatataatttagtaattgtaaaaaaaatatatgaaaaagtaaagtattaatttaagctcgaatttgaaaataggttagcatgtttaagaaatacgggtcgacacgagcaaagcacgacactaaaatatcgagcttacgggtcgtgctgggcctaccctttaaaaatattggcacaaaacgacacgacccatatattcttgtggcacggcacaacctttttttttaaaaaaaagtacgaataaatacgggc

SEQ ID NO: 11844 - DNA, 504 bp, Cannabis sativa
cacgaccctatgcacacatgggcttgcagaccaatcagaagatttttttgttagagtttggctttgttttgttttttttcttgttttctcgagtttaacttttggttttcatccaaacaaatcatatgtttccatgcaagccatagttttccattgcttgtagactctaagatgcagacttaacctccttattggtgagctgtattatcacgtggcactgatattatccacgtaagcatgccacgtttggtgggaaaaattcgaattaacattttgcccccaagtccctatgtaggcgtatgtgcagatagggacttaccaactgagttggacctgatggagccttaaccgagtaaatgttgctgcatggttagcctttgtaatgtttgctcttgactgtctgaactcatttgttgcagtaaactaactgctttgcacttctacatgtctctttggttgagtgtgtgtgacaagtgaaggtgtggtcccacaaaaactatttaa

SEQ ID NO: 11845 - DNA, 578 bp, Cannabis sativa
caataagaagcagaggctgacccatcaataaaatccaaacaagccttacacacatcagttccaacaatgccccaaaatttttgataaaaaccaacattcataccatccttacccgggctcttagccggatgcatttgaaacagtgcaattcgaacatcagcttcaacaaaaaggtctcattaacacatcattgagctcattagttaccctaggttgaaccgaatccaacaccatatttagaacttcatcgggaggaccatgagaggtgaacgaagagctgaaatattcctcaaacactgcagcgataccacgaggcgactcaacccaaacattattcttatcaaaaatgccaccaatagcatttttctttttacgatgagtagcactttgatgaaagaaagctgaggttttgtcacccaatttcaaccaagagttcttagcacgagagaaccagtactcttcgtctatgtagagcagaacctcaagctctttttccagtttcttgtaatacaaccaattattatcatttaagttagagtgaagcacctctaactcattcttcttcttgcggatagcct

SEQ ID NO: 11846 - DNA, 1038 bp, Cannabis sativa
acttgtgccttaaattcccaacaaagcacgaagtggcatgtgttaggggagactgatagtctgctcgtcactgctacaacctagccttatccaaggcctaaaaggagaagatgcccgccaaaagtccaaaagataagccctgcaaggggcaatgaagtctagcccaaggcaagacacaaacatagatcctcgctttggggatcctgcaagagcttcagacctgtagaagagttggaagaagtggaagttaaatccactcacccaacaagaagactgaagatcggtaaaggtttggctctaaaaatcaagtcagtcttgatagaatttctaagggcaaacctagacctgttcgcatggtcatatggagatatggtctaaattgacccctccgtgataacccatgcattcaacattgatccctacatccagcctgttcaacaaaagaggtggttactgacaaggagcgtgcccagacgctcaaagatgaagtcaagcaactgagggacaatggcttcataacaaaagcattctaccctcaatgggtgtccaatctagtgttggtacctaaacctaacaagaagtggagagtctgcatcgacttcaccaagaacaaagcatatccaaaggactacttcccgctacctagaattgacaagttggtggatgccacagctagccatgaagtcctgagttttatggatgcatattcaggttacaatcaggtaaagatgtatccacctgatcaggagcacaccaacttcatgacggacctaggcctatattgctacaaagtcatgccttttaggttgaaaaacacaggggccacttatcaaaggctagtgaacatgatgttcacagatctcattggccgcaacatggaggtttatgtggacgacaagctcgtcaagtccaaaaaggctgaggtaacgtggaggacctaagcgagtacttccaaatccttcgcagctacaacatgatgctcaaccccctcaaatcctcttttggcgtaagctcgagaaaatgttgggttttatgccc

SEQ ID NO: 11847 - DNA, 572 bp, Cannabis sativa
gatatttattgacataatattaataattacaagagttttttttttctttttaaatttatttttgttcctgatttataaaaaaaattacgttcttctcactttaaattctaggtccatcattgtgtatttatgtatataatattttttttatgaatcaagtgatgttttattacatcaaatctcaatttgtataacctacaagcatcttccaataaaatagaggatcttaagaaaattatattatttacaatgtgtctaaccatactttatcactattagaaactttttttggccatatacatgaaattcgacttttagttacattctcaaactgtgtaaatactgtgttgctattctctgctttattctcccaatatttggtgtttcgagtacaccaaatgatgtacaccagggctgtaagtgtagtagccaatgccaacttcttgaattttctcatctttgttttacctagccatttgacaacatgaaataaggaattgaaattcatgttccaatgcagctaagtcttggcctggtttaagtattcttgcgagaaagagcaagcaaagttg

SEQ ID NO: 11848 - DNA, 594 bp, Cannabis sativa
tcactaaaagtagcagtttcttgtagtggagtttggggactacatccttttaaagaacaaagacattcgcagtattctataagattgggaaacgtgtaagtttgcaagtcttttctatgaaaaataaaaggaagagtgcttttaaggacatgatgttatagaatttgggatataaggtgaatgaggttccttctcaaaaccaattggcaatgggaggagtagttcattcctcttatatattctattatctttccacacattgacaatgtgggactctctaacatcccccctcaagatggtagttattttacttgctcaccatcttggacaactcgatcataagcggctctttttttagctcactatccttgatcacaagtggctctttttgctctactagcccattcctcttatatattctattatctttccacacattgataatgtgggactctctaacacttgacatacactttgacatgccaatctttatctttgaagaacatgggtacgtagagctatatgtttaataaggatatgcatcaacaagattgtgatggtgatgatcatataatcatattgatttagtttttg

SEQ ID NO: 11849 - DNA, 629 bp, Cannabis sativa
acacattcataaaataatacgagcttttaatataactcattaacatactagtagcacaaataatttaagcaaatttaaaaaaaaaaaaatattttacattatttatttcactaaaaaaaattttattcttaaattatatgatatttcatacaatactttagtttttttttagttttcaaattattatagtaaattttaaaaattattttttttaaaaaaaaaatgaagctcagtctggtcggtttaaaacggtggattaaaatagtcggttttttcacatttacataatggttggttagttttcagattataaccatgaaaactgaaaatcgaattttgaatttttttgtgtgtacaaaactgaccaaaccgaccgttgttcatccctacacgagaacacctagaaaacaatcattaagtccagcaagatggagcaacaacagtgaaatcgacgttaaaaaaaaataaattatagaaaacaaccgtaaaacaacactaaaacaaacaaaaaaaactaataaataaacccagtatactgcagtatgaaatttataaaaaatacacagtaaaaaagtaaaaaaaatacaatctggcagtattattttaaaaaatggcaaaagttggtatac

SEQ ID NO: 11850 - DNA, 556 bp, Cannabis sativa
gctcattttttgttatatagttcggcaaatttttttaaatggcccgacccgattttcgtttagtttgtttttttattagtttttttttacacatgccatatgataagcttggtactttttttttcttatttttcaaattaaattgaagcataagtaataatattggtgtaattttatattttagaataacttaaattttatttaaaaagtatttatataatttttaaataattcaattgaaaaaatatacatgaattacgaaataaaatttcatatttagtttgtacttttattatatgcttacctttacttttgtgctaatatattcgtacttttgtgtagtacttttcatgcttgttgtatcgtcccttgcataaactcttatcttttgcttcgtgtctaggtccatatttttcgtgttgtatcgtgcctaaatttaaattttcatgtcgtgctcttataccttaacttgtacctattttgtatcgttccgccattaaactcggctcttttatacaaatttagtggtgatactgttggaatttgttttaccagg

SEQ ID NO: 11851 - DNA, 615 bp, Cannabis sativa
  modified_base (93)..(93): a, c, t, g, unknown or other
aaatcatccataaagatctctataaatgtttcaatcaaatccgaaaatatttccatcatacacttctgaaatgttgctggagcattacatagnccaaagggcattctcctgaaagcaaaagtgccatatggacatgtaaatgtcgtcttttcttgatcctcaggtgctatggctattggatggtaccccagccaaccggtctaacatctgatcaataaagggcaagggaaaatggtctttcctggttgccttgttgagcttcctatagtcaatgcagattttccaaccagttagcgttctagtaaggattaattcgttcttctcattctttatcactgtcatccctcctttctttggtaccacttgtactgggctaacccacttgctatctgaaattgggtaagccactccaacatctaaccattttaccacctcttttctgacaacttctttcattggtggattaagtctttattgtgcatcaatagttggtttagcaccctcctccattaaaattcgatgtataattgtagagggactgattcccttaatgtcagccaatgtccacccaatggctttattgtgtgctcagagtactctaagcaacttgttagt

SEQ ID NO: 11852 - DNA, 526 bp, Cannabis sativa
cttggaacttgaaaaactatgcgggtacaaacagtcatgccaatatgatggaagaaattctaaaatgcacaattattcttcttctaatatattatttgggacgtcgttgaaaaagttgggattgtttttgaaaaatgacgaggagaaagaatttgaagaagaagaggaaaacttaaatctacaaaattaaagaagttgaaataagcttagtttatattgtttgtaactaaatattttattataaaatttaataatgacaagattgattacattttatattataataagattgttcgtgttagaaattgtttttaaattagttatatataaaaaaaaattatcgaaaattaagctcaaagtactgttttgtatcactttagaaaatacatgatccaatttatcatttaacaaaatagaaagttcgatcaataatttttataaaacacagaatctaaaataatattaacgctatatatttatataaattcttatatatgttcgtgcgtatgatatactacatgtggtg

SEQ ID NO: 11853 - DNA, 674 bp, Cannabis sativa
atccgaatagtagacccgcagacccgcgagttgggttttttgggtgacagagacgacaaaaacgacatggcatttgcctttgtcgggcaaaacgccatgtcgtacgcacataaggttcaaccccctttgcagcacaaaacgacgagtcgtttatgaccctgctgcatgtcattttccaccaaatgacatgtcgtttttccaaaatgacatgtcgtacggaaattttaaaaaaaaactaaaatgggcgcatgggggcgcgagcaaggtcattttttgggccacttttcaccaatttattccatttttagcattctatcatttccacatcttattttttgcataatattaattcattaatttattcataatctttgtaactaatattattttgttatgacatacatttatgttttatttaaacaattagtgcttattttcttacatatcgtaagattaaacatgtaaaattatttggtaatgacgagcatgtaaatgttaatgtatttaaatattgtatcttcctctaatattagataaagatcattataagtaatgaattatcctatcgatgataattgcttgataatgatgcttaatatggtgaagaaaatttattaaatattatgaatcacaatttgtttatccttttgatagttgttgcccctgattttgcc

SEQ ID NO: 11854 - DNA, 731 bp, Cannabis sativa
tgaatgtatgtaaagagcctcattactattaagagatccaatttctcagtttaagccaagacactattgaaatactactactacaaaattggactttagaggtaacttttaaggtcttttagcgtcggttttggctaaattcgttaccgacgctgttccagtcgatgttgtaggttaaaaataaccgatgctgtagggaccctataggtcagttattatgaaataaccgataccgtagggtccctatgttagtcaaaacatgaattgagtatgtttgaaaataaggtcttagcttccttgagacatgaattagactaagtgcgagtttttcgagaggtgggtatctatatattgcctccaataaatgattacatacgtaatatactggtaatttggtctttccttcttctcgcactaatactgcgcttattgcactttctaatattgacaaatacacaaacaggatctcgccagtcactggctttgaaagtaatgtcggatttgataactgttcttcaatctcttgaaatgccttctcacactattctgtctattcaaatcttttgttgtctcgcaatacgttaaaaaatagtagacacttatttgttgattttaaaatgaatctatttaatgctgccatttttccagtcaatgattggacttctttttgattttttagtgaaggcatgtcgagtagaacttttatcttttctggatttgtttcaattcct

SEQ ID NO: 11855 - DNA, 606 bp, Cannabis sativa
tttattttttttatctattgatttgaaatagggacattgaagatagaagtctaggagctgtttgattttataacttaaaaagtgttttcagttttaaaaaacaaaaatagtatttaaaaactaataagagtcttttgacaaaatttttaataaatagttttttaaaaattgagttttaaaaaatttgaaaatagaaacatcaaaattttcaaaaatattttttttttctaacatattatattttatatttttgttcacttttactcgaatgctacacccagaaccaaacccgaactcggacccgaatggattcatgtcatggtatggtgttaaaatattaatttttttttagtaagaaaaaatctaaaaaatagttttaaaaacttgtgccaaacactattaaatttttaaaatgacaaaaaactattttctattctcacttttaaaaatacaattctaaaaactaaaaactgaaaacacagccgaacataacatactttattatatggatttgtcttttttttttttacaaacagctatatcaaatgtattttatttatcattttattcatttgttgttaattataatttcttgaattgttttat

SEQ ID NO: 11856 - DNA, 547 bp, Cannabis sativa
tatagatatgagatatagatcccaaggtcaatggctacaataatttaacttgttaagtcagttatgacttaacaaacttaacatactcctcataatgtgatctccatgacaacttaagataaagtacatttgaatgagacaaacgcttcccgaaagatacaccgaaacgtatgctgaagggacttcttagatgggaaaaacgatagttagagtcgactatttgggacttccttctaggaaagaacatttagccacctggaactccttttcagagaaagattagttttttccggagactccttccggatagacaagttagatttccaaaaacgctttaccggatgacatctaactttctataaacaaataacttttggacacctttttatttagaggaaccataccacaattttcttccttttaacaataattaaaagaatctctcctaaaactatgggcatttatatacttttatgtacatggtggacaactcaagttcttgtatcctcattttagtgtacattacacataattatgttcttctcaa

SEQ ID NO: 11857 - DNA, 555 bp, Cannabis sativa
atatatatatatatacattattacaaacaaataataaactcattattatatatttatgaagcaaaacaagagtacctcaagtttgttatattctgcaattgctaaattagctgcttcaatagtatatttacaacaaggattgcccataattatctgataccagttccttttgtgtttattaggaagataatcaacatgaaaaccctaaatatacattagaagaattaatattagatctaatgaattaatgtagaattggagaaagagagagagagagaaataagtatacatacatcagtttcaaggagttgtttgtgaacaatggcccaatcttgttcaaattcatcatcttcatccgaatagtatgaaaattttgtgtttggtggtaatttagctttattttccctaataacaagaagcatattattatacatacaaagagaaaaagagaaaagcaatcaaacataataataataataataataataataccttgatttggttatcctttcatcttcaacaagaatataatcgttgtcatcttgagagtcataa

SEQ ID NO: 11858 - DNA, 550 bp, Cannabis sativa
ctctctctctctctctatctccttttgtgatagagattttcatcatcatctcatattcacagtgtctcatgagttgagtacacactgtgatagaaattcttcctttgataatatctatatataagtccactcttatcctaagtgttgaggctggtctagaagattgtggtgtgaagtcttcatcgttgttcacaccaaaagattagatgatccatatttattacgagaagaattgatgatcccttgataaggtacaagaggtattgtttcagtttcatgtagtttagatttaatctataatattatgttgagattcatgaaattatgattcatgttggattaaattatttcttaataaaatccgcttctacttttctaactaaatatgaaccataaaaaccaacaatatttgggtctttctttcgaattttagtcactagatgtccccctagacttcctctttaagacaacatttagtctaaaagatatggctacatggaaaaaataacttggttaatttctacagaatatataataaaggcaaggtgaa

SEQ ID NO: 11859 - DNA, 883 bp, Cannabis sativa
cgataagaaattccattccagcctctcataggctttgctcatgtcagttttgattgccatgattctagtctttccttttttatttttaacagcatgaaggacttcttgggcgagcacagaacattcggcaatccatcttccaggaatgaaggcagcttggaaaggcgagactagacgatcaatgatgctcttcagtctgtccgtaaggattcgagagatgattttgtaaccaaagttacacagactgatagggcaaaatttgtcgaaggtctttgcttgagcctccttagggattaggcaaataaaggtgtgattgcaagtatttggaaggataccatgagtgaaaaattcttggaccattttgcagacctgcgatccaactattccccagtattttcggaagaaaacacctaggaaaccatcagggccaggcgatttaagcgggtgcattttgaagacagcagttcttatctcctctatcacagggactttgcacaattgatcattctcatagttctccactttatcagtaaatagggattccaattcatcactgattaacgggtcagttgaagtgaaaagattttgaaaatttgactggaaataatttccaatctcaactctatgtctcaaccaaactcctggtttttcctcaatgccactgattctgttctgccttcttcttataattgtcgaagcgtggaaaaatttcgagttacggtctcccactttgagccagacttctctcgacttctgtttccaaattctttcctgataagcttccatctttaaaatatccagttgaatgcccgcttcagtctcgagattatcctgtgatggctaggtcaattggattgtcgaaagttggtgcttcaagtctttt

SEQ ID NO: 11860 - DNA, 575 bp, Cannabis sativa
cattattatttgatatttttacactaataatacaaactacacactttattatatatataccacaacacggctaaagcaacttttttactcttcatctttatatactactattttaccacatgcatactcattccatgcatcagtacacgtgcatggcctatgacccctatcaatcaaccatccatcatttatctctcttcttttcttccttttcatattattttatatttcatttcttttttttttttttaaatatcaacttccatagctgaaccttccctctcactgatcccatctccattttccctcctctttttactgttcaatttttttttcaactcccattaaccgaatctcataaccgtttttcctcttttatttttatctcaatccgtatataaatatggttgtaacccgttcttcatcaactccttcccctattcaaaagaaacactctaaaatgggtttgaaatccttagctaataagaacaagggttaacgacctgttattgaggaggatgactctgattttgcccctccattatttaagggtgggcgagctcctccaaagaaga

SEQ ID NO: 11861 - DNA, 603 bp, Cannabis sativa
agtttggaataaaggaggggccacctaaagaccaaactaactcaattgacattgtttggttcaactaattattgctatcactactaagtaagtagtggatggaatctttgacaatcaaaccactttatcttatttattactcatttcttcaaatttaatctttctttttattttgttctcctccaatttaatttaaatttagagtgtgtctagaaactattatggaattattaggtattgtcttattttttaaaaatatattgtattttttttgtcgaaaaaatataaagtgtatttagatgtatgtgtttggtaaaataattaataattatattaaaaaataatatttttttaataataaatattttaaatgaaagttttgtatttatacaaaataattacaccacaatttaattgagattccttaattatttgtaattaatagttagcctagccatatatcaaataagtaattacttcaaactaaatcaaatttattaaagaatacttttccaaaaggctttttttttgggtaaggttttcaaagacatccttaataaaaagaatttgcagcaaaaatttttaaaagttcatactatgatg

SEQ ID NO: 11862 - DNA, 626 bp, Cannabis sativa
tcgggtcccgagtccaggtccgggcagggatctgggtctgggtcccggttcgggtctaggtataagtttaagtctgggtcttggtccggttatagttttgggtctaggtccaggttcggttacggttctaggtccaactcctggttctggtcccaattctgggtcaaggtcaacttctgatttcggttccaatttcaggtaacaaggtacgattttggttcaaggtttgggtctacgattgggttcaggtctgagttttggttcaggtgctggtcttggttcgggtctagggctttgtcccagatccatacaccgactatgggttcgatccaagccctggctctagatccagatctcaatctcgggtcctagtctggttccattttgggtgccatgtcatgagctgggtcctaggttcaagtccaggtctggggtcgagtactaggtttcggtcctagttccgtttcccaggtccctatcctgattcagggtccaggtcccaattgttgtctgagattgggtccgagtctaagttcacgtttgagtcctagtctcgatttgagtttgggtctttgtcttgattttatttgggtcaggttcgcgtttaggtcctagtgttagtccta

SEQ ID NO: 11863 - DNA, 628 bp, Cannabis sativa
gaagtttggcgggccctggatgatcttgggagatgtaaattttgttttaagtagttttgagcgtgtcaggtgaaagaggaaagaccaatttctcccttacatcacagagctgattaagagccatgctttgattgacatgtccattaaagggaacaacctgacatgggataaccatagcgagggccctaatcatattaaattggccctcaataaagcagtggtaaatgaggagtggttacatattttccctaaagttgtgattcaatcgctccatacttacaattcagaccacatgcccatgtacattcgtacagaagatcctcaggcttattcgaattggctgtttcaattcgaggcttggtggactagggaccctcggagcacactggtggttgacatgcctggaattccttatctcatgcttgggtgcctgctagagtttttaagaaggttagagctactcgtctagtagttagcaaatggaatagagagcgatttggtaagctggatacttgtatccaacagttggaacaccaactgagggatattcagaaattacagactggatcgagagttggggccaaggaggtagggccctgaattagtctttaaggaggaaaacattata

SEQ ID NO: 11864 - DNA, 543 bp, Cannabis sativa
tatatatatatatgtatacataaacatatgtaactagtcaagatgtagagtctcttccacaggtggctatgtgcccaaccattcaatttacaataatctaaatttgtacatggtaccaaaaggttgaaagcttgaggggacaaaattatatctatttaatatctcataccccgccgtcccttgatatataattatatgtatatatatatattataattatgatgagattaggatagaacagttcaatttttttttttcaatttaataaaagcacttgttagcagactattttcatatatttatatctgagaatataatttgaattagaaagagcaggtcgaatagcacctagcttgctcaatgttgtttaaaatatattgaatatttctaaaacaggcctataaaaggtgtctagattgcaaagtcggttacatcttggtgtttacaaatttaaatttgctcaataaaactaatattttatagttgacttttgtaacttccgatattaggagttgacttgatccaattatggatgaagagacg

SEQ ID NO: 11865 - DNA, 573 bp, Cannabis sativa
atattttgggacaaattaaaatggcatgaaaaaagatttatttatagtgtatatataatttcccattatactttctaaataatatgagattattacaaaaaataaattaaataattatgttttcttagtacattaacacggtactcttaaaaaattataaaaatatgaagaaaaacttatagagagtcgcctacactcttgtgtgctttcctttatgttaatatataaaaattatgcgaaaaataatataaaattctcacaaaattaaaaaatatgatgaaaaatatattttatttttatataaaatagactagagaataaataatattttaaaaaaattataactaattaaatgaataaactaatttagtcaattagtaaggagaaaaatacatattttgggataaattaaaaaaaattataattaattaattcaataagactaatttaatcaattagtcatgaaagaaaatacatattttgcgataaattaaaatgctatgagaaaaaaatttatttataatgtatatgtaaacaatgtgcatgtgggatcattacaaaaagtaaacttaa

SEQ ID NO: 11866 - DNA, 628 bp, Cannabis sativa
ttttcaaaagaggcggctttgatgtggagcaataccattatatattaatatatgtgtgaataatatggttaactatagcttgagttgagtaagtaaagagaggaaatatttgtaggttaatatatattaatatactaggtatattattaacatgcattgcatgtttatttaaagttgtattaaaggtgttattatttaattgttaatttaaataataataacaataataacattaaatctcatataaatcaattatattttttaaatttatttataaaaaaattatatcaaactagttttattaaataataagtaaataaagttaaatattttaaataatataactaataaatttattataaattatgattaattaattagattaacgttaaattcaaatttaaattaagttccatacataaaaaaataattatttaattttgttatatttttaaattaaatttaaatatttaatttttaaaaaaataattaattgattaatttagtgttaattttaacggataaataaaaaaataccgtactatttttgttaaagagtcacgtaatataagagaaatgtctgttatatggtaacagtttgcacaaactaattactaaactgtttaac

SEQ ID NO: 11867 - DNA, 500 bp, Cannabis sativa
acatccactactttgaagtgaagactgatatgcaaagtgtgagaaacgaagtcaggtatagaatctttcctgctacactaacaggcctagcacaacggtggtaccttaagttctcttagattaatagactcgtggaaagatctagtggatgctttcggtaattagttttctccttcccggctgtgctagatggagtccaatgatttggtgaacattaagtaataggaaaacgagcctcttaaggactatatccaaccgtttttaaaggcagccgctaagaccaaaagtcttagcgaggatgcaagggttatgtcactcgcagccaagcttcaggggatgagtcctctattgttagaccttcatctcaaggcagtatacactaggattaacttcttagagagagtagacaactttatcaaacttgaaaaagccaccacccgagctaacaactcaaagggtggcaagaagaaggcactagacactgaagcccctgctattga

SEQ ID NO: 11868 - DNA, 1123 bp, Cannabis sativa
atttaactacccgaactctgaggagtgaaaaatataactaaattaactaacttccaacaaacttggaaccggttaaaaataacttgtttatttgtttggattaccaaaacctacaacctagtattaagaaattctcacattctacaaactttaatatatgtttacgttctagctatctatatttctatttaagtcggtaaaaaaaaaatactccaatcatgagagaagaagaaacaaataaaattaagaaaagttaagtagtaagttgaattatcaaattaagagaaatagtatagggtatataaatatatatttttaaatatcttaattttaaaaaaaaacgtaaatgatcattttttggataattgttttgaattgcatgcagctatgtgtaatctctttttaatatttataaatatttttgttaattaataaataatgaattaattaatataaaattaaaaaattataaaaaaaaataagaaaattaaggagaaaacaaataattaataattaatgaatcaattaataaaattaaaaattataaaaatagaagaattaaggagagaacaaataatactaaatagagagaatgacttcatatattaatttttaatttgggggaattacttcatattttaaatatccttatatacattagtatttatatataagaaaagataattttaaaatacaaaagtttatgtcatactgccaacgttggaaaatcaattgcaagttaagtgaaaattacattttcattgggttttctttgtcaggcaaactaaagtccaccactttcacttagtcagcactaaaatattaaaaacgtaaccaaacacggtaaattttcagattctcattcccacttctcccaatacagcatactaaacattccctgtcacatcaccatctcatatctcttctttatatgtatatatataaattatagtattaattaaattttatgtgatgggattttccatgggtggtcaggccatatggggttgcctcaagtatattcccaataggtatggcagtgccagttataaaataaattgttgtcctgttttaaattggtgatgttttaactctaatcttctggcattcttttatcttgttc

SEQ ID NO: 11869 - DNA, 568 bp, Cannabis sativa
aatagatgttcattcattagcaatctaacaccgtagaatctcaatagataaatattattgcaaatcttttattcttagtaacgatcaccctaatagtgactgctaagagtaggatttacaaaatataaaataatggtagaagttaataaaataagaatgaccttgactctcgcttaaacaggacaacattagattcttattttgatcaaataaaaggttgctaaaatggtgtccattttaggtaagctgactactctattcaacaaatgatatctttgactctcacctaaacgggacactgtatatcgatatgttgaaaaaccttagaaaataatttaaatatgttttattttttgtattttcgtaagcatatcttcaatacttgttattttctgaatatgtgtatgaatttatattgaaacaagtaattggtttatgtttattgatatttgtggctgtcaaaatgttgtttgacaatcctcaccccaatcctctcttacttaacgcatttgcaaatgaactcgaaagtgcgaaaatgactcctggtcagagtatcacttctcactta

SEQ ID NO: 11870 - DNA, 574 bp, Cannabis sativa
atacatcaatcactcgtaagtagcgtttttattattttcttattttatagctctaacaaataataataataataataataataataattttttctttgaaaacgacaaaatagcatggcttgttcatgaagctgtatgacatagaacagactttgcaaaagctggtggcttaggtttctcgaacattttaattagattggaattagaagcattgatcaaatatgtttggttaattgcaacaacaaaaaaaaaaaaagataatatatggatcaaatggatacacaatgtatacattaagcgaaaaaattggtggggatataaggtccctattcaaagaaagtattggaggaaggtagttgaaactaaagagagagtcaagcttttgtttgatcttgtgcaaattaatataaaatatcttctagttataaattggttgcgagcaattcaactagagtaaagaaatttgatgcagacttaatagaaaaatctaaagaaatcaggttcaaaaaagtgtttaattatcaggtgttgttgcaattttggtctactagatttggcaatcaaggaatgatag

SEQ ID NO: 11871 - DNA, 653 bp, Cannabis sativa
ttttcatataataattttaaaataaattatactaaaaagtactaacgcttataattaagtgctaacttttgtgatattgagtagtaatgctcgttctcgcaaggatccagtggtagtgaagtattgagtacacagctcaaccttttgttttaatttaatggttttcttttcttttggttttgctaatcaagcaagtacttatatcatgattcgttgtctaatatatacccaaagtttagttatatgatttatcttttcaaaaaatctaataaaagtgagtggtgcccatgttatcctttcttttgtctaaaaaaaaaaatggaaagaatatgtagtccatccatgttatttaaaatcctgaccatactactactagtgtactaaccctatggaattatatatttgtattttgtacaattctaattctaccataagaaaatatatatatataggatactcttacaccagacacttgtcatcaatttgaaacgcatgttacatgttcctcatttctgggcctaagattcagatgggattccttctcagaccaatcaaaattaaattaactagtcatactagttagtacacaccacacacaaatttacactgcaatttcagcaaccacaacataatacttataactagtagttatt

SEQ ID NO: 11872 - DNA, 662 bp, Cannabis sativa
atatatatatacacatctagtcattcttttgacattagcttaataatgtcatattttatattcaatcctttcctggaataaggcagtttcaataaatatataatatatcacaatatattttaccaggaaatatatatatatatagttaatagtatcgagaatctttcgattgtaccataaaagtaacccatttgtttcaatgaacccacataagatttagaattgaagacaaaactgaacaaaacccttttttccgttagatttcaggtcaataattacaatttttttaatataataaaaagttgattgcagattatttaaatgaagaaagatgtaataataattaggattaaagaccgtcttatgcagctgatgtaaacaactaattaattaactatctagtaattaaaaaaatggatatacaattaagtatataccacagtatataatcaatcaaactcgatgacaaaattaacaacgtgtatatcggtgccatcgtaaaatccatcgtccaaaattaattacaatgtttatatataattttgacattgttgagcaaaagcaaataatggtttcgacgtacggtatgctacatacttcataattattattccttataaacggcatctagtatatagcttatatacacaatatatatatat

SEQ ID NO: 11873 - DNA, 611 bp, Cannabis sativa
aagtaacattattatattacatacgaacaaatttattgcaacgaaaagagaaacaaaagtaaagatttaacagctagaaagtcagaaaataactagaagatgccatataaagacaactgcgtacaactacttctaaatctagattcattataaactgtggacattcatgatcattgtcaaagtattgaatattgatatcattgtcgttagagtctggtagaataccagaaacaacagctagttttgcctgacaacataaatgaaactttacccctaccctcccacaccaaatgccccccctcctccactttcctcttctcaccaccacaaaataataataataataacaataatataataaaggaaagacaagacagagacaccaagaaatagaaagagagaagaaaattgttaagaaaagcgtggtgacctatccgaaattcaaatacaaaaaatgacatccacctaatgttcatgcatatgttgctttttactatttgcacaagtatggtactctcaaacatttaccaagatcaaactaattcataatggttacatcaagcacgtttttctcctcttaacatctaaaattctgccaagcgtttggtaag

SEQ ID NO: 11874 - DNA, 510 bp, Cannabis sativa
tcaataacagggcaaagtctccttacacatcatgtcaactatgaagggttctgaagcagttaagcaaaactgtcaagcaacaagcaaaaggggttaagcaacccgtcaagaccctaaacaaccatgtctggctggccaaggggagtacataggccgaccaaaagaagcttgtatggtcagccagggtttgaacataggctggcaggccaaagaaattgtcagaccaaaaacggcctgttcgaccaaggaagcccgacctttgtaaggaaagttgtacaaagaagctagaaaggctggctacaatttactaaggctggccaacacatactaaagctggccagcacatactaaggctggccagcacatactaaggttgacgagcacatactaaggttgaccaacacatactaaggttggccagcacataccaaggctggcaggcgcttaccaaggctggcagacacataccaaggttggtaggcacacaccaaggctggcaggcacttacca

SEQ ID NO: 11875 - DNA, 568 bp, Cannabis sativa
aaatgggaaatgccaagtttgacaacaaaaagtttactggaaaaaatgactttggattgtggcgtgtcaagatgagggctttgcttgttcaatagggtctacaagcttctcttcttggagaaagaaatctaccagagggattagctccaaaagagtagacagacattcttcaaaaggctcatagtgctctcatattaagtcttggagacaaagttcttagagaagtgtcaaaagaagattcaacagatggagtatagttgaaactagagagtttgtacatgacaaagttggctaacaggttatttttgaagcagaaattgtattcttttaagatgacattagggaagaacattgaacatcttcttgatgatttccataaggtgatactcgatctgaaaaatataaggatcacaatcgaggatgaagatcaagcaatcatagtactgaattctcttccggcagagagttatgagtattttgtggataccatgatgtatggtaaggattcactgacattagaggaagttcagaatgccttaatgtgaaaggaattgaagagaaagataga

SEQ ID NO: 11876 - DNA, 1089 bp, Cannabis sativa
tgcaggcacagttggatgaactaaaaaatatgttccaaggccttgccggtcagaagattaatgacctcgaggttgaccgagcacgtggatcccctttttccccagatatcaatgtcctagagttgcctcacaagtttaagatgtcgacctggagaatgtatattgtgaaggaagatccgttatcacatcataagtattttgaaatgcaaatggccctacaaggagtcaaggagatgtatgttgcagtgtttttcttgccagccgcagaagcgcccaacagtggtatttcaagttaacacacgaaacgtttaactcttggaaggttttcttctcaaaattccatgcacaattctcttcttctgaccaactcccgttgcatttagaagacttggttgaagtgaagcaaaggccaggagaacctcttcgagcttacatcagcagattcatgacgaaggcaacaaaggttgtgcggtagactaaagaagggaagttgaccgcgatactggggggcatcgatgttctaagagaacttttgggggaagaggatatcaaaagagagatggactagtagattctatgagtgacttccttgatcgttcagatggcttcatcaagcttaaagaggtcattcaacgagcagaagtggagcttaaacctggccagccaaaagcttcctctgctagaacatccatccagctccctcagtacccaagcaattcaacctcgagcggtaaacagtccaacaacaataacaacaggcaaggtaataggaaaaaggggaagtttgctggcaaaaccgaacaggcccctagggaaaatcctactaagtttacttctctctttgtcttgacagaagatttagagactatctacatggctactcagtcattagctccgtgcaagataaccgctcccatgaaaaggacgtaagtaagagagacatgactaagttttgccattttcatggagattatggccatgataccaacgaattgaacaatctaaagcgggaaattgaatttttgataagaaagaataacccgcacgtgtaaaaatatgttaagattgatcaaaatcagagggtcgccc

SEQ ID NO: 11877 - DNA, 529 bp, Cannabis sativa
ctggtaaaattaattccaacatatgtgtgggcgcatacttcagtaaatttagttaatttggaaaaaaaaaaacaaatcaatgagatcagataaaatgaaaactctcgaggaagaaaatagttttagttaaagaaattaatttgaccataaagtatagaatctccaaagaaataaaaatcaattaaacataattggtataattaatccgcgatgacaaagtcttgtaatcacaatataaaaagactgaaaacaaaataaaaataaaacatgaatctaaaaagtatagacttaaaaagtctaatatcagatgatggtctaaaattaaattatcgtaaattttttttgcacccaagccaagttaagcctgcataagacaatagtttgattcaatcaaaataaacttcataaatgaaacctaatatgttaacgaactcaataataaaaatacacacataaatatataagagagttctagtttttttttttttttacaaaactattttttgcatcaatagtatatatttattta

SEQ ID NO: 11878 - DNA, 765 bp, Cannabis sativa
cctgggtcccggtccgggtctgagtgtcggtcctggtcccggtctcggtctaggtccgagtctggggtcggggtcctggactaggtccgagtctgagtcctggtcctgatccgggttcaggttcaaatccgggatccaaaacgcgggtctcgatcccaagacctgatcccgggacttgggacccgatcttgggtccgggtccaagtcccgatcccggtctgggtctgagttcgggtcctgggtcctggtcccggtccgagtaacggtccgggtcccggtctgggtttgggtctgggtcccgggtccttggttcgggtccaggtcccaaaggatctgtgtcttgggtccgagtcttgaattaagtttttttttttaaaaaaaaaataaattaaaatcgggtcggatcagatccgatcctaaaaaaaattagacgaggcagaacgaatctgatctaagatccaataagtgtccgaatgtttcagatcggagctccaacccgctccaacttaatggatctttttgatatacctatttaattattagatcagacaatcatgtttgggccatactagctacttgtttacgttctttacgagtcttatcctcggtccagtgttgtaaattcgtgcgtggctcgtccatgttataccatgttttatatatatataagtcgtatcgtgtcgtgctataaaaaatatgagtcgtgctaacattttgaaaggataagcccagcatggcttataggctgaatatttttgtatcgtg

SEQ ID NO: 11879 - DNA, 1427 bp, Cannabis sativa
ttttttgatttggatgtgttcatggtggtttgtttgtgcgagtttgatgattgattgtgttattacaaaattttttatgaaaaataatttgattttcgacttggaattattttatttggaaagttggttaaaaaataagcaaattaaccttttacgaaattgaatttgtttcaaattgaaaaagatataattctttgaagatttgaaatttggctagggtttaaactctacatgcgcgcgcgcatatctacctaatgctcagtgaacatgccattcagacaaggcatgtccaagaaatgccccccatgcaccctgccagcagcctctttcctcagccatgacccaccctttgtgcgcgcggagagtatactactcaattttgccattttcttaatttttcaagttttgaaaatcattttaatgaagtaaaattcaaattttggtagttttatgtaaattcttattttcaaactttaaacctaattaacatattaaaattaatttttattaatgttattattaattaaaattaattttagatattaagatgttaacgcagattttcgttaactatatttaagcctaaatcgtgatagattggcacagaaaataaaagcagtaaagaaaaaataagaacacaaggattttttacgtggttttgcagttaaaattttgcatagtccacgagtcaatcttattagatttctgatacaattctagagctttttctctagtgaattttttgtctcctttttagtgtaacctgctcctatttatagttacataggaaggcagttaactacaaattgaactgatatcttacaacaataatcccctgaaattgtgggatttaatgacatcccacgtaaaataaatgcgattattatttgaaaatcacacagttgtgattggtccgcctttaccgggtcaatgcaaacgtgtattaaatacattgtaaagcgtattgttcagggacatctcgctgggaacatagcgacaataaccctggtagcgagctagagcttttcccatatcttttcgaggttgataatgcaaatctcgtcgtttatgctattgaagacataacgctccatctgacagtcacagttcttggtgacaaggtgaacttcagcagtcaacaacatttgaatgtcagcttctatttgagagagctaactcgacggagctgtggatctcattgaaagatgtctggagctgattagtgaaggtaccatgagtgtgccttcctatagcaagatggatacctcgctattcgctgtttggattcgttcgactgttatacttagtttgtataatgtatattatacgctaagtatcttaacagtcatcatgtctcatctatgtctcttcatgcgtagcgaggttgatatctcgccttacattactgatgtcatatggtttctcgt

SEQ ID NO: 11880 - DNA, 873 bp, Cannabis sativa
agtacaaaatgcatatcctttgtgcagcatctctcttctgatattaatgctctagaagtgacagttaccaaatcggtttggcttagtttcctgatgaagtttctatttaaagccaaaccgaaatggtactcttgcactctcagttcaaactttccccgtaggtaccattcagtttcccatttcgtttttatcatcattaatacgcagcatccatgtcccaaacgccttaaaaacctggttcatcctcactgttctgtcaccccgtgcacacaccactctcagttacattttatcaattactgttctccctgtctgctgtttttatggtattatccaatttctgttatcttcacttcccacctcttcaggcttagttacgcccgtagtgcttcatccctttctcaaaacaatcatactccctctgaaaaactagtgtcgaatagtaattgtttcctttggtcttccgtgttttctcttaatcaatatcactttgtctacattttctacaagagtctttattacaaatatcacacactctctgctgtttacgtccaagtgcaaactgaaaagatattagctttgttttatctgtggtgtagatttactaggacttgtactgttgttctttccccactttttttgtcatctttgttttctctgcattatcagtgtaaacaaccagtccatttaatggatgacttaacaaactccctttccattgcccttaatctcacagacaccgagtgtaccattcaaacactccatgatccctcccctctcaatgttcctgagaatgaggtccagcccgttcccctctacctggttatcaaagtgcatacggttaaatcctttaaccgtaggaatttcatggag

SEQ ID NO: 11881 - DNA, 669 bp, Cannabis sativa
gatgaaaatagataagtatttacaccagagaattttacatgactatttatataaaatttcatattttttttttctatttattttgcaggtgttttactagtagttcagaagtgacaacagttttgaggttttcttttctgatattatggttttattgtttagttctcctagaatatctctgcgtgcccttaggataaacaataaactgttatagatggaagaaaattctccgctaattacgtaactttgttatctttgttattttaatctgtatcggtttcccttaaaaaaaaaattatttataactgtcatattttcacaaaatgaattttgtaaaacttttgacaaatccaacatacatataatttcttgttggatttgcaaacttggagtgattctttaagctctatattttttagaattggtcttataatttcttcactttgtaactttgattgatatcacgctgttacagattcatactcatagattttgtaacatatggttaatacttatatggattaagcccgtgattaatttaagtaggtaggcagatgatgatggaaaccatttgtaaagatttaaaacacaaaagaaatatgataacagtcatggagattacaacaaaaatgcatagacaccaaaaaaccaaaccaaaccaagttgtgt

SEQ ID NO: 11882 - DNA, 510 bp, Cannabis sativa
tgaagtaaattgttaaaataattttgcttttcctaatatatgccaaatatatacattagtttgaagagattaccgttaggcaaattagagcttttttgtagcagagaagcagacactttctttctgtagtagaggaaaacagttacacatttttatataataaaaaaaataatgtttagttataatagtggaaacaacttagtacgtgtatagcaacactttttttctaatctaatatttaaaagtgctttaatttttattataatttaaaattacgattcatttttataatttagtgaataaaagacaaacaaaaatcagactttaatccatgataattataaaacaaaattaattatcaagatcactaatcagtaacaagctaaccaagaaaatatcaacaaaatcaatggtttgattttacaaaattatgacgaaatgagtgtaaagaattgatttttctcgagaaacaaacagacccagatgagaaaattaacaaacctttaatgg

SEQ ID NO: 11883 - DNA, 745 bp, Cannabis sativa
tgtatttatatacaatgttgttcacatcgaagtttaaaattgtcagtaatatgaacataacatattaatgataatataaatattcatttatgataatgatagtactccaaaaccatatatttgttctattcttgttgtataatcataattttcatagcaaataatcatatatctataattcttacatatgaagtacttcaagacttctctacttatgaataaactatatacatttaatatctctcaataaacaaaaaaattgttcttcaatcatttataatataataaaaaacttttcaagagtctattacaacatataatttacgaatttatattgcatagacaatcatatatgttttctaaataacaataatttatttacatatttttatttcatacaaagatctttatcatcacatgtgaacctacatgtaattaggggcgattgccccaggtgactttttaacttcctatctaattatttattaaaaattaaataataaatacaatcaacacacaatatatatgtaccccctatttggtgtacttttacaataaaataaaggataaatacctatttggtacgctgtgttttatagttatacatacttgataccttctattttaaataatgattaattaataccttttatttacaaaaactatctactttggtacctttcagcatttaaatttttaagtatttctatattacccctagttatatgtttttgttatttttaat

SEQ ID NO: 11884 - DNA, 520 bp, Cannabis sativa
atatttttattttaatattatcaaaccacatattcaaattaaattttttcttatatactttttttttcacatttaataaaatataatttaaaaatactataaattatttttatcaaatgtatatatatttacactttgaaaaaaataataaaaaatatataaaaaataaaaatattatatgaaataaatttttatatatttgtgattacaatgaattagattatacattaacgttatttttataatagatcttaacaactcatagtattttaaaatttataatttactaaatacttagtttatcacagcacaactacaattattttttcccataacacagttatgccaaactgaccttaaaagctttaagacttcacctcgaaaatgacttgagagctctaataaataaggataacccaaataggtgtctgctacctaaaaatcaagtcatattgtaacaaataaaatcgatgtctcaacaattagaaaccaattgttagacataaaaaaaaaaaaaaaa

SEQ ID NO: 11885 - DNA, 651 bp, Cannabis sativa
caaaaaaacaaaaatgagaaattgagtcccaataaaatcattatggaaaagtgggaagagcaacatgggaaagtacagccgttagcacaatttcccacaaaatatgctttgaaattgccataatgaagattgacatttattggtctgtttaagagactgaagtgtgaccattcacttttgcacggtactgtaattatggaattgaattatttatgatttgtatatattgtggagatttatttaagctcaatatgtactaattatgttatttatatgaatttctcgtttttccgtatttgtgttcgagagcggtggaacccgacgttgggccattagagagtcacatgttatatggtttagaatgtttatagcggggcatcattgttagacattagaaatatcgagaagtgtcgggatttggaaatgagaaattgcccttttgtgtaagtaagctattgtatttttgctaagggtaaaatagtcattaccctagaaactcctattttgtcttttatggtttcaattatcagattttaaggttttatattaagttaatattagtaaaagggggtggtttttagaaaattagaaaataacctggaaaatccatttacctcacccattctctctctctctctctctctctctctc

SEQ ID NO: 11886 - DNA, 694 bp, Cannabis sativa
ggctagcatggcctggttatgggatataagagacctaaagcctaaaccgccaaagaatttggaggagcagagagaacgccaatttttccaatgaattttagatcctttccccatagaaccccaccaaaattgagccatgagtctttcaattgtgtggcaaattgaggccgggagtttgaaacacgacatggtgtaagagggaatagcctgaataacagcttttaagagcacttccttaccagccttagagaacaacttgctattccagttggaaagctgcgaactaactttctgcaggatgaagtcgaagttcgatttctttgagcgcccaaagcattggggaactcctagatacttgctgatgaaaggtcttggctcaagacctaaggtattaaagaagtaggtggaaatattcgaaggagtattgggcgaaaagaggatggaggatttggagtagttcaccttttggccagtggctaagtgataagttgtaagggctgtcttgagagcattacaagaagagggagaggcaaccgtaaatagaagagtgtcatcggcaaacaaaaggtgagagataggaggagcattgcgagctacagaaatgcctttaaaggatccgcttaattcctggagtcgaagggcagctgtgaggccttcagaacagaggagaaagagatatggcgataaggggtcc

SEQ ID NO: 11887 - DNA, 520 bp, Cannabis sativa
  modified_base (348)..(354): a, c, t, g, unknown or other
tgagtcttcgctttctaaaaaaaattcaaatagaattttgggacgaaattcctttttaggagggaataattgtaatatcttctttcttgggtaattaattttctttatacttttagtttattttggttactaatagggataatttatcatttcaaatatctattattttaatcattattattattttattttgagggtatgtataatgctagataaagaattaaattattgaagataaattaatatttaattatttttgagtattattataagtataataataataataataataataataatataggtaaatatattacagcatttgtttattattattattattannnnnnntgttgttgttgttattattattatcagtaatattattattattattatattagtaaattagtcaactaatatatatatatacggtacatgtttatatatatatatatttttaaattttaagttgttgatgtagcattatattagggttaggacttaagatgtttat

SEQ ID NO: 11888 - DNA, 930 bp, Cannabis sativa
ccagtttgcccagatagccagattggtccaattcacttaagcatgccacagtgaccttggatggagggctcactcacctggcacctaaggcaccttgcctcctgtgaggaactgcaacagtaagctcctcgatgacgtagtccactctttcaaccaagacatcgtcgtccgcatctactggctccccagcctcgttgtatcccccaaaatttaaaggtgaagcctcctcctcttcctctgcctcggaagggttgccaggacagacatcgtcatgttcctctatctcctggacttcagcgtccccctcatgatccccctcctcctggacaggcagatcctgttcggcgctgggtaaagtggtgtgctgggccacatgagggtcggacgcattgaccttacgcatcatttgctttgttcgagccatcatcctatggctggacggaaaattagaagtggagagcccttcacttgaagaggacggactcgcacgaagacgaggataatcctcgtacaggagttgaagaaaatcctggtcaattcggtgttcgcttccccaaaactcacgagggttcatctacaaaagacaacacgcgagatgagtgtttggtcaggatatcaaataataaacaggcaaatatgctgaccatgagtactgaacagattaaaagagtgaaagtgttcaaaaataagtcaaatcccagaagtttgaaggttttgggtttagggccaagtttcacgaagctttggataagcaaggtgaaaggcagacaatgtgcgataaaaggctaaacgtcatcaatcatgaagcttcatagatcattagaaagaaaatcgcaaagttttaaacctagattttctacttatcctctacagcaaattcaagaacgcatgtatggaaccccaaaattaagcatatatgccaagctgtcc

SEQ ID NO: 11889 - DNA, 706 bp, Cannabis sativa
gccatctcagcaggcacgacgaatttggccaccacagctggctaggttagcaaaaccattccggtggatttgaacaatttgtccctcctagagaagaccctccactggcacctcccactgaaagaaaaatccacgtggagcagcccccaggaatcacaactggacctcgtccctggtattgtgctgtagagacggggccaagaattggtgagccccatgtagacttgagagtagatcttgagttagctagacttagagtggtcgctcccaagtcagccaaactaaagaaccacgcgttattggttgcgatgtatttgcacaacagagacgcaaatttctgagatagatgtatgaccaagagtacatcctccgatctcaccaagcggagattgaccctcgcaatagagaaactagcgacctgataaggtggttcaatgaaagaactactgggagaggccaagatctcatcaaacatcctctctaagggagactagttgacagatcaaggagggtttaccgacaaactatccaacgaggttctttaagaaccatgacaaaccaggccttcccctattcgaaggaggacaagccttagcataaaggttaggtggtgagaacaaccaaatcccgacaaccaatggtctggggggccggccagggatctcaagctctacaatgccctcacttggacaacctctagccagct

SEQ ID NO: 11890 - DNA, 595 bp, Cannabis sativa
tattgaaacggagaacatttaaaagagtactaccaataagcctatttgtgagaaaaactactcttaagtagtagtttctgagcggtatatcatacaagaatttgaaaacttatgatacatcactcttaggtgatggcttctgatctatatgccatgcagaagtgattagctcttatgttataaaagcaatctttagacatttaagattttattttaatatatatgtatgttgcccaacaacaacacattgcaagaccaatgaatgatttttttacttagattgtgtcaaataactcgctaataattgacttattaaagttgatattatgtctaacatgcatgcaagaaaccggaaagacaaagaaaaaaaatcttgtgtaattgtaaatgaccaagagaccataagtctgcttgatcacttgggggcacctacacccgcacagcataagacaagcacagtgaaaatacttaagcaaaaaatttttatcaaagttaatgcaaaaaattgaaagcttagtatgtgcaaaagtggctttattaaacataaagggaaataagactgggattaaaggttgcccgaccagctatatgtctt

SEQ ID NO: 11891 - DNA, 591 bp, Cannabis sativa
cacgtgtcatcttattaatgccacgtcactcgataagttttgagaaaacaccttcgccttctgggccaaacaacatttccaggactaaagcgatctggcctcatcgcgtctttaagcttgatatacatacatgtttagagtcgtagcttgactttgtaattaagttgacttgcaaacttgattaggcccaagaatgggcttgctttgattgatattgggcttttaaaattgcaagcgccatttatctggaaacatagacaacactaatgttagaccatctcaagtggatggtgtaaatttttttgttaaattaggctcaataaatgagtcaatgatatatttggcctaaattttaaaatggtgctccaatgcactaggggtaaagtaaactttatttttatagaaagttgtaaaaaagtcaaaaaaatattaattttttattgaaagtacataaaaatctttttaaacaaataagaatataaaaatttataattgtattaatgagtggcaaaaaagtaaataaaaaaaataatatttattgtgacgtaaaattttgacctatattatattttatgtcaaaatttgacacaa

SEQ ID NO: 11892 - DNA, 508 bp, Cannabis sativa
attggtccatgatgttcatgtttgctaatcaaccacagaaaaatgtatgttattgccagagagtgaaaataaactacaatacaaatgacaaaactgaaaactttccttagttaaatctgcctcaatcatttaccacatataattacacaaattattaattcatttatgaactcaatagggaatgacagtctggcaccctagctttttagaagctataaggggaaaaaaagaagaagtgcaatgcagcattaatggttatataatttgatcatgtgttaatagtattatggagccagaaatttttatattttacagtgtagcacttttgcttacaacttttttaataaattattatgaataatgtgttttatatataactttttcagaacatagattcatcaagtaattattcttatataataacgtatacttcaagtgtacaaaaataaatgttgttttatcatttataatttcatgtatttccattttcttctttattggctatata

SEQ ID NO: 11893 - DNA, 558 bp, Cannabis sativa
gaatctcgtctagagaaatagagacttagaaaaacacaatcgcatacccttaggggtagtctcggaggagtagttaaagaggtgttcgggtgcagtcctacattgcatttctctaacaccaaatcccaaagaatcaagggtttgtcccatgtgtcagacttgagaaaggcacacaacacaaaaagtaacataccttttatccaatatccactactctgacatttattgtacacgattagtggtgcatggccacctgtcaacatcaaacagtactatgttatcctgacgatggttacccctctattgggcctcacctacccgactcaaagtcaatattataatgtatttcacctcatcaatggatttatttcatacaaaacaaaaatactaactcgtggactaagactgtttaacgcttgaacccatacctgaattggacccctaaccccaaactccggacccagacccgacccagagtcggtgttgggatcgagtttattaaaaatacagtataactttacacatccttttaaaacaagacaataccaaacataatat

SEQ ID NO: 11894 - DNA, 748 bp, Cannabis sativa
ctgttgtcgcacaaatagccgcaataatcttatgaagtagactgcgatctcgattagcattcaatcacaaaagccaattcggataagactttggccaaatagcattgccaagtcaagaatagatagtgtgcatgagatgcttagaaaaagaacaataaaaaaaaaagatgtttatgatagtcagcgccaacttcacaatctaggcaggtagtagaattcatggtaatttcttgttgacctcgcttctagccaatgatattgagtcaaaataaagcgattagataaaataaatagtagaaaacaaaaacagtaaataaagagagcaccaaaatttctagaggttcagccctgtgagaatggtaatagcctactcccattttaaagaataaaatattctttctctagctcttacaatatatctccgagtaactctctattagatcgctctttctctcttgagtgttctttctgaatcaattttgtgcccctgaatagtgagattaaaccactatttatatgggcttattacatgaagaatgatttcccttaatctataataaataaaatagggaactaatttaattctacaattacaatgcaaagaatgagaaacctaggcttattgtctttattctctgaactaatcccatgaatttagggattatcttcgtgtcttggaagcgatgatatccatctctaaaatttctaactcacatatcatgtgtggtgcatgtgagttgatcacacg

SEQ ID NO: 11895 - DNA, 563 bp, Cannabis sativa
taattactaattagtgtgacatttttgtttgaactttgttagatatatataaggtgagaattttagggacaaacaataaccaccgaagtgataaagattcttcatcatcaattaaaattttatatttgaatacatcacttataagattgttaatgtctaaggagaaaaaataattaatgaggttacccaatataagtaagagtcttttctaattctaatgatgatcaatattacaaatatttatttccattttttatacatccatcatgttctatttaatgtgccaaatcattaaactagttttatacatatagatatttttcgataataaaatttttatattttcaattcactaataataatttataacttgtggagagggtaatcaaatttgaagggggaaccagaaaacactcactcacaacaactctcgtatattatttctttaaagaagatattgttttcaaaattatgagtagttgacttaattttatcaattaagtccctatattttaatatttttttagcaattatttgcttttctttttactaataatgaatat

SEQ ID NO: 11896 - DNA, 790 bp, Cannabis sativa
tagtgagtccattatagtaaattacacaacttaggactgtcttagtaagtgtacttaatacagtacttggtcattgatagaccttgtacattatgttttacctggaaggtacccttggatattgttgccttgaatgtatttgtattgtcaggttgctcacctccctttatttcttccatacaggtagtactgggtgttgaataagggatgtgacagctgtgtaggtccgtcgtttaccttgtatttatagccaacatgaagcagactggtggcagaataacccggtgcgacccccatgcgatcaggttggctagatggggtcaaattgaggtagtagaaggggttacctagccttgcattgacgttagctctgggactaaccatgggaatgagagtctcgatgctaggtttaatcacgaggaagctgtatcgattaggaggaagagacataggccctgtgtcgtcctttccaatcgtcttctaggtcactatgataccgatagtaatccactgaataggctcggggagccttcgacacttagcttagatcatgtctcagatcaatcctttgagcatgagtttcttgatgtgagttcacaaggaaataggtggatttcccctgtatcttctctctcgaaagacaattttaagagaatgccgactaatgggctagtgtgttgtatcaattgtaagatagctccgtcggatcaactagcgcatagattggctctcaactggatggcatggttagagtaccacattgagtaaagagtcgtactacctcttcatg

SEQ ID NO: 11897 - DNA, 775 bp, Cannabis sativa
ttatttttgtataattaaataataccactacgggtacgggtgggcatccgattcaatctaatctttttttcctcatctgatccaattcaattagtaattggatttgaaaaatcatcaatatccgatccaatccaattagtgatccaatccaattactaattggattgaatcgattttctaattggatattcaattatacacttaaatttcaatattaacttcaaatatgaagaaaaatacataaaaactaaatatcattttttatttaagtttaatacttcataaacatactattcttacaagtgtaatgtagccaaaaattttaaataattaaaacaacaacattttaagtaataaaataaaacaaaatatcatgaaaataagtacataacaatcaagtgttacaaattcaacataaaaaaactaataaaaatataataaatatatatgtaaatatattatatttttcaatattatttattataatatataattttttaatatatataaatgtaatgggattattggatcagtttttaattgaattttgagattgacatccaataaccgatctaatccaattagaatctaatttttagcatccaatctcatccaatccaatccaattataattggatatccaactttttataattgaattgaattggatcggttcggtttaattggattggatgatgccacccttaaataccacttaatgtacgattataaatattagccatatttgtagaagttatgtgtaaaaattaattaa

SEQ ID NO: 11898 - DNA, 538 bp, Cannabis sativa
caaggaggtatgagaagtgggggtattgcacctgtaaggtttgaggacccaaccaagggtacgctgtagtcacaactcttggaagctttgaaagcaaggaggtatgagtagtggaggcactgtatctgccaggtctgaggacccgaccaagggtatgttacaatcataacttctgcaacgtgggaccacctgaccagacaaaggtacaaggcgcaataccacctcatgcacctgtggtttgtagccagaaagtgacagcttgtctatttgggaccactatgtaactcatgcttttagagcctatagataccccattctcaaatgtgagaggaggttataaatcctatggtggaagtggaactcatattgactacaatagaaagaaatttcttatccataaaaacttttatttcctttcatcttcattatcatcttgtttttgagttttacttaaattttccggccacaaagttcgttgacgagttctcactgtcaatatatgcctcaactatttaaaagatattcaactagtggttgt

SEQ ID NO: 11899 - DNA, 560 bp, Cannabis sativa
atgagggagaacgatagtttcattcgttgttttcatttatgtttactgtaacttataatatatatataaacgataaacttatcatatatatataaaagaatgtcataataataatataataatataatatcaataaaaacttgattattaatagttatattattattttttagctactaagaaacctctacgtctagggtgtttggccaacttcgagtaccctaaaataccctggtatttctaaaattaacttatctcaataattccatcaatagttttaactaaaacaatcgtgatatttttggcctccaattgggtctccagggtcgtcgaacctgaaaatatttttatttcacaaataactcatattatgtccacgtatttcaaattaatctccgtaattaaaaaattacgcttatatatccacttatcgagtctttagggtcgctggacctaaaaatatttatattccacatatagctcatattacattcacacatgctatataaatttccgtaatttataaattacccctattactcacttatagtaaaatttaa

SEQ ID NO: 11900 - DNA, 638 bp, Cannabis sativa
gattggagtatagaaattgaagttatatactattactattaagtaattatacattacactctaatttttagtctaatttttttttatgatcgcgtacattataattatttaagttattttacaaaattttgttacacacgtgaatcttttattatatacacgtgaaaaatagattgtttgaacattgttttctatattataaattatttcaaattttttaaaattttacaagatgtcttaaataactataacgtacacaactacgaaaaaaattagacaattttttttttagatgtaaaaatagataggagtgcatatgtgcacctattttaaaggggtacaaggtagaaacacctgtctataatgtcaaaaataaagttaatatatttattacacaaataattattttttatacacgtagtaattaattatttaaatttttgacactatatattattcaaatttttttaaaaatttacaaataatcttaaataaaaccaaaatacaccattattaaaaaaaaagaaaattaaaatacttttttttttctaaaatacataacaaagaataaaaatcaaaactttatattttcctattatcatgtttacagtatgtaacataaaaatcaaaactttgtc

SEQ ID NO: 11901 - DNA, 541 bp, Cannabis sativa
gtaaatataattctatattgtgaagagcgttattccatatttatagcgtagtaataatagaattaataaagtcgattattctatcaatgtgatcaatataatcaagtatttattggaactttaaagtataggtccatggtccccaagtcaactccatacaacattgcacaggaaaaaattttatttaatgaagaaatttgagatagaatatgttgaccttgcttttggccaacgacactaaatcttgaaagtgatataaaatcaattagattaaataataatatatttaatatcaagcataaactaagagcatgagattgtatagaggttcggtcctattatttggtaatagcttactcccattctaattgtatttcacttgtgagaagagaactaagaacaacttgatctctctcaaaatctttttacaggtatttgagtagcgtaacaactctcttgaagtttattgagggtgtatcttgttgagttgattaatgaagttttcttcttcttcaccaaaaaaaaattagaaatcatttta

SEQ ID NO: 11902 - DNA, 537 bp, Cannabis sativa
aagtttacaattccattgtaaacctatttttttttcatttgttttcttttctacgattgagaataacgaataaaaatttttaattccactcattattttttttctacgattgagaacatcctaatattcttaaacccaaaatcctaattttttttttcctacgattgaaaacattcaaattattttttggattgaaattcgaaaaatgtatttgggatttatgaaatcaatatttatgaaaacgtgtttgaaattcttctggcttcatcgtcgccgactcttggtccatcaagagcgagtacagtagcacgctcgatgacgaccagtgccatgccaaagccgccgaagccccttcaatcgggaacttccgcgcgctgcctttggttacaggtttttctttcattttatttttcggtttgactctagagaaaatgttgctatgaagatatcttaggaaacaactaggattattgaatacaagttagggttgcaaacatggatggggtgagttagaattatctattactttgttaatga

SEQ ID NO: 11903 - DNA, 615 bp, Cannabis sativa
atcattctcaactccaagataccttcaagaaaaaggacaagaagaatcaaaaggagatgtgcagatgagttactaggggtactgtggtcttactaaacaacaacaaagacctaaactagagagaccccacttgcattgacatatggactgaagcggtcatcccaacaaaattcaaaataccggcgatcagatacaaacacttgatcgatgatttaaattaataaagcatgaacacataacttcatttgttagacaaaaagagagaataaacccttataagagtagcatcatactaacaaaaggtggcccaacacttcaacaagaacatcagggtctaacaattcaaggaaagagaatagatactacaacgagtgttccaaaacactaaggaggaaagagcatgaaagttaagacccaattaggaagggccttacaagattacaaatatagttggaacactgtaaaccttatgaaataccatttttaatcacatgtacggcaaaaaaaagccctcccttgtacactctcattttccatagtggatttttgcatgctctgcttgtggttttttcctgaaagtacgggtgttcattaaaccgctcacatcgctcaaac

SEQ ID NO: 11904 - DNA, 679 bp, Cannabis sativa
agaggaaagcaaatgtgggaaaaagagtaaaaaagaaagctaccccagtggcagtattagtaaacgtagaagatggagcatgaaagtatctggggctcgtgagatccatggatgattttgtttgaagagagaacaactcaacccaaattttgtttgatgagtgagtatatatgtgttttaataattcctaagtgttaagagcatctgtagtctgataggaaagcgactagggaagcagttgagcagtaatgctaggctgaagaactgaaaaatgcaaagcaaactaaagcaaaagcattgactacttagaacgatggtccaaacactgttacttgtgttaacaaaaatcactcacgtgggaggcccagcaaaccagcagttccttcggtaaaattaataaaataaaaatgaaaacttcataacttgacacaacacatatacacaaaacgacaaaagtatacttaaaaataacattactatatcgcaccaagatacttttaacaattttctatcatttttattaaattaaaattagtaagacttgatattaaattatttcaatagtaatattacatattacaaatatattgagtaaaatgtgcaccctttagcatttttttttttttaaaaaaaaaagagtaagttaaggttggaaaacaaatatataataagaatttat

SEQ ID NO: 11905 - DNA, 555 bp, Cannabis sativa
ccaagcgccaaagaggaagaagaagacttcctctaactcacatctctgaacctgagagcttcacgggcaaagttgtgggcttccacattaaactgccgagggatgtactgcaaagaagcaccagggaagttcgagaagagcaaccgaatgcgcgaaactaagccggagagagccgagttgtcatgccaatctccattcacttttgagactaagttgagacagtctgaaaaaaccacttgaggagtaaactgggactcgaggcaccaatttaaaccttgaattagagcttggctttctgagaaaataggggagacaacaccaggcagcctgttgcaattagaggccaatacagaatgatgaccccgttttagaacaaaaccagcaccagtgaaatttctgaggtggtcagtggctgcatcgacaaaaagagcagttgcttcaggcggtaatggaggaggccttagctgatgagccaactgagagatgggagaaacttcagcaggctgactatcattttgttgggagagttgagcttctttgtattcctgtaaataa

SEQ ID NO: 11906 - DNA, 601 bp, Cannabis sativa
tgttatagacaatagtcaagcaaacaacgttgaacaatttttcctgcaagtttttgaggggtttggaaaaccaattgtaccagtctttggagctcttcggccaatctaatctccctaaccacttgctaacatcagccacaaccttcaaagtaaatggaaaatccatgaagatgtgagcatgagtctctttgtcatctaaacacactggacagagttcacctggaattggcatgatcttgctgatgtggtctcttgtcaagagctgattattaaacgcctgctagccaatgaatctatgtttcgggatgcacatcttatgccaaattcgattagcataatcaacttttttcatggggttagctgatatgtcaaatatgttggttttgaacttaccactcttactagcattgacaatatctgacctgtcaatagtgctcctcagccgcaaaagtttcttgaaatatcagctcgcatcaggtttaaattcaacctgccaaaaatctttcccttttaagtaaataacatttatccacctgacccacaagttatcttgtttgctcgagatggcccagaaaatttttgccatcaaggttgtattcca

SEQ ID NO: 11907 - DNA, 500 bp, Cannabis sativa
taagtggaatgtagcttaagccggcacagaccactaattataaatacaaaaatttggtaatccagataaggtctaaaaaacaaattaacaattttatcggcggcgtttaaagcagccactaatacaaaggtaactgactataattactcttttttgttaatgttttataataataattctttttgtaatggtaacgtacttacgtgtctaatacccaagaggcagtttcaatcctttaagacaaaacatttttaaaattaaatattaagtaaatttagtcaaccttgttttatagttacatatgtgcacaaaggtcaggtcagctatatcaagatcatcattattgacacattaattttgctttagcttttatgtagtgattacatataagatattgatcactttaaatgttcaaaactacgagtaagacgtcaatacgacaggtattaataaagaatatagagtaaataatacggccaatttttatatataatggttca

SEQ ID NO: 11908 - DNA, 737 bp, Cannabis sativa
ctttccctacacgacgctcttccgatctaatagcatggcaaattagttatattgggttgcactgatctttatattgggttgaataaaatgtaccataaactgcccaaatcgaccgacatacaccacaagtcataaatgagacaaatagacaatcataatagttttaaaaaaactttattcgataattacctttgtgtgctaccaccattttagaccaatttctctattgtttaccgaaaactgcagctgctgccgtctcctccatcgagagctggagcccaataatatgctccattgtcactctcagtgtgcatgaaacgggcaccaaacaaagacccttactctttagctctttctttgtcactctctttccttttcatgtaattatcattcaatagctgtaaatttaatagcaatagtgtcatgagaatgaacctaatagatgtagtgggagatcgaaaagaagttattttttttatatatatatataaaaagaaaattagagatttgagaggaagaagatgagtagttttccttctaattttctcagagtttgtgacataccacagttttacactctggtcatcaacacacacgagtctcatcccgcttggccgctccactcacttaggctcacatttttttaaaaaaaaaattgaaaaaataagcttataattttgggcctcttattattaatttaggttttaactttttataaagggttaatttcacaaatg

SEQ ID NO: 11909 - DNA, 2021 bp, Cannabis sativa
  modified_base (652)..(663): a, c, t, g, unknown or other
  modified_base (770)..(772): a, c, t, g, unknown or other
  modified_base (934)..(943): a, c, t, g, unknown or other
  modified_base (1217)..(1218): a, c, t, g, unknown or other
ttgtttttcaaaaggagaatgtccattcaatggtttgaataggacaaaactcaacgagtcaagcaaaaataaaattgcactaatctcacaaagatgatcaaacaaacggaaaaaccacactgattacaatataagagcacaaccatctaagaataatgatctcaaccaaggataaacaaacaaatgataggatcattaccctagaagcaaaccacaccacacaaacatttaaaaattaggaggcatcgctctagatctagtgacccttactatactaggtaaaacccaaacaaaactagcacaagtcatagttatagtggacagaatgataaaacaccattattaaaaaaaatagaaatagataaaacaaaccaaaatttaaaatactagaaaaatagataaaacaaaagataactacacaacaaccatatatccatgcataaaatgcgccccaaatcctctttaagaccttcctaatagtgtcaggtgtcttctttaaaaacacagacaatatttacctctaaggctttgttgggattttattacctaaataaaactgattttaatataatcagatttagtaattaataaaaaattagaaatcattttatattgtatggttcacaagattactttcatgattatatgtttnnnnnnnnnnnnctattaaatcctgaacatatagtttttcatgattatagtattgtttacacagtggaaaataatcatgattatatgctttaaagtctttagtctcatgatttatcagnnnactggatttacactaacgtgataattagcgacaaaatttacttacacaatgatatgttgaatgtcctttctagggctttaataaagtatactaatattgcatgtattgggtatacatcggactggaccgatattgataatggaaaagatatcataaacttannnnnnnnnntttctaagtcaatatcacttaggtgatcttagttcaatagattttaatcttagttctaatagttatttgtgttctttgacttgttcgttaaagctgaccaattggattgacccaatacttacatcttgggaacatggtaatgcaattgagtgggagcattaatcatagatactgaatctataacatctataactattagaagtgaaacgataatttctttcgagcttggcttaacatgataaatgatagagcgctcattttagtaattatattnntttactgaaatatcatttacaagtccctaagtgttttaaggataaaatacattgaagtgtagaacgataaatttgtccctactcgatatagatcatctataaatgatctttgattatttagattgaaacaatggataattcataacgtatctatatttggtattagagcgttctatgtaatcaagagtgcaatttcgaatctatagtggagtcaggagaaattaataatatagaaaatttacttggtaaattttggatctacttattgagagcttggttacataggtccatggtccccgaattaattgggataatattattttgtagtctcaattaattgattttaattaatcaattaaaattctgaataagactatgtcttggttgtacgttttcactaagcaagggcttatttgacaagaaaagaaattttaggatttgtttattaattaagagactttataagatctaattaataaataagttaaatggaaattttctttgataattaattataattattaaatagatagaattgatatttataaagataattaaaatatggcatttgagaaaaaaaaaatataaattttaataaaatggaaaaatttaaatcactaggcccaatagggttttgaccaaggatgattgataaagctatttttatctttttttttattccattttatttctaagcctaaccctaatagccatcatataaatagaatattatggctcttatttttagatgatgattagactccttttatcagacaaagtagaaaataaagagagccattatt

SEQ ID NO: 11910 - DNA, 612 bp, Cannabis sativa
tactgttgtagcttttttcgaatggaatgaggatcacattaaaaacatgtaactatatggactactgcatcttatatgatttattttgaaaaataacgttatgctacttttgtttttcttttattggtccataagttcaatcttgcatttgcaagtttgcgattgagatatttctatttacagtactattaacttctatttggtttggttgctttctaaaaaattaaacaatttttcgagttactaagattgttatgtgcatatactctttcttttttcgaatcgattcttacgaaattaatttatgtttaattggtcttgtttttacttgtagcttacaatggtaatcaaatgattatcaagctcaaagtcagtaaaataggtcatattcataacttcttaggtcattcggtgggttttattcaagtaatctttttgttggataaatctctatactaactgtcacatgggaaaatactttaaacaagttataaggaaaataaagtaatatttttttttacaagcctcaacagaccattataactcttggagtagtcagttctgtttcataggcttaaatcttttatatctctactatacaagaaaataaat

SEQ ID NO: 11911 - DNA, 541 bp, Cannabis sativa
tttatttaggctaattgtgtataaaattatgattttagaaaaaactattaaattaaattaaaaaatctagaataataatttgaaaatatcccatgaaaaaaaaagttgctcttgttttaataaacaacttccgttttaaaatatatatgtatattttgaaattctcaaactatttcatttttatatattaattgttgaaatttagaattattgtttttttttctttgcaatgactcaataacagagatcttcctcatcttaaatccttagctttccttttttttttctttttttttatctttctttcgatcttcctctacatctatcagactcatcctctccattatctattttttaataaggataattatcttttacaattttattttcattaaggctttggtgtttgggcttctaaacagtatttgatagagaatttctgcatttttgttttcatctaaggccttggtgttggagattctaaagaatattcaacaggtttgggatcgaaaaatgatgtacttttcggttaattattcgt

SEQ ID NO: 11912 - DNA, 629 bp, Cannabis sativa
cctagctttccattttgttggccttaaaaacacacccacgtaattcaggggaaaggaaccttcattcatgctagagactctcaacaattcttgcttccaccaaagataattaagaattttgtataattagtatataggcaagtggaagcacaaaatccataaaattgaactacactcagagaagtagtattacctttgcaaaggataataagatgatacactatttttattgcaagcgtacaacgttgttataataaagttttaatactaaaaaggttgtcgaacccacaaggattagttattaaattttactaattattatactttttaattttatactttaattagataacacaaagtaaattatagttgagaattaaataatcaagtaaatagaaaaataaatacacaagcaacaatttttaaccagaaagtaaaaacctagagcattgatttccctatttcaaactatgaatatatattaatttatcaattatcccaatttatcctataatttgtagtttcgagaattctaatgtaacctattaacctctttcgagggatgatggatttaacttaaattaactaacactatatctctcttaaatgttaataaaataagcactcat

SEQ ID NO: 11913 - DNA, 700 bp, Cannabis sativa
atattgttttgactagaatcactatagatatacaattaattcttcattaatatatgggaataggtgtgagttttattaatttcctactgttagtataattaattaattcgatgaaaagaaacatgacttgtagctatatgttcaaaaatattagtgtaagaatgtatataatatgttcaaaaattattttagagaaagaaagaattttgaccaccggtttataattagtaaaaaagaaaaaaaaaacctttatttgaattgccaaaacaagaactcctttcacaaaattttgtagctattaatgatgcatattgttattatatgactatgaaggagaccaacatacattttgatagaagatactaataatttccatatgcatatttaaatttaaatactattttgaattctgtattttgtaaaagttattaattggactctttgttttgttaattgacaaaatagaaattatattttccaaaatggtaaaaattaaatcttaaactcaatttttaacaattttttttaatataattaattttaagataatttttaaattatgggtactaatatgacctattaattaattaattacaaaaataatattgtaaaaatgaaaaagaaaaaatattcttcattgtaaacaagtcatgaaaaggagatatacataccaaaaccctttgattgattgtacgtactt

SEQ ID NO: 11914 - DNA, 782 bp, Cannabis sativa
tcatatttagaaagattaggataacaaggtaaaaaatttaagcccgctttccaaataaaattcttaatggcgaaacagagagggaccacaagaatatccaccaacaagacggaccagaagaggctgctacttgaccccactccaaccttaccacagaactccaatactcacttttgaccgtatactgacccttatctatgtaggtccatatcaaataatcctgcctagcataaatttaagtccaatatctatagtataggttactacatttaagtcttgtttctgtactctttattaattgtggaccctagtcctctacctcttattcgagtagcttctatatttgttatatttatataggtggcaaattttgttcttttccaaaattatacttaaatttactaatgcaattacaacacacaatatctcaaatattttgatttaaagaaatgctatgtagctagcaataatgctctttactttaataagtaatttattagagccacgtgctgattactcttgaattctacctcatccatatcttcaagtttggtgtcgataagttactccaaaaatctactatatatatacttgttaaatttgtgaaatattgataaatgaaaactaaaaataagtagaagaatatggaaaaaaatcacgatgatcttcctcttttcgaaaccaaatctgccaagaggcgtacccaatttaaattgttcatagtatccatgttagtggggatatgctctatttttgtgtacagactaaggtatatgccattc

SEQ ID NO: 11915 - DNA, 600 bp, Cannabis sativa
aagctggagcggtatactcacaactggtattttaggtcggatagggttcggggcccaaaatacatttttggggttttattttggcatttatttgataagtgaaatgatctgaaatatatgtgtgtatatgtgtgggatcagacaattttgcccttgatgtgtgtgtatgtggaaatattggccttggagggcaatttggtcatttgaccactattgcattattcaacaaaagcaagttattttagaaaattgaaaggaatattctggtttttttttttttctaaccttggtcgaacccctctctctccctttcctatcttttttttttttcaatttttgattgattttggaaaaactaaggcttgatttggagtgtggtggtgcttgaagcttgaggtagttgcttcacctttttaattctgaatttagatgttgaatattgtgttgatcttttgtgctcatgatgtgcctaggtttttaaatgcatgttggcatgaattgatgtaaatataagtgatttatttgttgattgagcttgtaggtttatgagatatgcatttaaattattttgtgcggttttaaggttgaaattgtggtttg

SEQ ID NO: 11916 - DNA, 517 bp, Cannabis sativa
cgtggaataatttcgttatgctcaacatgtttatatacaaaaagtgaatacaaaattgaaagatatgaccaatattacaaaattacgatttcaatttcatgtcaaattatgatctctgtacaattgcttcacgacttcaacaaagaaaaagaaaatttaaaatgagaattagtttgaatttgcccaaaacccatgaaaaccaagagggaagttcaagtgtttagggacttcaagtctggccacaagagcgttggtttggccaattcttttggcattcagtataactaggaagcacttttgtactgaaactgcatactgaaaaagaagaagaagaaagatgagctaggtaacaagaaaatcaacatattagttaaagacatcacaatagattagtgttgggagtcagtaacacttgcctcaacaacaagaaggtacccgtcatcttcttcagttcctttgggaacaaaagtaggctctccgatgaatcgtcggctaccaacagaccatgtgtgtacga

SEQ ID NO: 11917 - DNA, 893 bp, Cannabis sativa
  modified_base (300)..(307): a, c, t, g, unknown or other
aaaaagtgtgagttttggttgttagaggtttcttttctagggcacattctcagaaaagatagaatcatggttgatccgggaaagattgaatcagtgaaaaattttccgaggccaaaatctgtgatggaagtacaaaattttcttggtttagtagggtattatcgacatttttcaatggttcatatggtgagacaagtgtgacgcaagttttcaagagttgaaacaacgattgataacagcaccagtgctagctttgccatcagactgggaaaagttcgttgtttattgtgatgcatccannnnnnnnctgggatgtgttctgatgcaagctgacaaagttatagcctatgcctctcgtcaactgaaggattatgagaagctctatccaacacatgatttagagcttggtgctgtagtgtttgctctaaaagtattacgacactacctttatggtgaaaatgagagatttacaccgaccataagagcgtcaaatacttcttcgctcaaaaagatttaaatatgaggcatagatggtggctggaattggttaaagattacgattgcgagattctgtatcaccccgagaaagccaatgttgtggcagatgctttaagtagaagaggtcccgggcaggttttcaccactgtgatgatagctcctcaactatcctaggaaatggttaattgagtttgtagttggaaagttacacaatctaacacttcaatcagatttgttagaagggcacagttggaagatcctaagctagtcaaaatttgagatgaggtattggttggtcgtcctatggaattttcaatctcaaataacagaatgttactatataaagctcaattttatgttcctgataatgctgagcttaagaaggaaatccttaa

SEQ ID NO: 11918 - DNA, 987 bp, Cannabis sativa
gtgttttctgggttattgtttgggaatggaatgtgcaaaatctttgtagcaaccaatattattattggggtttatataagctataactgtgtatctagaaggcctgctggtctccggtgaacttgtgtttagatgatcttgttttgtattagttgtttatgttcctttttagctgttaaaaatgagcaggttttattggttaattatgtaaatcttcatcttcagcagcaatgaagatcaaaagtagaagaatcttttcacttctcaattctttagagctatcatacttcatacatattaatttgtcattttaaaagataaatctaattttgcctctaatttatatttgtcattgaatttttcaatggtagtttttctagcagcagatgtagactgaccaagcctaaggccaatagctccagattggatcatattgaccacacccaaacttggacaaacctataaaccgttcagtagctagaagaacaacaaactatgactacttttggttagttctgtagctttcgattccagttttctcaattggatgtctgtctttattttagggaaacttgtatactcatgttattcaataatttgtggaaagttaattatgttccattgagtgataattgtataaagattagactccaactcttagtttaatgtatgtttatttttctagaactacataatctattatatgaaacctttaatgtatcatgtatgtcaatctttctagaactacataatctattatatgaaacctttcagctatgtgaatgaaacaaatgcaaacataattctatcttccaaatccatcagtatttttttataaattcatctagccttttttttttcttttgctctaaggcagcatttagcttgaaggcaacattttctttttctttctggaaatgggctgtcattttgtggtttcttccgatttttgccatcttggatcacaattttactactaggttcttt

SEQ ID NO: 11919 - DNA, 792 bp, Cannabis sativa
gtcatatctgacactcaaagtgtgctcttacaaggtcatttaatttcggataatattatgattgcttatgagattatgcatcatttgaaaagaaaatgaagagggagggattgctatatggctctcaaacttgatgttagtaaagcttatgataaaattgagtggggttatctccgtgctaagatggaaaggatgggctttgatgggcgatggataaacttggttatgcaaggtgtttgttcagtctcgtatactatcttgcatggtgggaaggagttgggacctattgctgctcaacggggtttgcgtcaaggtgatctgttatcgccttacctattgctgctctagtttgctgcgaagttatgagcaaagtggtttgctcacgggttgtaagattgctcgaggtgcgccaatcatttctcatatactttttgcggacgatagttatatttattgtaaagctagtaaggatgaatcacataatgttaaggagcttttgcacacttatgaggtggcttcgggtcaaagaattaattttgctaagtcctccgtgttcttgagcaacaatacaaattgtgatcttcaagatgctatttgtgtttcgttggaaatctatgaagctcatgaaaatgggtactatctgggccttccatgttcggttgggaggaacaagaatgctattctttggtgtcttaaggacaagcttcgtaagaggattcaaggttgggacggtcgtatattgtcttgtgcgggaaaggatgtcttgttgaaatctatagctcaagccttgcc

SEQ ID NO: 11920 - DNA, 573 bp, Cannabis sativa
atatatatattttttatttataaggtagattggtgttgacctcaaatttgatcaactgacaacggaatcatatatatgactaaaatttttacgtgtacacaaatagaataagcaatcgaaaaagacactatttttatagaggtttaaccccttagttagcaggtaatgatctatttcccttttagttgtatttattagagataataccactcagatcacaagtattggggattctagagtgactctcttaagattacgatagtgagaataagaggccaatctcaagtaaatgacatgagagagacttagtctcttctacactgataatggcatgtagaagagaaggtgagctagggttttgagtgtttgaactctatgacttatgagggtaataccagtacaatgaattcttttgagatgttgcaggaacatagtgaaccaaaggaaaatgaactttcagatgcacaaggggcaattcgagttaagacaagaggagggggagtgcctcccattcaaaatggataaaatactagcttggaatgtccaaatagccaacaaccatcataagcaaag

SEQ ID NO: 11921 - DNA, 804 bp, Cannabis sativa
atttattacaaaactagttctaaacagaatagtcactatcatattcggtaattaaattttcattacacggggacacatcatcaatatcattatcaacactaagatcaacaagtaagtcttcttcctcctctacttgttgaacatcctctgtcgtatcatcttcagtagttattgggagtataggctcgttgttaacaatagatggtggatgatcagattgttgcacaagtaatggtccaagatcaacaaatagttcaaaattagctgagtttgtgttatgaacgacatcaacatcatcaatcacatcaggagcatccatgttgtcccaaacttttcgatggtttacctcttgaaccactttccaattcctacctctaactaaatcatcgagatagaaaacttgcttggcctgagtagcaagaatgtatggctcgtctttataccagtcactactgatgttgatactagtggtattttttgctgtaacaattctcttttttcttggatctgtgttgaaccatttacaccgaaacaataccaccatatatgcaccagtaaatgacacatgcagtatttctaaaagctcgccataataactaaaaccttctgtgccaggcacacacactccactattttgggtgaggcgatttttgtctcgatcagatataataaacctagcaccgtttattacacacccttgataggaataggcagcaagatctgatccagatgctaaagctagcaactcctccccatgatgacctaaagatccaatcttgtgcaactcgtagatctaaattggga

SEQ ID NO: 11922 - DNA, 857 bp, Cannabis sativa
ttcttacatggtgatcttactgaaaaagtgtatatgacacttcctaaaggttatgttcatgaagggacattaccccccaacccggtctgtctcttgcacaaaagtttatatggtctcaagcaggcttctcgacagtggtttgcaaaattaagcaacaccttgcttgaccatggttttatccaatctgcctatgatcattctcttttcatcaagtcaacttccactagcttccttgcactccttgtctatgtcgatgacatagtaattgcaagcaccaatgctactgaggtaaccaaattcaaggcattccttaattctaaatttcagcttaaggatcttggccatttaaggttctttcttggcctcgaaattgctcgatccaaggcagggatttctgtttctcaacgtccttttcttcttcaacttttaaatgaaacaggtcttctcggttccaaggctgtctccacaccaatggatgcaaatttgtctctcagtaaagatattggtccccctgttaatgatgccacttcatatcgcagtcttattggaaagcttttgttcttaactatcacgagacctgacattagctatgctgtcaatagactaagtcagtacctcagtgatcctcgccaacctcacctcaaagtagcctatcgcattgttcaatacctcaaaggcactcctggccagggcctcatgttccattctaacagtcagctacaacttcctgccgatcgattgtttcatcttcaggccttctctgatgcagactggggcacatgtcctgatactcgccgatccattactggtttctgtatcttcattggtccatctcttatatcctggaagtccaagaa

SEQ ID NO: 11923 - DNA, 510 bp, Cannabis sativa
  modified_base (387)..(391): a, c, t, g, unknown or other
tataaatatacacactataaatatttatataaagacaatttaaatttaaattaggttattcctattcaaattataaatatacacactaaaaatataaatataaagacaatttaaatttaaattaagttattcttattcaaattagatgagttaaaatagttcaatttttaaattatagagaaaaatttacaaaattgagcttccaacaagtgaggtaaaccttagttattttacatattttttagctcaatgaatagtgctaagctaaatgtagagataactattcattgagctaaacatattttaatattattttctttaacttttttatatgtatgtgtgtaatattatatgaattattaatataaaataaataaaatatattannnnnataatatttaaatgatatagagaaaaaatagagaagttgatgtatgatataaatgtaaaagtttgaggtaaaatagataaagtagagttttagagatgtattttaaaaaatatagtaga

SEQ ID NO: 11924 - DNA, 548 bp, Cannabis sativa
tttaaattaatatcaattttgttatttattgtataacattgatcattaatatgatactatttttcttgacagttatatgtattgtctttatttttgactttttgtatggttgaaaaaaaaaataccatttttctaatattgaaacaacaataccatatcatttatttgggtgcacatgtgggacttagaatatactgttttttttttctagaagaataatgttttatctcttcaattattataaatgtaattttttaatattttttatttaaatagtgtttaattgggaggaataaaaataaaataatagaaataagaataagaataagaacaaaaatagaatgaaataaaatttaaaatgcataaaaaaatctgatagaaaaattattaaattttttttcttcatacatattgtaatgatcttttcttccatttcaaaataaaatagttattttatcaaaatagtagaataaagaatattctattagaatgacattttaatactctaatatgcaactaaacagatgaatagaaaaaaaattgtttct

SEQ ID NO: 11925 - DNA, 920 bp, Cannabis sativa
caagctattgtcttttatggatgtttattctggttacaatccgatcaaaatgcatgttgccgatcaagagtaccagtttcacgatcaacaagggggtatactattatctggtcatgcccttcagattgaaaaataccggagcaacctattagcgcatggtcaactagatgttcaagggtctcctgggatgtaatatggaggtatacgtagacaacatgctagtcaaatccaaaatgtgcatgggccatgcagacgacctcacagaatgctttgaggtagtccagaggtatgtgatgaaaattaatcccaaaaaatgcacttttggcgtcaaatcaaaaaaaattttgggattcatagtgagtcaacgtgggatagaggcaaaccctgaaaaaatacaagccttattgagtatgccttcctcaaagagacacaaggacgtacaaagcttaaccgagaaggttgttgccttgagtcgcttcatctcccgctcaatcgacaagtgcatcccgttctttaacatcttgaagaaatttcaaaagtttgaatggactaaagaatgcaaggaagcattcagaaagttgaaagaacacatggctaagccacctgtgatgtcaaaacttattcataagaagacttattttagccaattctaagaacgcagttagcgcagctctggtccgggaggaaggaaaggtttaacaactggtatattatgtcagcaaatgcatgataagagctgaaatttggtatcccctgatcgaaaaattggcttttggtctcttgattgcatcaagaaagctcaggccttacttccaggctcaatccatcaagttatttacaaatcacccactttgacaagttttacagaagcttgaggcctcaaggaggctcctaaactgggctatggagttaagctagtt

SEQ ID NO: 11926 - DNA, 542 bp, Cannabis sativa
cacattatagcgaaaagggtcagttgctccttaagaaaaaaaattgaaaaaaaaatgtatatgtattttagttagttacaacatatatatatatatatatattaaaagatgatatttatagacataatagtaagcttgatgtaatagttataatactattgtatttttaattagttagttttcaattattttaactgaatctttgttcatgccttgtatttcttttgcatataaataaatgccttagctcataattgtgagttaagctttcgagttattcttcctctgttctctcttctctaaagtttttacttgttcttggtttttaccattgatgttagcttgttaagcttctacatagagggtaaatgtttaaatcccactaactacactctattttttttttaaaaaaaaaaaaaaaattatttttgccctccttgcttttatataaaaaaaaaaaaaaaaaattacgcccctcactttaaattttggattcgccactcatataaaccccattctaaaatgaaccgtccattattaat

SEQ ID NO: 11927 - DNA, 668 bp, Cannabis sativa
ccctaccttataaaggaggtgacaggaacttgaaggtagcagatctgattttggacaatggacgatgggattttccactcctacaatccctcttccttgattcagatgtagaaaaaatactgagcattcccctttccctttttcaccaaactgatcatctcctttggcatcatgaaaataatggttgctattctatcaaaaccagttacaaaatggctttactcctggaagatcagcaaccaaacaccagtacttctggtgcaatgttgtggtggaaaaaattctggactctctcgattccatctaaggttcgtatctttttttggagagtaatccaagactgtttgtcggtcttagacatcttgcatacaagacatatcagtgacaccagcctttgtccattgtgccaacgtgagaaggagacaatattgcatgctctcttccattgtaagcgtccaaggaaattctggtgcttatccactttttctgttgaaaatctccttcaaacacatgcttcactcaaagagctttggatccatgtctccacgatctggtcaaatttagaattggaacaatttgcttgcattttatggagcctttggacagaaagaaacaaggagcgtcatggttcaaaaacacacctgatcgagttgttgctattcaacgct

SEQ ID NO: 11928 - DNA, 618 bp, Cannabis sativa
ttattattattgatcactatttatatatttgtttttgctgaatatggatgtttctggataaggataaactttttcttaatgtaataaattaaaaaatattgaaagaatgcattttatagttcaattttcttaaaaggtgaatattttttaacccaaggcttgtgcttcgtatttggattgcacaattatatgtataaatcaaatttactaaccactggtcaagaacactaggacaaaggtatggaaggagttgcagtctccaaggttttccttttaataattctttttatatgtactatattgggtgttaataataaatttttgttttatttttagtgttcaagtgtctttatttgattgagaatattattattggataccagtattgtcaacatgttttataggtggtgttttacgtttagttagttatacttcctacaagttattttcttaaattatgtaagatctaatacttaattacaccaataacaacatgacaccgaagagaataataggtactagcggtgacttagcaattctaaattgattgatgatgatagttcatatgggttctgtatttgtacattttcttgattttttttaattgagtacatggtc

SEQ ID NO: 11929 - DNA, 598 bp, Cannabis sativa
agatgcatggcaagcagcatgcttacgtaaatcatgcatgcttccttgttagctcaattgggcatagttaaataagagaaatgttaaagagcaatagtggagcctactatttttgtatgtgtttttattgttatttgtttaattaagtatccgatcctatatagtttaatgtaataacttttaaggagtattgctagttaatcgcaagacaacatgtctagagatgttataagaaatgtcacttttgccagcacatttttgtgctggcaaagtttggtattgctttgataaaataaaatttatttctgatgtgttggtaaaagaagttggcaaatcaatgttggtattagaacttttacgagcacaaaataaaaagcgctggcaaaaatgacttttttcagcgctgaaatgcgatggtaaaagttagattttaggcactataaacgtgcgctagtaaaactttgacctttttgccagcacagtttgcaaatatacaagtaaaagttattttcacttgtataatagtgaattgtactgataaaagtgacatttcttgtataaccaccacatcctgtacccaaaaagaatgctctttaaa

SEQ ID NO: 11930 - DNA, 514 bp, Cannabis sativa
ccatggctcatgtaatcatagactagaagcctgtttgaattttcatggcaataaccaagaagacgaaccagatttttgtggtgagttctaccaatggatctcatttcatttaagaattccacctctccttcgactgcaactttctcgagccttttgacagcaatggctctttccccatctggaaaccttaaggttcctttaaagaccgttccaaaagaaccctttcccaatggttccatgaagaaatttgtagctatttcaagctcgttgaatgtaatgatcgaacagttagtacttcatctaccttcaatatctgtctattggattctttataaactattgtatgagagtggaaattgcttctgcaacatagaaacatagaaagtaataggaaaatgaaagaaaatacaatgcacacaacactgctgattaagaatctattttgaactcgttcacttcttcctttcgtcacccatgttgtggtttccttagaactttgtttgagcactttgac

SEQ ID NO: 11931 - DNA, 1104 bp, Cannabis sativa
taaattttaaaatttggccccctttacattcaagtcctgccttcgcccctgctcctacttatttcgacattcgagagactttttagtctatttttttcatggtcgtgtacattatagggctgggcataagtcggtttggtcgattttttttctatataaaaatccaaaatttggttttcggtctggattagtgcgattcgaaaaccgaccaactaatctagaatctattttaaaaccgactattttgaacctcggtttagtcagtttaaaccgctttaaccgaacttttttttccttaaaaatatgatcaaacttattctataagcatgttattctacattctacaactacaaccatacaaattaattatttaaaaactaattatcttattttttttaattttaatattaataaaataataatatattattattatatattatcaataactacaatacataaagcaaaaaaaaattaataaaataatatatataatggtcagtttcgatttcggttttttcggtcagtttattaccaagaaaaaaaactgaccgttcaatgacaattttaattgttagcggtttttttgatttttggtttcgccggttctggtttcaactatgttcggtaggttgatctaaatgattttttcgattttctgaatttcatgctcaaccctagtacattatagttatttaaaatattctaaaaaaaaattgacaaatctagaaaaatttaacacgctgaaaataaagtttaaaatttttaaatgtgatacaacaattcaataatgtggaaattatttcttgatctaccgaaataatcataaaatggactataattttgtgagacattattgagttttactgactttacaaaattattatcttttaacaattgtggtgattttattaaattatataatattaatttttttaatattattaaaaattaatataataatatagaatatgttttaatgtaatttttggtgttgtggttagagtggaaataattttttacactgaatttagtgataatgtgatactaaatttagtgtgctcccttggaaataatacaatattctcacactaattctttttc

SEQ ID NO: 11932 - DNA, 770 bp, Cannabis sativa
atgataagttgatagtatatgtatagagataattaagagtatgtggaatttgacttaacgccgtaaaaatatagattttttagtggctaagaaatgataagataattataaataataaagtttttattaatattattatattatgattaatataatattattattaatattattattataaaaacgtttaagtatatatattatatacgcttatatcagtaaaaaaaaaaagaaacgatacgaactctcttctcccttcggcgaaactctctccctcctatattcattttcttcaatttttaatctaaaacttagcgatctaagctccggtaatagcgggatagtaaattctcagagcaggaaagcttaaggtaaggtttcattccgttttaagtttaaaacaattggttttgtatagggattttacgaattagaatagttatgaaggttctgaccttataagattgttctcgagtactcatgggactagttccgatgttttcttgctaaaatttaggtgattttgggttataaattgagtttagaactttttataacttaagtccgaacactagtggcgtttgccaattatgggctcgattttagattctattacgtaagtatggtagtatatatggtatatatgtgccctatgaaatttagggtggtttggacaggtaccgatagcgtttcggtgagtgcataaatttgaaaaatcatatttttgcccctaataaaccagtcaaccggtttgtaaaccggtcaaccga

SEQ ID NO: 11933 - DNA, 685 bp, Cannabis sativa
ccgttgtttccaattcacggtgacagccttatttggttaattaacaaagttgcctttattcttggccaacaaaagagtaaccaattaatataagtttgaataaaccttaatatagaaaattttgacacctctcacttcaatctcattttgaaatttccataatccttctttattctttaaagttgtctttatcaaaatgaggggtcaatttgaaataaatctttgggttggactgggcttctataatatgggcacaccacaccacaagtgttaaaattttaagaagctcaaatcacaataataaaaagctaattagtattttcacttctcgaattttcacatgtatcaaatcatgttctctaaattttttcggtcgttaaaaattctctcaattattgagattgttgaatttaaggacttttgtctaattttaataaagaaagtctaacattgataaaagttcaaaagacatgatttgacacatgtcaaaatacgaacaacatgatttagtagatattaaagtctgagtagcatgatttagtacataaataatcactaaattaataaaattggataaaagtctttaaatttaataatctcaatagttcaaaaaaaaaatttatagatcagaaaaatttaaaaatattatttaacacatatcaaaatttaaaaataaaaatcttaa

SEQ ID NO: 11934 - DNA, 907 bp, Cannabis sativa
tttatgatatcctatctaatgtcaatatcgattcaattcgatgtatactccatacatccgatactagcatactttgcgccaatatcctggaaaggacatatcacttatctaaggtgtaagtaaattttatcgctgattatcatgtcagtataaatccagtatactgataaattatgggacttaaactttgaaacatataaccatgattatttttccactatgtagaaaacactataatcatgaataactatatattctgaagttaatagaattcctaaattaaacatataataatgaaagaaatcatgtgaaccatacaacattaaatgatttatgatcttttattaattattaaatctgattatattaaagttggtttataaaatctcatcaaaaataccatagaacccttggtgattcttagaactccaccttctaccttgtagcaatttccttttgaatctaatacaccaagagaaagcaaatttgttttaaggtcgggaataaatctaacattattcagttagtgcatgcatagtcatagctaacatttaaaacatcaacattatcaaaataatcaaaaacatttgctgaatcaggactagcatttggtttttatccattatttttcctctgaggacaatctcttctgaagtgtccttcttaattacaggtccaacaaggttttctaccccttgagttggattttgactttcctcttccctttccacctttggagttatctattttctttgatatgcctcttacatttagtccttctgcagttttcttgaacaacttatgattggctttcagatctagttccttggagtatgcaactccaataacttcttctagagacaatgtttctctcaaattctcatcaaggctcttggaagagaattca

SEQ ID NO: 11935 - DNA, 594 bp, Cannabis sativa
agaatattattaatttgatcaaaataagtggcaaacaagataaatttaaaagcaagtcatatgaaaatgtatcaaaaatcaataccaaaacaaaattggcttaccctgctaaagcattccaaaataaccaaaaccaaaaccaaaccatcttactacacttctttacttcactaactctgcaacaacaacaaacaattcacatatataaatatatatacatatatacaaacagggccggctttggaaatatataggcccaagacaaattaaattttggggcccttaaaatatataaaaaaaaatatatcaaaaaaagagtgttatgggatttgaacccataaccttggacattatgccattcaacccaaccaatgaatctatgaatatttgttacttataacatacttaaattttatttaaataaaagcctaatattttttttttttttattttgggcccccgaaaagtgtgggcccccgaaaagtgtgggcccccgaaaagtgtgggccctaagcacgggcctaacccgcctatgcctaggaccggccctgtatacaaaagaaaacacattttgatattgaaaggggaaagaag

SEQ ID NO: 11936 - DNA, 679 bp, Cannabis sativa
tagttagaatggatcatgataggttatcgatccacacctaactaatttttgtaactaacaaaagaaaagacctactgatatacatatatatatatacctgcatctcattctcttcataggatggttgagaagactctccaagatctaggagcaaatatcatgaggaaagaaagaaaggaagaatcacacatgcgcaagaaagagagattgagttaaaaaaatagagagaataagaataatactaaaacttgtaataaaatcagagattaccagccaaaaccatacttgtgacttggaatctcatccttgtaactctaatatgttgattaatagtggaatcaagctaccaatctgaggagcacctcaacgaacgtagcttgaatttttgggtgaacctctcgagaaaaatctctggtaatttcttaccctttcttgctctttgttattatgtttatgtgtttgagatcagatcgattcagatctagttgtgtgtgtgtgtgtgtgtgcaaattgtgtttttgggaagatttgaggacatagctaaactctctgctagggtttctttgaagctcaaacctaagatctaaagtcatcgagaaggttctaggtttatgtgttttgttttaggctaaaacggagtcgttttgggactctctgacttgctgaagtcaaaagaagt

SEQ ID NO: 11937 - DNA, 533 bp, Cannabis sativa
tttttgggaaccctgctgcagaaaccagttacccggttttacagtacttgtaaaactagttaaccggttttacccaaaaaaacccaaaaaatttcaaaccctaaccaaaacgattccaaactttaccaaaccttccagacctgcatattataccccaataagcatttttcaagcaataaaacaactacccaagctcaaaaacaaaaatcaccattaaagctccaagtttgagttctaaaactcaaaacttgattaaacctaataacaaccattaaatcatgcttaattcaacataaaataacataactaaactccagaaaaacaaaatcaatcactaacagcagctacataactcaatatctcaaaacatgcataatccattttttccaaaattcatgaaaccaaagaggatagagccaagagcttacttagagcctaaaaaaactaaatccctactgcaaactgcttgaatttttgaaaaataatccaaaccctagctggtataggggcttcgagagagagagagagagaga

SEQ ID NO: 11938 - DNA, 603 bp, Cannabis sativa
atttaaattaattttaataatgggatatttgttatgagaataagtgttggaatatggggtagttaaagtaattcttttgtttgtaatataattttttttttttgaaagtaagcagagaaaagattaagatacaaaagatagataattttaaacagctaaatcaattggcaagcctggccaccacacccgagcctcatctaaatttaacgttcgttttgtttggtatattttttaagtgagaatgtagtgaatttcacaaatatttaatgcataatgtgaatagctttgtacacttcccacatgtgatttcctcacctatattctcatgtaaccaaaaattaacacaaaacacctctaatagggttatgtttttaagtgggtctcaattttcaaattaaaatggtaatagtattaattccctccaacatttaatttcatattctcttaaagtctaatttctttaattcaaactcacataacaaattaatcacttgaggctagcttaagtggccataagaaaatgcgtgtgtgttggaggtcgtaggttcgagtcttaaattatacagtgtaatatataaacgcttacataaaaaagaaaactca

SEQ ID NO: 11939 - DNA, 1266 bp, Cannabis sativa
ttatatgacaaccggttattataggtttattaaccggttgtgaattttcttttttaataaaaaaaacaaaaaagtataaaaaggtttaatcaaatggcagttggtggtggttaatagtacaatagtactacagatggtgggtccatgttgtcagattgagggtatttttatcttttcattccttcattttttttatagatttgtgcagtggtagtggagtacgctatatcacgtactgagagcagctccaaggagactgcaaaagatttgcataccgtgtatatatcttccaaggaagttgcatttgttgcagcattttgtagttttatctacagtgcacagcatatatgtcgtgcactgtagacacggcatatatatttttttttattattattatttagttaatattcatatatatatataaattttattgaatttgtaaaattaagaattattttttgagaaattttacaatgcacatttttaaaagtgacgtacgaatctactcctatttgtttcagcacccgacatacttttttagtctattttatatatatatatatagtagtgtatattatagttatttaagacatcctgtaaaatttggaaaaattaatacgccgaaaaaagtacactttttttaaaagtggcgcactgatatactcctacttgtttcgacattcgggagacttgtttagtctttttttatggtcgtgtacattataattatttaatacatcctgcaaaattttgaagattttaaaaaaatttaacacgccgaaaatagaattcaaactttttgtcgtgtgactcttttatttagagggatacattataaaagcactttataatatttttttgtgtaaatttaaatgtgaataccatatattatttttatttttaattataatttaagtaaaattttattttttatttttatttttttaaattaaacaataaaaataatttttagaattgaacacatattaaaattaaatttaaaattaaacacaattgtggtaatttttgttaattaatatgatattaatttatttttctattttattaaaaattaatataataataaggaatatttttttagtgtaatttttggtgcttaggttggagtagaaatatttttttatgccaaatttggtgatagtgtaacaccaaatttggcgtttccttggagatgctccgagtacatttatagcttttgcatgatgtttagtaaaagtagagtacaatgttggaatttattttacc

SEQ ID NO: 11940 - DNA, 639 bp, Cannabis sativa
ttgtattagaataataaatataagaaaatatttgatatcttgagtactcatgggatgatggagattaaaaggaaattgtaatagaatgctaagaaggtcataaaatataatgttataatttagttcgtactagccaaagggtaatccctttggctagttctagtatttctataggggttctagttgcaaagtacttggtgtttggttgattttgtttagcttgataattttttaattaaagtttcattatggttgtctgatgtgtttcaggtagaattacagtttattcagatttgttatttttcgtgacagctagcaacaatgggaaaatatatgtcaattgagttaggagtgttatttgaaaatgttatagctttagtgtctaaatttctgtggacagttttgtcccatgcggcttgctctaagtatttagcggcccatgatttggcaaagcatgctctgcggttagatgatgagctatcctggttcgaggaggttctagcgccgatggcggacttttgcatcgtaaattcatgagtgattctaatcattttgtcaaaaaaaaaaaaaattaagggtttgcttgataagtttttttttcaaactaaattatgagcagggagcattttcaataaaagt

SEQ ID NO: 11941 - DNA, 504 bp, Cannabis sativa
atatatcgatcctcaaaggtatatattgtatagggtatgcctataactaggttggcttggctgctaataattaaccaacattcaagtatagggtatgtttataacacactttctaagatatttagagagtttttttagcttaatttatttctatgttatagttatttaagattatctgtaaatttttaaaaaaatctgaataatttataatgttattaaaaaataaaatttaaatattttatttacacgattcattttttttatacacgtactgtttgaattttattttttgacatttactgtaaattatttcaaattttctaaaaatatttatagatgtttttaaataattaccacgtatgtgatgatgaaaaacaaaatatcagactaaaaaatttcatagatgacaaagtagagaggtctaccaaaccaattttttagtagaatgtattatagaaatttcttattgtatattgttaattattcaattttttttaagagaac

SEQ ID NO: 11942 - DNA, 1105 bp, Cannabis sativa
catgttcagccttctcgggggctacgccaaggtgaccctttgtcaccttatctgtttttgatttgttctgagggcttatcacgattgctacaaagtgaagaatcaaatcataatctcaaaggattgcggttgacacgtcatgctccatcaatctctcatttgcttttcgcagatgacagtcttcttttttgtgaagctacaaacagttcggcaagggccattcacaaggttttagatatttatcacaaggcttcaggccaacttttgaacacagctaagtcagttatgtctttctctcccaacgctacacaagttgtaaaagatttcttccatcagacattaggaatgccaattagtgaatgtcatgaacgttatcttggactccctgctttctcagagcgagataagaaagaaatgtttagtgatatcaaggaacgtatttggcaaaaattacatgcgtggaatgaaaaacttttctcagttgggggtaaggaagtgctcctcaaagctgttgtccagtccatacccacatatgcaatgagttgttttcggttaccaacaactttttgcaatcaattggaatctatgatggcaaatttttggtggggttcaaataaagatggttcaaagattcattggaaaagttggaaattgctttgtaaatcgaaattggaaggaggcatgggttttcgttcatttgttcactttaatcaagccctcctcgccaaacaagcttggcgaatttttgaaatgccagattctctacttagccgaatcctcaagcatagatatttctccaacaacacttttctggaggctcgccttggacactctccctcactcacttggcaggctattcattggggacgtgaacttttagtggagggtcttcgttttaaggttggtaatggctttaaagtgcttgcaggggttgataaatggatccctagtcatttcaatttcaaaccagtaagctactcgggacctaccaatgttctggtatcacattttattactgatcagcgagaatggaatgtaccactcctccatgcatattttcaaccaattgatgtggacaagattgtaacaattccccttagttttt

SEQ ID NO: 11943 - DNA, 620 bp, Cannabis sativa
atccgcattcaggacccaactccaagagttcttgatgtgacataggtcggtcaagagactgaacaagttcatccatctgtgcaagcacaattggatcagctgaaaaaatctggtccaaggtcagaccgacccaaaactcactgatcttgagctagaccgagcacgggatcacccttcagtgcagagattgacgtccttgaactaccccaaagttcaaaatgccaacatggaagatatatacagggaaagaagatcccttatcacatcttaagtattttgagatgcagatggatctgcaaggagtacggggtgacgtgcggtgtagggtattccatgctacactagcagaagccgcctagcagtggtacttcaagctaccaccagggagatttaattcgtggaaagccttttcctcagaattccatgaagtgttctcctcttcctgtcaactccccttccatctagaagaccatgtcgaggtaaaataagtaccaggagaacctctcacggcctacatcagcaggtttatgatagaggctacaaaggtcacggggttgacagaggaggcaaggctggccgccatacaggggggcatcgagccactcggggagctgtggaag

SEQ ID NO: 11944 - DNA, 551 bp, Cannabis sativa
atggttagcaaattttgaaattcataaggttgttagggaatatgtgaaaatatttgaaatctaacaaatctcctaaatatctaaaattctaactaaaattcaaatatccaactaatataaatttttagtttatttaaataatttaaattaattaaatatccaataaaataatataatataatatcttaatttaaaattaaatatttctgatattatatttctaatcttacaatttaataaaataaatttaacaaaaataaacaaaattaaaaataagatatttgatggttaggatattatcaattttatctaataattaaataaaataaaatatcttaagtttaaaaattttatggttgtcaaaccctaaaatttctattcaaactaaaaattaatgacttttcaaaatttaatgttattttgacaaaaaaataattttaattaaataaatatctaataagataaaatgtcaaaactaacatttttctaatcttattatttaatttgataaaatgtatttcaaaaaataaaattttgaaaaaactgatatg

SEQ ID NO: 11945 - DNA, 900 bp, Cannabis sativa
atcccgaagctcaacattcggggagaaataaagggaggatttctgaaagttaaccttttgccccgaagccctttcatacatctcaagaatttccttgatgatattgcaagactggatggatgcattacaaaagaggaaactatcatccgcaaagagcaggtgggaaacagcaggagcgcgtctagcgactttgtaacccataagagagcgatttctctctttctgctggataagggaagacaagccttcagcgcatagcaggaagagatagggggagagggggtcgccttgcctaatgcccctggtcggaacaacattgccggccacttgcccgttaaaattgaattggaaggtggctgtggatagacaagccaagatcaaattgatgagccgctggggaaacagaaatttattaaggattgcggctatgaaagcccattccactctgtcgaaagcttttgccatatcgagcttaacggccatccaaccttttctcccacgagtcctaagctttatggagtgagcaacctcctgggctataataatattatcagagatgaggcggccaggtagaaaagcactttgattgggggagattaggttgttaagaaccaacttgagtttattggcaatggattttgaaatgatcttgtaaacaatactgcaaaggctgatgggtctgtattccgtgaggatagtgggatttttaaccttagggatgagggtgatgagggtggtgtttaggggtgctatatccccatcaccattgagaaagctgagagcagcattaatgacatcatttctgagaaaagaccaattatccttatagaactgggagttgaagccgtcgataccaggggctttatcaagggggagctggtggaaagctttctcaatttc

SEQ ID NO: 11946 - DNA, 533 bp, Cannabis sativa
gagattacattagagtagttaagagttatttccagtataaatatttaagcttaacttctagttgtaaataaatactaaatttaatttttgacggtaataatacttaagttataattctgaaacttctgtaggtatattgatgttaagtattaagaaaatgactcgtgaataatgacggtcaagtacttataaagtttcataaatataacttaagtattattatcgttaaaaattaaatttaagtatttatttgtaactaaaagttaaatttaaatatttataccgtaaattgttattatttataatatatgtaatatttttttctcaaaacttcatcaaaaaagaataaattatgtgagatttaatactaaattgtattaatagtggcattatattttgacactagtattagcaattttcaatatctttaacttttaggaaaaataaaaattccaaaatttataataaaatttcttaattttctcaaaaagttgataaaatttaaaatatgcattatgatattaaacatatat

SEQ ID NO: 11947 - DNA, 574 bp, Cannabis sativa
catagtgatcaattaccttagttattgaattggtaactatatgaagccttttctggttagctagtatttattgtaagtaacttgtcggaacccttgtaactaaatagataattattgttggtgctatggtagcttgttacttattgtaactggtatagtaactaaaatttgtagggttttttaatttttacattttaaagagttttttttatatatatttttacggaaatctacatagcaattaatagaacaacttaaattataatcaaaacctatataacaatccacatagaaactactaaaataatccaaattaattataaaaataaaaaaaaaaaagttaaaaaaaataatgtatgaaataattttctaaatttataaaatatgactaattgattaggttgaatgtaagtcgtatttatatgttttttttttttttttggatagatcatattatatgttaattcttcaattctacaacaaaaataataaaagataataataaacaataattaatattaaaaactcaaatataatttaagataaggttttgtggctcgtagttttgatagat

SEQ ID NO: 11948 - DNA, 681 bp, Cannabis sativa
cctatggtgcttctatacaaagtgacatcttcaaaaggatccccatcatgcaaactcaacttagaaatggaacttgtaggatttggacagctcttggctccctccatgtggactttggtgagcaagtcggtaatgtatttactttgactgaggtacatgccatggtgatctctataaacttcaactcccaaaaagtagtgaactggcccaagatcctttagagaaaattgagtattgagagcagagatgaagtggttaaggagagaactattgggacctgtaattaatatgtcatcaacatatactaggagataaacaagtgtgctgcccgagccatgtaaaaagagagagctatccgattttgagtctgaaaatccccaatgtagtaaggtttgcttgagcttgtcattccatgctcttggagcttgtttcaagccatataaggccttgtgaaggagacaaacatggtctggtttagatgaatcaacaaagccagggggctgttgcatgacagtttcattaagagtgccattgaggaaagcattgctgacatctaattgcttgacacaccaattattgtgaactgcaagagaaagaacaactcgaacagtcactggcttcaccacagggctaaaggtgtcttcatagtcaatccccggagtttgaagatagcctttggca

SEQ ID NO: 11949 - DNA, 791 bp, Cannabis sativa
ttggtcattagaacacttagcgtagagtatacattataataactaagtgtaataacttgaaggacatgattgtctagtctgcacttatggtcaaagagcagttcttaagtttgctcagtacactggtgctcatgccattgctggaatataagtaaactaagtcactcacttatgtactaggcgagacacctcagcgaggtacatttggcagcgtgttctaattcacgtcagcgttgacctccttaaagacagtttaaatcatagttgtgtgatattctaaaattaattgtatgtatttaagtggagcgtaattaaagccaacaattttgggaaatattgttatgggatttgaacttaaatgtaattaactgccaacctatattactataaatatgggtagattatacaaaaaatgggatgaaaaaccttagagagaaaaaggaatatactcattgtaaaaccctaattctgtatctacaaatatctaaataagatagactcgtggactatgcagagttaactgcaaaaccacataaaaacctggtgttattgtttcaattattcttctaaaatctctcatagtttttgtgtctattgtattacgaaaataggctcataatcattaaacaaaatttgtgttaacatctactaattcccataaaaaaatcaagcagtcattacaaggatgatcatgaaaatgctacctattatcgaaattacttattaagcgagtagaggaaacactttctggttggtaactttaaacattggtgatgttttcttgttcattt

SEQ ID NO: 11950 - DNA, 973 bp, Cannabis sativa
tgttgctataaaaaaatttatatattgtatttaattatttatatagtcttacaaattctcatatttatttgtattctaaatagtatacatatattaaaacattatttttttttaatatttttcaaatagatagttttttcttactttataattgaacattcttcaatcgttttttataaaaattgttatatattttattttttaaaatcttcatcaattatttatttatttaaaaaaaataaaacattactaattatatttatattaatataacatgcattcttatcaaaaatttatataatttagtatttaattgaatgtattttagtttatttactttttataatttatatcgttattaatttaacaaaagaagaaaaagaaaattaaatacctcatgtagattatttacagtatcaattaaatatataataattttttataattttgtaattagaacattaataataatgtatactaatataaaataaattaaataattaaattttaaataaaaattattttaatatctaagaattttaagaaaaacaactatattatcattaatcctcaaaataattaaaaaaattaagcttttaatacaattttttttattggaaagagtatatgctttagataagtttttacaactttgttattatttttttatttaatatatgtttttttaaaaaaaaataaaagttgttcatcaatgacttcaaaacatctatacaaggaaaatataagttgagtcgtaaagtagaaagcaatttaggtcacgatatacagatttgacatgaacacgactcgagattttacgagtttcacacgatgacacgaaaattttgctacttgtatttgtgttttatcaattttttatgttacaggtcgtgttcgtgtctgtcatttaaaataaattttaaaatttaacataacacgaacatgacaagatgacattaaaatcaacaattta

SEQ ID NO: 11951 - DNA, 553 bp, Cannabis sativa
ttatcaaggtatatagggataagaggttgaaagatctaatgtggaaggctggtagagaaccaactattcgtagatttgaagttgccatagaagagattaagaaactaaatgaggagacttttaaatggtcaatggttgaaggtctgtacactaggctagatcacactttaaaactggtcctaagtgtgatatacttaccaacaatatgtgtaagagttttaatagaactccttctatattagctaccagaaatagaccaatactgtcaattctagagcgtattaggatgtatttcatgcaaatgatgtcaaaaatagaaattttgtattaatgtcgaagaccaacattgctcctaagatatcaaccattcttgaaaaaaataagattcaagtaggtttgcatctgcctcagaaatcattagacatgttttgtcaagttggcaccatatatggtgggatgtactcttttgatttgggtaactgagtctgttcttgcagaatataggagctcactagcattccttgtagtcatgttgtggctgcaatatagtcaa

SEQ ID NO: 11952 - DNA, 677 bp, Cannabis sativa
ctgatactcggtctcaattatgtaatatgctacacatgactgaagcttctgataatagcttttatcttgggttaccttgcataatgggtcgaaagaagaatgcgattctcgactttcttaaagaaaagatgaaaaagaagatattcaattgggagagccggtttttatcaaaggcgggaaaagaagttttgattcgttcagttgcacaagctcttcctagctatgctatgagtgttttcttacttaacaaggaaatttgtgccgaattggagggtttgatggccaaattttggtggaagtcgcaatctaattccacgtctaaaggagtgagttggatgagttggaaaaggttgactaaacacaagcatgctggtggtcttggcttcagggatcttagagattataacttatcctttcttgccaaacaaggatggcgtttgctaactaatgagtcatctttggttagtaggatgtataaagctagatattatcctaatggtagtttcttaacatctgcattaggacaaaatccaagctttatatggagaagcattttcgaagcacaagatgtggttaagcaaggagctagaaggtcaatcgggtctgggcaaacagtcagtattttgaatgatctgtggttacctgactcttctaacccgtatgttcaatctacacac

SEQ ID NO: 11953 - DNA, 822 bp, Cannabis sativa
aaaaaaaaaaaaaaaactaaaatgtgtaaggaaacaactataaaagaaactagaaatcaacttacttatggaaacaactttgtttgcatcggcagccatcatctattattgttccttttctctttttactataagaaaaccaaaaaaggaaatcaaaaaaagaaacaatatataatagacttattaaaaaagaacgaaataaataaataattaaaatagttatttttttaaatatatttttaggtgttttatgaaaagaataaaaaaactatataaaagttacaaaaaaataaataaaaaaaaataacaaaaaataacatacaaataataaaaaaataataaaattacaatattgcaatattacctttcaaataacacaaaaagaataaaaaaaactatataaaagtaacaagaaaataataacaaaaaataacatataaataaccaaaaattatcaaaattacaagattacttttaaaaataacaacaagaaaagaataacaaattaacaataacattaatcttcatactataaatctttatgattttaattatcacacactataaatcttttgaatattatacttactcatacttttttcacctatattgaccttttctcaactccataatatttttattatttaaaaaatgaagttaagatctgttaatcaaaggcaatcatttaaccaataaaaaatgattattttttgacctttaaattctaagtaactcttcttattttcaagttctgttttttctaatcaaacagccatgaaatactattatcattaccatcactactttgttattgttttgatc

SEQ ID NO: 11954 - DNA, 660 bp, Cannabis sativa
cacgaaagtgaaaatattctcatgaaggtaaacatctctagagtgaaaaatcttattagaatcaagatcaagtaatttgtatgctttcatgcttgtggggtacccaagaaaaatgcatggcgaagatctaggagagaacttagacctagattgacttaaagtagatgcatatgctagacaactaaatgcttttaaatattcataagttgatggtttagagtaaagaatgtcaaatggtgacttattattgagattaggtgttagtgtcttattaattaaataagctgcagtagttgcacactcccccaataaaataaacataggattgaaacaagagtgctatagctaaatttagtaaatgttggtattttctctctaccagaatttttgcataatcccaaaatttctaaacaagtcaacaaactgtaattctttttcattatcagatctaaaatctttaattgtcttgctcatatgattttggaccaaatttataaattggggaatgacattgtgagcatcagctttatgtttgataatgtaaagtcattttttgacaatttagttgttaaaatattctttagttaattttgaatattttatgagaataaaatattgttttctcgtgtttaattacattttcatgactgtctttttctt

SEQ ID NO: 11955 - DNA, 643 bp, Cannabis sativa
cacccgatcccaaccccaaccccaatcccagctgacggtgacggcggacccaatcgaccaacggtgacggacccagttgacccacgctgacggacccaatcgacggcgcagagcttttcgaccctatcggtccaatcggacctccacgaattggaccatcggatccatgcaacttgaccatcggacccaacccgtcggacctatacatcgggaccatcggacccaacccgtcggaccatcggaccccatgcaacgtgaccatcagacccatgcatcgggaccatcagacccaacccgtcggatcccatcaccctcttcttccccaatggtttctcagatccgatcttcttcatcatcatatttgttctgtatagtaaagaggaaaataataaatgaccatatcatattaagtaatatatatacatatataacgtacaaaagtatatttatatatatatatctatatatgaataattatttacctagacagtatcggcaatatcatcttcagcttcactacaaaagtcagtattttatttgcaagtattattaataatattattattattgtttgataataatattcattattattatttttgggttgatattgatcatgatgatcatgacacaattcattgtt

SEQ ID NO: 11956 - DNA, 675 bp, Cannabis sativa
aatttatttaaaattgagaactattctttcaactattgtgtattgtgaatagatgcaaacacacattctacttcattagattaataaaaaaataaaaatcattccacatcttcatgttcattatgaaatttaaaaaatacatatcaagatgacaccaactattgtgtattgtgaatacatgcaaacacccattctacttcaatagattgataaaaaaatataaatcattccacatcttcatgttcattatgaaatttaaaaaatacatatcaagatgacaccaataagaaaaggaacaaacacattaaaacatgatcacatattctttcctgaaaacatcatccatttgcttttgttctgttttgaggagcctcttgtcattgtccttcaacttcttctcattctctttaatcttactatcatactcatcgaccctttttcccaactctttgatcttatttccaagctcttccatattcttttctctattctccatcatacgaatccttgcttgcaaatctgaaagttgggtaattaacaatgctcatggttctatacaattcgtcgaggttaaccatggttgttgaatggggaagttgtatacaattttttttttggtttttttgttctcggaaggtgatctgtaatttcggatgaattagtttttatagactt

SEQ ID NO: 11957 - DNA, 624 bp, Cannabis sativa
tatactccatttgaatgtatatttgatataatatatactttagtttaattaattaattaaaaaattgccaacttttcttgttccttttttttactaagtaaaaatattctatttaaaagtactctcatattagctaattaggtaattaatacttaaataaataatctagtcaagcccaaaagatttgggaaatgtatattctatatgaatatataggataaatttgtagtatacctcccaataaaagtagtttcggtatttcatatctgttttgatatttaatagagttttttttttattattattctaactctttttaatgattgtatatgttgtaattttttaaaatcgatcacttataaatttaaaaattttaaatatttaaaatactaaaataaaaaactcaaaaataattacttatcgtgagcataaaaattgtaacaaaatatatatttatttttaaaatattgaaacttaagttttaatattataaactattcaaaatattttataaaaatttatcgttataattttaaatagctacaataatatatataattatatatatatatataaaaactaaaataatcttaaaaaacatataaagtggaaacaacttttaga

SEQ ID NO: 11958 - DNA, 645 bp, Cannabis sativa
tcttccaccatgtttgtcttcttggcttgtaacattgtttaaatctccgataattgcccacggccaacgagtgccttcacttaatgcttgatgagcctccatgtgttgtgccttagactcctattaggttcaccatacattcccaccagtctctaaatgggctgcccgtctacacacactttaacattaatatgtttgtttgaaaagtctataagttgcacttcttctttatttttccataatagtgcaattctcccactatgaccttgggcctctacagtaatagcactatcaaaacccatatataatctggcccgctccaccacatctttaccataaagagtttcacattaaaattttaatttttggtctcttttggattaccaaatccttaagaaattgtaaattccgttagttcccaagtccccggcaattctaacttaaagtggtcataattctcgacgaacctggacaccagtacccgccccacttcaattttttgatgtgtcaatattgttgatattttctttttcaaaaacaccctcaggatgcatacccgacccaatactcaaagcttggccatccactatcatattaacatttggcccattcccactattatccaccctaataaacactctctta

SEQ ID NO: 11959 - DNA, 629 bp, Cannabis sativa
tggagttttgagttaacattccctgtgccaactatatcatcgacataaataagcacaaagataatcaacttttcatccttatagtaaaacatggaagtgtcggctctggagttcttgaagttccagttcagcaaggtgtttttcagcttgtcaaaccatgctcgaggagcttgtttcaaaccatagaaccctcgggttgatacatataaacatcctcttcaaggtgcctattaaggaaggcatttttgatatccaattgacgaatttcccagttgtttgagacaacaatggtgagtacaattcgaatggtggaggccttgacaactggactgaaagtttcactatagtcaagtcttggcctttgatgaaatcctttggcaacgagtctcgctttgagtctttggagagaaccatctgcatttcttttaattttataaacccacttgcatccaatcacattgtatgcatctgaatatggtaccaaagtgtatgttttctttgctttgagagcaccaacttcattactcatagctccattccaaccagggtgactaagagcttcagttacacttcttgggttcctctttttcaggattccattttgttttactgaagtagactttgggctt

SEQ ID NO: 11960 - DNA, 679 bp, Cannabis sativa
tatatgtggttatagtttaaggttctttctcggataaattaaggttatacagttatatataaatattattagattgtttatttatttattattatctttaatatatatcacgtacgtgccaaacatatagttagggttatgcatgtgccatgcactgttacatgacacaatcaataatcgatatatttagctctttcaaaataaataaataaataaataatcgatataattaatctttataatgaaaattatttattgtaataattgatctcatgatcttttagattatattatataagatttttatatagtaagattaattaattaattacaaaaaataattaataatttagaatttatatatatgtatatatataatagatttgggtatgttattaattaatattgtttaatacttttcttaatgttatcaaattgtagtgaagcatagtctctttcaaacaaatcttacacagttgaaaagcttaattaagacatagaaatctctgtatatttgctttgctttttcctattaaagttaagtgggatcaatttatattatatatataaatatttattaatacgacgggcagtttaattattattctgcccgatacttttagttatattcttaattttaatatttttaataaagtattataaatccttaactagatgt

SEQ ID NO: 11961 - DNA, 663 bp, Cannabis sativa
ttttagctattttaactaaaatttagttaaacaataaagaatgtagttggagatgctctaattatatgtatttcttattaaaattgaactttcaaacatactttaagagaaatattataaaaacacatcacttaagctgcctattattattagtgcaattaaatattagctcttatttatccaattcaattggcattattttgctcatagtgcattagatccacattaagtgtgaatattatattttgaatctaatccaatccgcacaataaatcaaattcaatccaacctaacacaaaaataccaaattaaattgattattttggattagttacattaaattatttaatatttattaaaaaatattatttttccacataactaataacaaaataaaataaattattattattttgtgtctctaataacaaaattaaaaaaaaaaatcaattagcttgtgaccttaatttttttttttttatattagttagtgttaaaaatattatatattgcatatttaaatcattaatttaaatatcttaactagttttttattttattttaatttctcattcttattatattttaaattttagaaatgccaaatagcattgctcattcttgactttcgaaaaaataaatattctcaatttttaatgaaat

SEQ ID NO: 11962 - DNA, 744 bp, Cannabis sativa
aaatatgtttttaataaatattgaataagtattaaaaggtaatcaatctaaataaattgaatatatttgaattattgtataaattaaattagatctaaaatataaaattctcactcagtcaaggccgtcttaaggtgatgagaggcctagggcgaaatttgaaacaagactttttcttttaataaaaattaaaataaattttaattaaattttgatacaataccaattttaattcttttatctctatgtaatacataattttttgcaacgtaagctaactcgatcaagtaatatttaattactaagaacatctttattgaagtgctatatattttagcacatttgaaagaaaaaaaaataatgtgtttaaattatttatagttaaaaaaaatagataataaatataaattttatttattattaatagtatcgttaaaaatgtacgttaatattttaaaattaaaattactttaatatattttttatatagtgtaatacaaatatttaagttataatattgttatttatttatttttgaaatgctaagtaaaaaagtattaaaggtgactaaggtaagaatcgaaccttgaacctcaactgtgctgcatgtttttcatttaatttattgagttaaatatttatgtattatatgtttttatatgtatataaattaattttaattttttcggggcctttaaaattatggggcctcggccccgactgccctcaccctctggtcggccc

SEQ ID NO: 11963 - DNA, 696 bp, Cannabis sativa
ttcacgaattttacatgataattatttttattaattttctaaaaataaaaattaaacacataaagttaaatataatatacataatttaatatttataatatcatatatatatatatattactaaaataatatgtttagtaaaatttaatacgaaactaaaaaaaaaatatatacaaacatatttataaattttgtttatgtttgacaaacaatgtatgtatgttattaaatatatgattagtataaatatttataattctattattaatttatgtttattatgataatattttaatagaattaatagaatttgtttattaaaagttctaaataattttaaaaaataaaatacttatgattatttttatttttgtgtaaatagttatgttgattagtcattcaaaaatatgtttgaaaaaaataaataaaattgtaattaaatgtgtgtaaagattatgtttatattattattgagaatgcttattaattttataaataaaatatgtttatcatttattttatatatttgtttgatgtatatatatttattatttatttttattatataattatatgtaaaattaagaaaatatttttataattaatataaaatgtatgataaattgtaaataaatttttatgcacatataatattattaattaatataaaatatctctaaatctaattagaatttt

SEQ ID NO: 11964 - DNA, 886 bp, Cannabis sativa
attcttattcccattctcattctctgacttataatttcaggcacctctggctttcaatttgttcgatcctcagcctatggcccttggcagcgttgtgtccatgaacacaaaagatgtaggttcgaccatataaatatctctttattttctgttaagacttaagattatagaactgtatgcataagtatactgtagtaatatgtcatatatgaaacatttggtaaaagatttagcctagtcatttaagcaattcaggattgactttgactagtatctaggagtattgttttttttttttttttttctatttaagcgtttatatgttacattgcataatctggaactcgaacctaggatctccaacacacaccctcttatggccacttgaggctaggccacttgagctagcctcaagtggtctagctcaagtggttatatctaggagtattgtaaactgttgttacaggcatatgtggacccaagtattgttctatttaacttacattacagctcaaaactatacatatgaaactcaatagtgtatgatttggcatttgtatctggttgttggtagattaagttaactttggccatgatttttcttttattacttatgcataactattccttgtacatcaacttctagctaaagtttttgtgtattatttttaatactaattctcagggtatcactgttgtatcctcaaaaagaggaggggatccatccaccgtgagccattgtgagtggcttctaacagttccatcaatgccggatgtcattaactttaacttcattccaatcatttctcttcttaaaggtgttccggggagaggtttcttatctcatgccatcaatctctatcttagatgtaagtattcaaatctc

SEQ ID NO: 11965 - DNA, 712 bp, Cannabis sativa
  modified_base (112)..(118): a, c, t, g, unknown or other
attggtcaaattattatattaagagcattgctattaagtattattagtggctagtaccttctccacatgtcacgttactattgattggtgatattctttaaaaattattatnnnnnnntatatgggacccgatacttagttagactaatagcgatattaacatataagaagatacaagtataccttttagcatttctcttatattaattgtaccgacagtctctaccactttatagatatgtattttaacgtttagttagcttactctctatgtattatattatattaattaaagacatgatattttatttcaccaatcacaaaatgacactaaaaacacactttttccatttctcatattatttagtctttattatatacatcatcgttaaatatatattggtaaggtctttatataaaataaaactaggccaaattatagaactgtttacaaaaatacttctctttctttcttgatctatctgttacaaaagatggcaaagctgaaaattattgaagtgtgcaaggtagctccctcgcctgctagtatggcaactaccgcttcctcccctccaaactctctccctcttacttgtttggacctaatctggctaaggttgccaccaattcaacgaatcttcttctatgagcttccaaacttagaggatccagatagagatacaactcagtttttccattcagacattgttcc

SEQ ID NO: 11966 - DNA, 534 bp, Cannabis sativa
taacttctcccatgcatcatataatattactaatgttttattcttgctaatgtcaaatcaattttcaattatcaatgcaggtaacttcaacaaccaaaattttacttcttttaagttgtaaacagttacctacatgcaaattagtcctctgagaaaaagaatcagtctctgtgcgaggataactaataaaacctgcttggtaaagatcttctgccacctacaaaaaaaatggtgagcccaagctacaaaggtcatgaaaatatccaaccagttaacctttgtcagctacagcatacagaaaaagaagagaaaaaagagggactttccaaaaaaaaaaaaaagaaagaaagaaaacaaaaacaaaataagagggaaaatgttctttacatctaaagtgatccaaaagaaggacaagatacatctgaggtccttcacccacagatggcacaactataagccaaaatatttaacttattgttcttgtaatacccatgaatacaatatccctacgttaactttctaatctgaaattct

SEQ ID NO: 11967 - DNA, 801 bp, Cannabis sativa
tgaggtgaacactagacgctggtgcggcggtgccttagtaccttgtctgatgtcgacgtggtgaaggaaggaagaagatggaaggtgtggcgattctttgatatttgagaagtgagcttcagtttcagaaacaatggctgcctgatacttttaagagagagtaagttatggcttgctggtttaggtttaggtgtgccgatacatttaactttgctgataatgaataacaaatcattcaaaatcgtcgatcattcaaaattttactctttgctccgaacctaaaaaaataccacaaaattagaataaattaaagtgaagtttggtaattcttttgtgactaattactaatttttttttcgaaattagataaaaaaattctaacatggatgaaagtttaggggcatgatttaatacatatcaaagtttgaggggcatgatttgatagatattaaagtctggagagcatggtttaatacataaacaatcactgaaacagtaaaatggaatgaaattagacaaaagtccttaaatcaaataatctcaatagtttaagtggaatttttaactaccaaaaaagttcatggggcataatttggtatatgtcaaagttcgagaggaaaaattgctaattagcttacttttgttttcaaagtttttaatcacaaaattaaagtaaaatttttatttttaaaaattttgtttttaaaaaacaaaatgacattctgtaaccacttttgtttttcaattttaaaaataaaaaataaaagtgtattccgtaaagttttatttttatttttattt

SEQ ID NO: 11968 - DNA, 530 bp, Cannabis sativa
tcggttcataactaaagaaaaaaatatcactatttgtatctatgtctatagcatcggttgccccaaccgaagcaaattctttatatgtcacttgaaaaccgaacgaaaaaacctttttgttgtagtgcaagtgcagtttcatgaatgtatatacaataaatattatataggttttatgtatttatatatatgtgatatgtatgtgaatggatgattctattattttgaatgtatgagaggtgatgaatcgttaattatatagtgaaattgagtgtaggcttcgttattatttcttctagaaaataatgtaagccaatattggagcataggaatttttatgtaattttattttatggaattatttttatgtgaacattttatgatataatgttcatagcatgtgagctcagattctaatcttgaaacccgaccatgaacatcgaaaacatcacatgcatgcgagctcagaaattcttttatctccccgcgccctccttatcgttgattgtgatggtaccatggtttaacct

SEQ ID NO: 11969 - DNA, 636 bp, Cannabis sativa
  modified_base (386)..(400): a, c, t, g, unknown or other
cagcctctccatggctgcgatcaagcacaaccgaagcaacatcatattccgtcgacaagaattctgctccgacgacttttactccagcaccatcaagtaaggttgatttggtgggatctcgacagctgcaaaataatacccgcggcattcatggcaagattgtatcatcatcccaagattcaaggaatgttggtcaaaggatggttaatgccaacaatgatcctacttttattgtgattgagaatcaatccatgtttacctctaacgtggatatggacttggtggagttgaaaaggaaaagaatagaaaatgactcatacaaagctaataatgtggctatatctatggaagtggaccatgatgatgagcccaataatgttcttgtnnnnnnnnnnnnnnntctttcaaaaaatgggagttcggtaggcctggaaacccaggcccaccaaacattatgagtatcatcaactagaattgtcgtgggcttgggaacccgcaggccttacaattccttgaagacatctgtgtcagtaagaaacccaaatttttattcctttgtgagactatgtgtaaaaaggatactgtggaaagcgtaaaaaataaattgggctttgaaagttgctttattgttgaagc

SEQ ID NO: 11970 - DNA, 600 bp, Cannabis sativa
tatgcgcagtaactatggctacatgaaggaagaggaccgtcttttactgctcaaaaggtgctaacaactaaaagttgaagaggatgctaaggagttcgagaaggtgaagctggttggaaagactattgaaggtgttgctggttgtaacgccgagcagaccgaggtagtcgaccctaaattcttggttgatgacctgttagaatttatgtcctaaaagcaagtaattaatggatattatattagagaatatatgaaataaaattataagataaatgatatattaattataagagtataattattaaatatctaaaaaattccttattcatatggagaaagtataatcttgtaaggatgtacaagaaaattaagattatgcgatatgaataaaataagtcggtagtgtattaaagtattgtgaatctttaatatggaacaactaagtacggtttactatacactacacttttagtgtgtgttattttgattcagatcacatatgtaaatggacatgtagtaaaggtactgtatataattagattatgcatgattggaccccaataaatatcttttattaaggtgttgcttaccatgaaagag

SEQ ID NO: 11971 - DNA, 825 bp, Cannabis sativa
aaaactaacaacaatgaaaaaactaaaaaataaagatcgatataaagaagttaacccgaccaaaccgacaaaaatcattggacgggttacacattttttttttattttttcattggacggattacaattagatatttgcaacccgacatttatattgggttggtaaaaatacactataacccgaccacaccgaccgatgtacacccttaaattttaatatgctcacttgagcttcaagatgaactcttaatttaaaaacaatcggtacattacagttaatatatatacatacatatttttacaatcattctacaagcaagtccatactctgttgaaacacgcaaatgaggagtattagtagtgaaaaacaaaccgtggggttcaaattgagcgcattacttagtaagattgattgaggttcttggttgccctcatgcctttttgtcattttttttcttatccttagaagacagacatctgcacaaaattttttggaaatcttgttcatcacaagggatctctattgcaccctcttgctcgaaaccatactcctcagcagttttatccatcaaacccctaaaatctggcattgacaagcagctcgtgggaatcaaaaacctcctcagctcggcccccacgtagactgctacataccctttcggaacttctgtgctctctgagcctggaagtcccccgtcagatagttttccagcgagcaacgattcttctccatcgacagagtctgaaggcctcaacatctcctcttcattaaatgatgaagaagaagcgatagtggtagtgctagtactatttttatggtaatta

SEQ ID NO: 11972 - DNA, 515 bp, Cannabis sativa
aatttgagatattgtgtatattagattaaatctaaaaaataaaatccccgattagtgcggattgaatgcactataaacaaatataaaataaattgaatcgaataaacacccctagtaatgaaaatgaaaaattacatcaacttgctatttttttacatttaaaatttttttaaatatgtacgtaaatttataaaaactcactaaaataataaaaaaaaaatacgtaaaattaatataaaacaatataaaaattaatatataaataataaaaaaattaacaacaaaataataaaaatataacacaaaatattatattttacataaaaaccgtaaaaaaacattgataattattaagttaaaactatatatgaaactttgtaaatttgataatacttttctctaggcgaagaagaaaaaaagttgagtgtagactgtagtgttgctcgttaccaaagtgttgaagcataatatttcctctctctctctcttgttaatagtgggcaaagactaaaaca

SEQ ID NO: 11973 - DNA, 515 bp, Cannabis sativa
acgtcgtaagattgtcctttaagccgattttttcatcacatagctaattaataatacttatatatacacataaaaaaatgtattgtcaactttattaaatgtatacttaattacaccaatagcaataaaacattgttatgaattactcatagtatctagcatcatgatagagtgtcatcctataattagttagcgatttttcataatatttattaaagtaaaataagtgagatttaatatcaaattgtaccaataacaatatgataaaaaaaaaaaatactaaagggcactagtagtacctagtaccctcctacatattaatataattattagtctaattaagtatcaaatatataatttattgtattaacttttaaagaatatcgttaatcaataacaaaacgaaatgtctaaaaaatactaagcacactaatacttaataagaatgctttaaaactaatacttaacacgtttcttttaacaattctctatatatgaatataattacaaaatat

SEQ ID NO: 11974 - DNA, 531 bp, Cannabis sativa
tttggtcaattatattaaattcaacttgaagttacatggtatggtagtgtgtacgtatatatgtgatttttttttgttaattaaaaaaagcaactgctttataaaagaagttgttaaaatatatatatatatagtgtgtatatatacataaatagagttttttttgttaggctttaagttaatgagctttgttattttaatttttttttttgttattgaaaaaaacatatgtttaaaaaaaacacatatataatttttttaaaatatatatatattagaatgtgtcataaacattatattcataaaaatgtattaggaggtgtaatttatggcatttagttaaatcaaaatttgtgtataaataagaaaaagtgtatgaatccgagttgtatagatagtagatttaaagagagctttaaaaataaatttaatcttgtacgagaaatgaagttgtctagcatgaataaaattgagttaaaattgagttgtaagtttctcttttcaagaagaatcctcttgtggatgtaattg

SEQ ID NO: 11975 - DNA, 541 bp, Cannabis sativa
aggaagaaactactagggacattgaagtctaggaagtggaggactagggcgaggtccgtcctactactccttctgaggtcgaaggcgacgaagaagaggggtagctcacgtgctgccattcaacagttatagtgagcaaggagaacatgtgtttgaagtgggagacatcctggaagctagtcaggacaatgttgaggaggagtacactgaggctcatcctacaagaaggaaaggtccgaagggagatcaaaagatttccccgccatctatcttgacaatgaaaatattgaccaaactttttaaggacgatctcttaggggatgttgaatgcttccttccctgccccgtcaactggctatcgaccctggagagggttattgtgcttggttaggagctcatagtaaatagggtgcaatggtgcctttgctcccatacttcaagaagatagcaaactattaccacatcagtctgacccaattcactcccaagggcctcaagtacttatctgccatgtttgtgttatacgccttgcagggatggg

SEQ ID NO: 11976 - DNA, 800 bp, Cannabis sativa
ttttttttttgttgatttaggctttacaattgttatgaggaatgcgaagaaaatttttccttggtttagattaggtgttgattatgttgaagataaaacctggtttgatcatttggcttgctgtgacatatttatcaatgacttggtaattttttttttccttttaaagctttttatagttgttttatcattgttttttagtttagttactattattaagtttttgttatattttttaactttttcttttgtgtttctttgttgttttgtttcagtatatgaacactatcttctattaccttaggaaaaaagggaaatattcttctgctgttacaatgaatttcgcaacaactgactgccttttcgatgattccattcaatcgttataccacaagttctgcaaagccaaggcaattaaaacaaagatgtctcacatacatgctgctcacccaatagcacattatataagaggcctgcgaatttcgtgttctaagccttggtatgaagccaatcatgtcctattcatcataaatcttaggaaaaagaaccattggatttttggtcatcttgatttgaatgaggggatcatatttctttataattctttgaagactgccaaaatgaattctgcagcaaggagtgaaatagaggcttattctgtttttctccctttattttttgatctccttggattttggaagaataggtacgatgctcctgatttaggttctaaccataaggctcctttaagagttgtggagattactagtcttccctctcagtagaaaaagtgagttgtt

SEQ ID NO: 11977 - DNA, 972 bp, Cannabis sativa
agatttgttaaaggaagattcatatcccataacataatgatctgtcaagacttggttagacattatgggaggaagtcaccaatttgcatgatcaaacttgatttgcaaaaagcctatgacaaggttgagtgggatttcattgaagaggttctaagggggctactctttcctgaaaatttctttatgaattgtgtcagaactccaaaattctctctttttttaaatggatcccttcatggtttctttgaatccaagaaaggattaagacaaggtgatcccctatcacctctcctatttgttattagcatggaatacttgacccgaattatgaaaaaagtaggaagcaaaggtgattttgcttttcatgagagatgtgaagccttgaaggtcaatcatcttagcttcgcggatgatgttctactcttttgcacagatgattacaaaagcatcatccttttactccaaggattgaagttttctcagccacatcaggattacaacccaacaaaataaaatctacgatttatttcagcaatatggctgattctgatgttgctagagtgatggaggcatcaggtttttctaagcaacagacaccattcagatatcttggtgttcccatatgcaccaaaagaatatcgagacaggagtgcactgtttcgacagaaaaaatgacagcaagaatttggtcttggagcactaggaacatttcattttctggaatggttgttctcattaatttggttctaacaacaatacactcttattggtgcaagattctcaagcttccaaaaaaggtaattcatgagattgaagctatttgtagagcttttatttggaagggtcaatacataatgcaggaagctagtttattggcatggaaaaatgtatgccaaccaaagatagcagggggttcaggcatcaaaaaaactgccgaatggaactcagcagcactttttaaagcaactaaag

SEQ ID NO: 11978 - DNA, 879 bp, Cannabis sativa
gggggggggggggtcgaacaaatgttaacaaaggcaagaacccaacaagaaccaatgaaacaactcgagaaggggggtcaaagagcaagaatcaacaaccaggaatataactcagtgtatacaaagcagggaggtacggaagatgtgcatgatgatggaggaaaaggcaaaaggagattggtggaggatatggaggaagtaggatatggaaaactgaaaaaaaaaccaaccactctgtgtacaaagaactgctagaccaaagtctttacgacatcccagttagtcatgcaacagaagctcaattcttgagtgaagcaaaggtctttgcagctggtagtgtttcgaaagaggtagccaaagaacatagaaggaaagtttcggtgaaaatggattcaaaagctaaaaaggggaagatagagagcaaggtggctggtgtttctcaacaaggagattcggtagctacacagatcacggaagaggcgcaccctgaaattctgggtcgcctacaaccatgaatcttttactttggaacgtccaaggattggggaacccttggacggtccgttctttacagtcccttgtgtgtagttacaatcctaaggtggtctttatttcagaatcaagattgaacaaagctcatgctgaaatgttgcgtgtgaaacttgggtttagtggttgttttgtggttgaagctcgggggaagagtggcggtcttattttattatggttaatggatattgagactcaagttctttccttctctccattccatattgattctttcattagaatggaggaggggcagtggtggagatttatggggttttatggcgatctggatcctactcaaagaattcattcttggaagcttttgagaag

SEQ ID NO: 11979 - DNA, 553 bp, Cannabis sativa
gcatggcaaccttgttggtacaacatcacacgcttcacagatgagctgagacccagaagctttgcacattcgtaatcggcaccgggcatgtctacaccgttagtgctacaaaagattaaatgggtgattcttgatttaggctggccccattctttgatggctttcattgctgcctccttccctagcttgggaatctcaacaaccaacatatcttgacgtgtgtttagagatggtgccatgtattccagtaagtttggatgctgatttaggcgatcttcggtcaagtataggtgacgcttctttattgtagttttctcgcctgtaaacatgcatgcgtgtcttaaaatgattagtttgttatgatcaattaatctgaaattatgaataattaagttgattaatcaaaacaaaagtagggtcaatcacaaaccaatcttgatcgatcaaacattagcacaaaaataaaagattgcaaaaagtaaaatcgcacacgagattttttacatggtgtcaacagggccggtcctaaattgaaatgagctattagtataga

SEQ ID NO: 11980 - DNA, 563 bp, Cannabis sativa
tgattcttacgttagactgtagtccatttagtattttgattcgcatggtagcattaggatggataatgtgtgatttctagataagaaagaactgaatctgacctttgttatgattcttggatctttacgtgacgaagaacatgtttaagttcttgaaaaaacacgtgttctagtccaaacaaatcctggccaaccaaggaggctttgtttgaagctttgtcagacataggtggccttcatggggtctagctggccatggggattatgtccttaggctgtctggcctatccttggaactaggattcctaggcggccactaggctggctcttgggctctggccgactactaggacttggaaccctagctggtcaacgcaccaagtgggcagctagtttttctctctcctttgacctcggctagggtctcgtgatggcattggaggcataaacaactgtggccttatgtgtggtttctcttggaaactctgtataaggctaggtaatgagtccattatagtcaattgtacaactttggactgactgtatgtcttagtaaatgtacc

SEQ ID NO: 11981 - DNA, 836 bp, Cannabis sativa
ttgatttaataccaaatttaggttttccagagatgccctatgttgtaatttttctaagtgaatgtaaaatatatttttgtattttttaattttagtcaagtagttcatataaatttattgtaattattatttaagtatatttaacattattaatatgtatataattgtgaaacataaatctatctatatatttataatctatgaatttatataattgtaaaatatagagaggtggcgaaccatctttataaatttcttctacaattattttttttttcttatttttatattctttttaatttattgtaagaatcttgatatgactatttagtagatattctttgtgaaaagtcttacatagcttaaaacctttgtggtattatagtgtaggatataaataaatgaattattttactactatttatatcaaattagtattttcaattttaaatgagtgatttattactcctattaaccaaatagttcgatttttaaaaaagaaggtttgtggatatctttttataaaaaatagctattatttccacttcaattatattattttgagaggtccatttcacaaaatacatattattaaaaaaaaataaagataattttaataattttatggtatagtagtatgtttttttatctatagattaatttaatttaaattttttgaaaagattattatttattattttatataaagatgaattgatcacatatatcttttaagataaaagataaatatataaaaatattaaatatcaatatatgtttctctacaaagagtccttttaaaaaaaaactacaatatttagttaaaccaaaaagaa

SEQ ID NO: 11982 - DNA, 582 bp, Cannabis sativa
gacattacttccagtgatcgagtttcttaagatatggtgtactgtgtaagtgttaaacagtcaagcgataactgataaagtaaaataaagaaagctaacatcggaataaaagttttattaagttgaaaataatttttctaatttaactaaaacaaattgtgataacattttactaaggcttatccacatcaaaaggtctctcgggaacgaccaactaacacactaaagctaaatgctaaaaacaaaaaagaagaatggactcgaaccacatcctcgaagcttatcacatcaatagtagcttcctccttttcctcactctctgcaactggcgcatcaatagcaaaaggaggaaagtagggatgttgatggttgtagccttcaactcttccaacttcttcgaccattggctcactgccatttaaagtaaagtctattttttggagagcttctttaaaacactgctcatagcgctctacaaacttcgacacctgtttatcaaggaaggccgaccaattgaatgactttgctcctccattggcagaccaatcattgtagatggcatttttggaaattattttacca

SEQ ID NO: 11983 - DNA, 933 bp, Cannabis sativa
tattgttgtcaggttgctgcatatcatgagtgtactgagtaattgtcattttctgtcattatcacattattgcacactgttgtgaaaattatattatttatatgcaagtgtacgcaatcgacaacaagtaatataatgataagctgagtatcgtctccatagggattgtaaattaaaatagatgtataatcatctagttaacaacttaaagtcttttgtaagaaaaaataaactaaaaacaaatggatgattgatgaaagtaaaatcaattggtgacaatgaaaatatgctcaaaataagacaacaaatactgaaaaattatctacaagaaaaaatatctatggaataatagacttgaatagaatagctaagcattgcttcagcattacttcaacaaagttacacaatgttaacataattcataaaatgttagtgtttccaaaaactcactaatttagctctaccacttacttcaatatattcctatattaaatcaggttgcagaacaccaattaaacatcaattctcaagttatgcaagacaatgaaatatccctattctatttattaagaaaaacctaaacttaagaattcacttgcatcatccaagttgtaactactagatctagcctttccaaaaccatttctagcttagtaaattgttactcatggccaagtaataacaattaataaacagtaagctcacttgaatgaacaaaggaaaaattactaaaatcatacttaaaattaatcatagcaaacatagaggttcatagccattcaagccttaacaaaattagctcatccttactttagttactataatccaaaacaaagtataataattcgtggctacaaatcagtttttataaaatttagaagaataagaagagtagaaagaaatagaggagacaaatcctaaaaataggaatga

SEQ ID NO: 11984 - DNA, 607 bp, Cannabis sativa
tgataattacatatgaattcttaacattttatgcaaaatatttagtaattacacagaaaaataatattttttagtagttaatgtttaaaatggaaagtttttagtaattaatggggggtcatgagaattagaaagtgtaattggaactcctcaattacttctaattatataattggataataacataaaataccaatttttataaaaaatttacaattttacgtttaaagtttttttttttttacatttttatgtcattctataaaaacacaagaaaactacatgaaagtaataagaaaacaatattaaacaacataaaaaataatatacaaacaacaaaatagtaagaatacaacataaaaatacacaaaagactgtattttatgtaaataaaatctaaaaaaccgtaaaaatattaaaaacttcttacataccgtatttttgtatttttttttttgttgtttttatgcttttttgaaattattccttatacaattatagtgtaattacataatcaaacaaacatatcgaattgtataattattttcagttacacataaatctaattatatcgtgacttttgaaatacgtcgtcttcgcattcaat

SEQ ID NO: 11985 - DNA, 591 bp, Cannabis sativa
attagtgctatttttttttcttttcattttgttaaataatctgttaataaacttacccatgctttggtgcattctttgatccataattaatctaatgaagtgatgattcttattaaaaaaaaaaataattaaaaaggttttaaaattttaatttttttgaagagaaaaattacgagtggggccaatgctttaaagcacgtgttaaggatccaaccatttctcagccgttcgtttttcatcatgtatccatgttatgttgtttgtttatttatatttatttttagaggagaactaagtataattttttagttaatttttatgctcgaagttatatattggaatattttttttttatttttttatagcattatttttttatagttacgatattattcatgtaaatttttaaaaaatttcaaaaattttacaatgttaaaatagagttgttgatattttattttacttaaaaaacttcaaacgtatttttgatattataaattattaaaagaattttaaaaatttataaaaatgatattgtaaatatatcatacacagctataaaaataaaaataacctagcataaaaattaac

SEQ ID NO: 11986 - DNA, 513 bp, Cannabis sativa
ttttgcaacttttggtgcaatatgtttagggtagatatttatgaaaaaaaaaaaaaagaagacaatataattttatctaatataaaacaatggtgaggattgaagtctgtatgacagtttcaacttccaataaatttacagaattctctgtgttgttaatgaacatgagttagaaatatttttggaagcctttgcttctgttatgtgatggtacattgtccttttaactttcatctcttacaaaatatacagacaataaatttaagaacaaaattatataattaaaagccatgagatgtgaaggagagattttttggagatttactacatatcaacaaataattattcaagatctacataaataaacaaatttgatttgatacagaggacaagcttatatagcatattacctttttcaatttaagaaggaacctaatatccctaatttaatgaagtcaaatctttttaaaaagaatcatggcatctaagtttttttttgaaaagagaaaagac

SEQ ID NO: 11987 - DNA, 927 bp, Cannabis sativa
  modified_base (784)..(787): a, c, t, g, unknown or other
gcccgcaagcactccatcaatgttgtgactagtgtttccatggctgctacatttgctgagttaagtgcttcagctacattagaagtcatagtatagtacctgtagtttatatagttttctatcggcaacccttttttatacaactgatataaaactctaaagtaacacagaaataatattttcaatagcagttattttattatatatagtttttattatttcattttattgttttacctcttaatttttgaatgatatcttgactatttctcgtgcccaattttttctagataagatcttatgcgctcttccaagttgtctagctccctcatatgaaattcaaactctatttctgtgtaagcttttgctcctgcaaagaatggacctctggaatgctttgcatttttcttgaattttgttttcaggtttgataagaggtgaaagatgcagtagccatgtgttatttctgcaaacacttttcttattgccttgatgatgctttcatgtcggtcagagattaggcattgatcttctcgaacctcaaatgcctctttgatttttatgaagaaccactcccaggctttgtcattctcaaaatcaataatacagtatgcaagtggaaatatttttgattctgcatcttatgtgttagtagtgagcaatgtgcctctacacacactctttaggaatatgtcgtcaacaaccatgattggcttgcagtttaaccaacctctaataggagcattcaatacaacaaatgcatattagaaactatcattttttnnnntctctatgtcaattattgttcctgtaatttaatcagttatttttcagaaacagtaatatttagcaactgttagtcaaccatttacgaacccaaaaagaaattttatagtttaataaaaatatttcaaaaaattaatttta

SEQ ID NO: 11988 - DNA, 657 bp, Cannabis sativa
ccattacttctgtagctatgatttttgtcatagagccatagagtcatcccatgagcaattggtcatagacaatccaatgatcatactcggttcatcttcataccaaattcaggtaaactattgccagttgcaactcttacaggaacaaatgtaagtggatctctgatgccaagtaaagaaaggtgcctttaacatctagggttggcaattatcggtttaaagattcatacccgagtcgaaaacgggacagggacgggggaatagatacccaccccaaatccgcctgatatgatatatgtatatatatttaagttttaaaatcataattactacaattaaaataatttcatgctttagactttttttactatatatactattccacttaaatccttcccctgtcgagtaatccccgtcccgctcctgctttaatttaaacgggtattggagcgggtatgaggtaaatttaaaaagtgggtatgagggtgggggagcaattctcgcacccgccccgccctatttacatccctattaacatcagataataaaactcaactcaaagagaggtatttgaggggttcattaaccatttataagaagatgcaaattaaatacaaggaccaacaaataaccaaaggcaaaacaaaattacagagc

SEQ ID NO: 11989 - DNA, 709 bp, Cannabis sativa
tgcttttttttactgagtttgtcgcttcatagttatgttttcatgtgtaggtaaaaagaaaggtaaatgttgagctgtagtgagtccaaagtttgcacgtgattgtacatatcgagatggttaaacctggaatgtttggttcttcgggacgacatgggcttatattttatagtcgttgggcgacaccttttgtgaaagacatattttgaatactgctgtaaatttttaacgggatcccgaagttatgtaaatatatgtatttattaaagtttaattttaatcgaaaagctttaatttgttatgtttttcgagaaaccctttgattcacaagagtatgcacagtaatagaaaaattactatagtgtgcttaagcaattagagcgttacaaaaatattatataaaaaaattacataaatataattgaaataataaaatatacatatattagcaattaactcattaattgtaaaaatatggaaaagtaaggcacgagttcaagtctgaatatgaaaacaggctggtctattcaagaaaaatagatctcctcgagcaaagtacgacacaaaaatatcgagcctacaagttatatcgggcttaccatttgcaaatgttagcacaacacaactcattatttttagaacacgacacgactcatattttaaaaaacacaacaaaatatgggtatatatatacatatattgtggctaa

SEQ ID NO: 11990 - DNA, 504 bp, Cannabis sativa
tttgcataaatataatttgttcatagaaaattacttatcaaaaataagcacttcaagcacttatgtattatatttagaatcacatacttagaaactcaaaatttctacacttcatggttgtcactatctcttttttaggtacaaatataattataaatgagtgatttagaggttgtaataactgttaaaaagcatcaacaacgttcaaaaatgcacacacaaagctaagtaacttgttactaaattactagttttttcaattattatcaattactctccaatttaaatcattctcgcttgattttataccacttatacacagattaaaataaatcctcaatagccatattttcactactagtgtaatctgaaactagtagtgcatttacatcgaaatgatgctgactttcgatgttctatatattagagagaatgctcacactttaatgatgcaagaatgcattatttagtggagagttatggatttctttctaaaactaaaca

SEQ ID NO: 11991 - DNA, 785 bp, Cannabis sativa
atttgtcacaaaaattttatatgtgcatattactattgtatcttatatattttaatttaataattattataatttttttaaaaaattacttcatatactatttcttaattttttttaaaaaaaatttattatttaggttgctatgataaatgctccagtgatttttatatgtgtgttgctatgtgaattttagttgcgatttaagttgctctattagttgttatgtgaatttctataaaagtataaaaaaaaactacttttaaagtgtaaaaataaaaaaaaaaaaatctattttttcaactattcaatatatatatttttaaaaattactattctgtatattttaatttaataaccattacaaacaattgtcctactttatggcaaaattaaattgggactttatataaatatttttgggtaatttatagtgaaattcccttacgttttaatttttatacacttaatttttttaattttcttttggtggcaaaacttctttatgcttactttttctttacatatttgaagcgcctgttagatataaccgttaaataccaactgaattaccactatattagtttcagggttttattgtcacatatacacaagtgtatacagttgttaacaaatgatatttaacaaatatttagctggcacctcaaatttataaaaaaagataaacttaaaaaaaaatttgccaccaaaaataaaaactaaaatatctatttctgctaatatttcataaaagaattaaatacataaaaattgaaacaaagaaattt

SEQ ID NO: 11992 - DNA, 985 bp, Cannabis sativa
ttgccaaaatataaatatatgtatcttttaaattgtaaaatagtcctggcctcaattattgcaagtgagacagaactttatatcattgattaaaattattttttaaaggctaattaggatttttgtccctcaaactttaacacctaccgaatcatactctctgaactttgaagactgttaaaaatttcctttaaattattgagattgttggatttaaaaactttttgtccaattttagtaagaaaagtctaatatgaataaaagttagagggcatgatttgatacatatcaaagtttaaggggaaaaaattgctagatatcaaagtatggggagcatgatttagtgcataaacaatcactgaattagtaaaattaaatgaaattagacaaaagtacttaaatctaacaatctaaatagttcagggggaatttttaacggccagaaaagttcagagaacatgatttgatacatgtcaaaattcatatcaaaatttaaaaggtaaaaatcctaattagtcttctttaaattatgaacattacaacagtcaaaacaaaataagttaaaatagtctacttaagggcaaaattatcattttaattattacaccattatgtcacttctataatagttttttttaaaaaaatactgaaaaataacaagtttatccctaacaacaatacgaactcctacgcaaagtttgtgatacgttgaaaaatacttttttttgtatctattaatcaaccctcatattatttttttattaaaatatacccacttttttgagtggattacctaatataccctcttaagtctagcatataatttacataacgtaaggggtctaatggggacatcatccataaaagtgggtatatctaaaaaaatatgaaaataaaggtgaaaattaaaacaagttaaataaagtgggtatacaatgtaatttcctcgcaaagtttaaatataatattattggaatatatattt

SEQ ID NO: 11993 - DNA, 757 bp, Cannabis sativa
caggtataatcaatataaatatatcaatatatattatgtctatataagcacacagctagtttttatgaacataaatgtgtttttgtgttaggaaaaaatatgtttaatatttaaactacttaaaataactttacaaaaaaatagggatagtttggaataatatcacattcacaatcatctattttgtatggattttacacatgcatgcatcatcaactagttttttagaaatattgtttgagaaaagattattaaaggtactccaaaattttggtgagaaaaagaagatcagagaatatttttccactgaaaagtttgctatatatcattgctatcatcacattttgcaaataattaagtttatatatgaaaaataatatatataatcacttcatatatatgttgattatgatctagatattctcaaaaacattattaattgtacagactatttttatttgaacctggctagaatcagtaattagttaatcatcatacttataggaaaaataacccgaattatacttcggtatgcataatatgtgtttagtcctaaattatattaagaacaaaaatcagtgcttttggtgtgtatcatgcagtttttttttttcttttcaaagtattattttaaatgttttgtaagtacattatctctattgtgttttgtttggatttatgtctctgtataaattattctgtgtacctatagatacatgcatgtgtataaattaatatctgcatatatagccttgtt

SEQ ID NO: 11994 - DNA, 594 bp, Cannabis sativa
gccatagcaattaagctgttatgttttctgtttttctttttcttatatataataaaataaacaagtagtatatacttcacactttctgtttttgcttttactatctgtaataagtttgcttaagtattgtatagtaaatgtattaattaattctcacttcagatcctaaaaataatttgcttattaaatgactgtttttctttactttataaagagcttgcaataaaccaagaatagtgagaatgtgttaacaacttttacgtgtttggcgttttgacccgattgatcatattgaccattacatcatctttgtaataaaccaagtatactactaataactagtgttttttcattgagattaacttttgagagccgtggaaattagtggaattggtctcagttttcttatctataataaagtcttggccaaagaaaaaacaaataattggataaattgtcattaatttcctctctaaggctttctgccaccatgcttaaaagttggcttagcttagcttagcttaatttattttaatcttgccacggatggagtcaaaagatttcgcatacaacatttagagcagtgattggatg

SEQ ID NO: 11995 - DNA, 959 bp, Cannabis sativa
aataactttttattttttcttaaaagattagagaaataatattactttttaaaagaataattattagttattgatattaaaatattatttttagtgttacttttcaattaatgacataataataatatttttttaaatttaatattatttttaatattaaaagggaatatacattaattatacaagatatatgtgttgtctcattttacttatatatacacataattatctttattattattattagtatatagatctggttttataaataattattattaaatgcaaaattagattaaaaaaagaaatattatttatttaaaaatatgcttattaataacaaaaatatatatatatatataaaataagatgatcgctttcacaaatatctatatatatatatatatatgagagagatataaatcactccaaacacttctaattattctctccttaattatttcacttttaaatttttttattagggtaaaatcatttaaaatacaattattgattttatctttaattttctcatgtttttaataaatttttaaatatttatatacaattcaaaaaaaattattattctaattttttcatttaaaaaaatacatatcaataaaaaattatatttttttaatttttgtattagctttgtaaatattaattacataaaatatatatttttatttattttttcggtgacatggcactttaaaatctattaattagtattaattgtgctttccttaattttcttatttttctttagtttttaattagtttcataaatattaattatataaaatatatacttttatttattttttccttatttttttcaattttttattttattatttttaaaaaaattataactccaaatctaattttcattttttttttcaatttattagttatatgtgtagtacaacatttttttaagttttttttttaaa

SEQ ID NO: 11996 - DNA, 517 bp, Cannabis sativa
aactagtgagcaacattgaaagttaactcaatttactctcttagaaaaaatgtagtaaaaaatcattctttctatttggggtgggttctaactacttcactcaaccacactattccaatatgatgaatttaaatagtgaaattcaatttacaagacttatcaagatattcttatacacaatcaacacatcatttaaataaataaatagatgggtgcagagctgtttaaagagcatttagaattagagttaacaaatgatcaaagcacattacaaaatgacgaaaatgcccagagtcttatccaatacagattggcaataaataaaaatttcctgtatagaacccccttaagaaattttgcagttctaacatcaacatcatagtctggacacatatctaatcaatctacaattgtatttaatgtaattagttaaccatcttaaccacagttggtctcacaaatgagcataatttcactcttaaataacaacggttccattggtgtaatgaatgagtaa

SEQ ID NO: 11997 - DNA, 728 bp, Cannabis sativa
tgttataagataacaataaaggtgcatagatgcgtggtgagtacaatgagaacttggaggtgactcttctaccaaaatgttggaatagagaacatctttgtatgtgctctcactagaaattttgtatgttagttcctctaatgtttcaccgtgtaggaacccataaaagagctaatacccattgctttttagcatggcctaccctcactctttagtgacggccgttgcgcggcaagccacacaggggtagcaatcatatgatttcaaaagagaacactaagctgtaagctttcattacacgtttgaccgactgtctctataccacttctaacaaatataacttcttaaagttattctttgctagttccacttgcatacacccggtagcaccttgagaaaattcccaggcaaggtttgtgaaacttgatgaattgtaagtcaccaagagatgtgcttactttgggggcacctacatcgcacaatgcatcgaactaacatgtagaacttatgcagagaaattttaacacttacaataagctactaaacctgcctctaagtcaagtgtaagcatacttcggtttgacataaagaaaagtaaatcttcatacttacatgtcaaggtcataaaaagatagccaggatgatcatatgtcaatgataaaaggctttaaggataaatgatagtagtgcttgaaaacagagcgcctatgggccaaaagcaagaacat

SEQ ID NO: 11998 - DNA, 1282 bp, Cannabis sativa
gccacttcagacatttcctctctcctcaaacaatctaagtgttgtaatcactcttgtactactgttgatagttcttgtattcaacaaagtaataaagaatctagttttccttactcttgtattcctactcctactgctttactgtctcacactaccaatgatattaacaattggcacaagaaacttggtcatccatctttccaaactcttagcaaaattttgcacaaagccaatatcccatgttctcttaaaaatttagacttttgtaaggcttgtcaacttggaaaaaatcatagactgccgtaccctttatccaaatctagagctaatcaacctcttgctttagttcacacggatctatgggggccttctcatgttgcatccaaagaaaactacaaatattatatagtttttgttgatgattatagtaggttttcttggatctttcctctcactatgaaatctcaagcttttgaaacttttattaagtttaaaagccttgttgaaaaacagtttaatttaccaattaaagctgttcaagctgatgggggaggggagtataggccttttgaaaaatttctaagtgaccaaggcattgtgtttaaacaaccttgtcctcatagtcatgctcaaaatggtagggttgaaagaaaacatagacacatcactgaaacaggtttaacccttctagctcaagctaatcttgatctttcttattggtggtatgcttttcaatgtgctacacactctattaatcgcatgcctacacctgttcttgataatcttagtccatatgaatgtctattcaatgagtcacctgactatagtatttttaaaccatttggttgtgcttgttatccacatttgcgaccctacaatcatcacaaacttgagtacaggtctgaagagtgtatttttctgggatactctccaaaacacaaaggttatttgtgtgaaaatgcagatggaagaatctttattgctcgaaatgttatctttgatgaatctacttttcctgccttcaagactgctgttacttcatcaaatgaacctcctgaagctcctttctactcaatcatgcaatttgcaactggctctcaacatgttcccactgctactgattctgagccaactgaaatgcccaatcttgacactgctgctgctggtttaaatgcaactattgatactgctgttgcacattctaggactggtgcaactcttgcacctgctatttctgatgataatccctctgcatcttctcctacatctcatgaaagtatac

SEQ ID NO: 11999 - DNA, 501 bp, Cannabis sativa
ttcgatttcgaacacatttttctttggttgcttgcctctccagtattcgctcaattttttattttatttttatatttccaagttgtcaaaatatttatcaccaaaatgttgtttggagtaaataaattgtttagtttgtgagtttgagtccagcatttgtacagctcatttgtttgtttgtttgtttgtttgtatcccaaaaggaagattgaaactataaaagcaaagttggtgtggccatttcttatagttgttaattcaacaaatgcatcagcatactctcccaaatgattacttgcaagaaaactggcacattcacattctcctaatagcatggcaataaacccattttgccgggttgaaaccacatcccgctacatttacatccctacggccctaatttttttttttattattatcaatattaatgttacgagttatgtattataaaaacttagcatactttttggctagacaatgtctgttttttttttttttttt

SEQ ID NO: 12000 - DNA, 643 bp, Cannabis sativa
atttccatctaataacaatatgactgatgcaatatttgatcttattcatatggacatttggggtccatattcaataccttctattgaaggatacaaatactttctaaccatagttgatgaccattcaaggcacacttggttatatcttttaaaatcaaaagctgatgctccctcgactatacaaaattttttctctttcattcttaatcaattcaaaatcaacataaaagccgtaagaagtgacaatgcaaaagaattaaatatgtctgcattttatgccacaaaaggagtccttcactacaattcatgtgttggcacacaacagcaaaatgttgtcgttgaacgaaaacaccagcatattctcaacactgctcgagctcttgctttcaaatctaatctacctttggtttattggagctatatggtgactactgttgtatacctcatcaatcgaaccccatctgtcttactcaaagacaacacaccatatcagctactgcaccaaaaaccaccatcctatactcaccttcgaaactttggttgtttggcttatgcctcatctgtcataaacaaaaccaagttttcacctcgagctatggcatgtgtttttattggttatccattcaacatgaaagcttacact

SEQ ID NO: 12001 - DNA, 515 bp, Cannabis sativa
  modified_base (348)..(364): a, c, t, g, unknown or other
ataacaacaattatatcattctaactaaaattttataaaaattcgttatttattataatttaagaaaaaaattatatttttgggaggaaaaaaataactacttaaaaaaattagcaaagtacaatacatatatttaagagtttttggcgattaaatctctcaactatcattccacttacacttaaccctttaagctcaaattttagtgataaaaccctataaattattgaactgttagcaaatttaaagggtcatttatttcatagttaactgtcaatatagattgcttatgtgtatactcatgtacacgtggtacatttatattggtaaacttaatattattatttnnnnnnnnnnnnnnnnnatttcaaaatttataatttttttttaatttttgtaattttatttaatttgaaaatgaattttgaaataataatatatattaggtttatcaatataaacgtaccacgtgtacaagagtgtatacattagtagtctatggtggcagttaatcg

SEQ ID NO: 12002 - DNA, 682 bp, Cannabis sativa
cctacacttatattggagggaaaattttttagcattggcgcctatatttcccctatctttattataaaatttattttttaattaaaaacaatgctgatatgtacaatgatgtgtcaaaaattatcctacatgttacaattctaacttacaatatactgtcatatcatataatcatatcttatatgtcactatatacatatttctaaatattattatgtatatatatctaaacattacacgtattataaaagattaaaacaaattaataaaaaaaagtcaacctaagtaaaagaaaaaagaagcatatatagaaacctttaaacaaagaaaaaccctacacttgaccattctgacgcctccacttccttcccaaatctctacatccttctcaaattttgcttacatgaatgaaaccatgactctcttgaaggctttctctttgtataagaggtatttttcttattattttatgctttcatttttctttaattttatttttccccttgagattcaaacaaaattatttctccataataaataaaaatcataaaagaatttgataatatattacattttgtagaatttgtgcgttattttgtttatttctcatagattttttattttttgattctcgtatatatatatatttaaataagaaaggatgttttcttgttaagaatag

SEQ ID NO: 12003 - DNA, 710 bp, Cannabis sativa
  modified_base (57)..(62): a, c, t, g, unknown or other
aataatttaaatttaaaattaaactgatttagaatgttttttttctttttttttttnnnnnntttttttttttgaaaaaaagtctgttattataaattaagaagaatcttttataacaacagagaaaatagaagaagggatctcttctatccatatacaatcattatccagctgtaaagcttgtttagccaggtcatgagcggcttggttagcatctcgtctgacatgagatatacaagcattagaggaagaggataaatgataagaaatgtctttaactaaatcatggaagctagaatgttgtgactgagttccatttatggcagtaactagcatcataccatcagtttccacatagtgtagttgtagttgcaaatgttgagcccattggagaccccaaaacatagctttggcctccatttcttgagatttaaagttgccaacagtaggcttagacatagctactacaacactacccgatgagtctcgtatgatcacaccaatacctatcttactcctcgaagaatcaattgattgctgcagcatccacattcatttttaattttgtctctggaggaggaatccatttcatctgatttacatcagctgcaacacagaatgctactagtgtagtatggagttgcacagatttgaaattggctagatatacttcggcttgtgatgaaatagccataggttgcttgagttgt

SEQ ID NO: 12004 - DNA, 949 bp, Cannabis sativa
ttgcttcacacttgtttgtccatagaaattgctgattctttttagttagttctgttaagggtgttgaaatcttagaaaatccctcaataaaccaacgataataaccagctaatcctagaaaacttctgacttctataactatcttcagtctcgggcaatccttgacggattcaatcttccttggatcaaccttgatcccatccttactgataatgtatccaagaaaagacacatgggataaccaaaattcacactttttaaacttggcagacaatttatgttttcgtaatcactgctaaaccatttggaggtgttgctcatgcttcggttctgattgagagtacaccaggatgtcgtcgataaatactacaacacatatgtcgaagaaatccttgaataccctattcatcagatccataaaaagctgccagagcgttggttagtccaaaggacataacaaaaaattcatagtgctcatacctagcgcagaaagcaatctttggaatgtcgtcctcttggattctcaactgatgatagcctaattggagatcaatcttagagaatactgtcttcccctgaagctaatcaaacaagtcatcgaacataggtaaaggatatttattcttggtagtttatttagttctcggtagtcaatacacatgcgtagggatctatctttcttcttaacaaacaacactagagctccctagggtaacacgctgggttgagaaaaccctaggtcatgcatcccctgaagctgaagctgaatctttaattctttaagctctattggggtcattctataaggtgctttagaaactggctctgctccaggtgctaaatcgataacgaaatctatttctcgcttcgcgatgtacatctaaaaattcctgaaccactctgatgtcttttggttgaattatttaggtagtgtggtatccaataccac

SEQ ID NO: 12005 - DNA, 977 bp, Cannabis sativa
  modified_base (246)..(248): a, c, t, g, unknown or other
  modified_base (463)..(471): a, c, t, g, unknown or other
atattgaataaccagcaatttacagtactataacatccaatcttatactacataaagaatgattaatagtctaaacattgttatcccaaaaaattatatctcatattcttactacaaaaaaatcttacttttatttacaaaaattgataaataaaagtaaaaaagttgtgacaaattataaatcatcattcctatattataattaaaaggtccgtggttaaatgtattagtcacaaaaattacaannngttgtgactaaatgtatttttattcacaatatttggaacaccaacaaattctctttattgaatgagtaagaacatgtacaatacagtcgacatcgattatataaagagttctcttgaagtgtttcaactctcacactcttaccccaaaatcttcttcatctatatatagaagattcatcttacacgaacctaaacccaatctctctctctctctnnnnnnnnntctctctctctctctcaaatcaatctgatcgttcttttttttttttttcccgaaatgataagtgttggttgtacttataggcttaggatcaagatcctaaagtcggtggttgcaagaagggaggttgttaagttagttaggaaataaccaacttaaccaactatccttagagtgaggtctccacgtcagcctaagtaagcgtgcatccaggggcgagtatgagggcttccggagtcacagttcagggcactccctgaaggaccttcctggatagaaaagtgccaactggagtggactatttgagactataccttctaggaggaatagctagccatccggaactctttcttttccggaggacaatcgtttcttgaaggacaagaaagtcttccaagacttacatccgcgactcaacaactttttacgaatgataacaactcttggagatctttttatctggaggaactataccccaaatactctatgttatataaccacaattaata

SEQ ID NO: 12006 - DNA, 729 bp, Cannabis sativa
cattctacttatactaacatcccacctccaattccaccaacaagtccaaccccatttgttattactattgttgatgaggcagttattatcccatttccctcctatctacctacttcaccaatgatagccacttacccacttactacttcgtctaataaagcattccacaattttccacccctggctacaccactaccatcgacccccttcatataccaatgttatcaccactcaaccttcatttgaagcaactgtcccttagaatgtttctaaaggaaaagctgtcattgcgtttgatgttgacacagagaacattaatcctaataaacagttcatacgccaaattaactctgaatcacttaggaatgtcctaaaacgatgtcgatctaatgccattcatggtcaatcgggcactttaacacctactgatcatacatcggtccagcatgtttccaacaacttcttagattcaggagagcagtagtttaaatttccagcggttgttactatgcaacaccgcgcccaaccatgaattttgtaagttggaatgcgcggggcttggggaacccgagtgcattcaggcatttacacttgcttgtaaaagagcaagcaccctgtgttctttttattatggaaaataaactaaagtatggtagtatagataagtttcgcaataaattgcacttcactcatggtttggaggtaccaagacaagggcaaggtggtggt

SEQ ID NO: 12007 - DNA, 622 bp, Cannabis sativa
attaacaaagtcattttagtctttttagattttttttttgaaatgtttattgagaataagtcaccaaaactactcaaagtgagcaaagttaaaattttggccaaccatgcccttaaaactcgaaaattaaattttactatctttatgttttgttgtatttatcttaaacaatatttaattactttacactttctcgctattagggcatttccaataaaaaaaattgaaatggtatattgttatacttttgtgtacatttcaattttttttttttttttaaaaaaagtgttaaatttgacacacgataaaaattgtattaaatttaacacaaaatagatacaacattatgttacatttagaacaatattaaattatatatatttattataatgttactaaatattaagatttactgaccattataaaatctatattctttattcagtatattactataattttggaaataaaaaattaaaaaataataatttttgcacatattattcttaataaaatattaaatgaccatcaataatactttaattatgtacatattttaataggtgtggtacatttaaaaattaattggcaactagggcaattattaatagagaaatactaa

SEQ ID NO: 12008 - DNA, 775 bp, Cannabis sativa
agtgatgccatcacagtagaaagtaattttgactatattcttcaaagtttagtcccatgatttatcggtgcattagatttataatgatgtgataatcagtgataaagttacttacacttagaataagtggtatgacatttttagagcattggtaaagtatgctagtatcagatgtatggactatacatcggactggaccgatattgaacttggaaaagatatcataaacaaactgttatatctttctaagtcaacatcacttagttgatcttagatcaatacatattaattctaagatgattaggttatggcttaactgtattatttatgttctttgacttgttcgttaaagctgaccaaacggatcgacataatacttacatcttgggagcatgatagtaaagttgagtgggagcgccctccggcaacaattgcaagtttgccaccaataacgctcagctccaattgctccatcaatagaggcactattgaaaaagaaattcaataaaaagaaaacataagggccaacacttattaactaaaaatagactctagctagctgctcttaagaattgtttatgtatttttttaatattttatattaatagtgtcatttctctttttttagagtttttacttattgagtggcagtacttttatacactatgaaaaaaaattgggtacacaatagtatatattagttagttcaaaagttaaaatgtctctatactataaaaacaaaataagtatgcttatcatagaattattctatata

SEQ ID NO: 12009 - DNA, 687 bp, Cannabis sativa
tttgacatgatggtcgaatttcgggtataacacttgctcgcacaattcaagtcaatactcaatcatagtgtggaagattgtgcagaattccatcatttaaggaaatccaggttcagatcttggtaatactctgtgacagaaaggaacaatggttgaagatctaacggaaggaggcattatattccgctaccactaatgtaaggttttttacaattttatatgtgtttattttattgttttaggaaattcatgttaggatgttagattatagatcataattaaacatacatattagtaaatctagttccttgtaaaataagttccaacaactattatcagtgccatggtaatgatttattttcatgaaatatggatttaaaaaagtgatttggttgatttggatgtgttcatgttggtttatgtatgtaattgatgattgaatgtgaattacaaaatttctacaaaaaatatttttatttttattttggaagtattttttctagaaagttggtgaaatcttaatcaattttgacttttacaaaacttaatttgaattaaaattgaattagttatgattttttgaagttggaaaatatctaggctaaggtttgcttcactcacgcgtgcggatttgaggggaaagcttggtcatgacacgacttcagacaagccgtgtccgagatttct

SEQ ID NO: 12010 - DNA, 528 bp, Cannabis sativa
actttttttatttttcaattatgcattcataattttaattatttttattttaatatttattgagttgtaagtaagtagaataaatttattaaaatgatataattgtaataagataataatattatgcctaattattagaaaaaaatccttaaaaaaaattattagaacaaatctcaaaatatgatcctttgctaaaaaaatcaaaatatgacatttgtcatttaattatagaaaaagtacaaaaaaaaatgtaaaagaaaatcttcttagcactgccaactcatcatgactgtcttatttttcttatctcactctttaattataatggtcactttttctttaacaaaatatggatgtacataatatggtacaaagaaataaataagtaagagataaggacttaaagggctacaaagaaagatatgttgttaaccttttaaatttcattcattatgatgtagtgtattagaacaaactaacaataaatattttcaacagtaatatatctgatagtctgatttttaaaga

SEQ ID NO: 12011 - DNA, 580 bp, Cannabis sativa
  modified_base (231)..(239): a, c, t, g, unknown or other
attaatattgagaccatgcttatacttttaaaattttttatattttagttgaactatgaaattttaaaacagcaaaaattatattataaaaaattaatgtagtgagcaatttaattaatatgttttaaaatctaaatatataaaatagttcagtactacagcttgaattgtaattataacctttactatacttttaaaaatgagattattttataaatacacaaaaataannnnnnnnnttacaaaaatacgattttacgaaattttaaatatttttactattttttttattttatttacagaaaatacggtcttttttatgttatatttctgttaatttgttattaatttttcgttatctgtatattatcttttattgttgttttgatgttatttaaatgttatctttatatagttttcttgttgtttctataaaaaattgtaaaaatataaaaaaaattcttcaaacataaaaaatccgtaaaaaatagcatctaatgtaattatctctaaataaataccatcatagtcctaaatgattttttttttttaaaagggtccttaaatgattttttttttt

SEQ ID NO: 12012 - DNA, 610 bp, Cannabis sativa
aacctcatcaccaagattgaggacaatgggactgtgtgcctaggcttcaatttcaagtttcctcttcttgtcttcaatcaattccatggcttcagcatcaagtgcttcatagatcccttggtgaactagaaaagctttcattttgattttccattggatgaaatcattggaaccagtgaacttgtccacctcaaaccttgatgtagccattcaaaccatgttcttgattgctcaaatttgattcttgaaagttcgagtttaattctttaatggcacgtttactacacagtattcagaatcgaaataaagtaatggagaaatgtaacagaataaatgaagaataatgagaatcaatatttgtaatatgttatttactaaattttttggaaaaataatgatagtgatttatcttgtttactttattaggaaacgtaatcagaatgcttaaattgactaaattacccttttgaattaaactatagtatatggtagttattttgtaagacttattttaaaggataaaattgacattataaatttaatattaaaaaataatataaaaataaaatgccttaccttactatttattctcatttcttattagtaaaca

SEQ ID NO: 12013 - DNA, 864 bp, Cannabis sativa
tttttggcaagactgatctaatagtgattggaagcaggtgttgcattaatgtgtgataatcatggtgatttcatacccattagtttcaagttcagtccgtatttaaccaagtttttgatgttagacgagtccatcaatactttcattttgaaaatgatttgcaaaccattagtatttcccttttggacaaagtgaaacaagcaagaggcaaatataatcgttcacctttctttataggtggcaaagattgtctgccagtgaaatgaaaactgcgcgactagagcacacatgcttgtaaaaatcatgttgaattatgcagcgaactttggcttctgcaagggaaggctgaagttacgcttaacttcaagcaacgatttcactttcaagcactgaaggtgagagccaagatgggcgttcaatagacttcaagcaatccttcccttcaggaatgaaggttgaagatgtatcgaacctccaataatcatccacatggaagaaacacgtgtgctcgtgagaaccgttttgaactatacaacaaactttggcttccatgaaggaaggctgaagttgtgcttaatttcaagcaacagtttcactttcaaggactgaaggtgagaaccaagctgggcattcaatagacttcaagcaacccttccctctgagaatgaaggttgaagacgtatcaaacccccactgatcttccacgcatagctgaaacacacgtgcttgtgtgagccattttgaactatatagcgaagtttggcttccatgaaggaaggatgaagttgcgcttaaattcaagcaatagttttactttcatggactgaaggtgaaaaccacgatgggcgttcaatagacttcaag

SEQ ID NO: 12014 - DNA, 699 bp, Cannabis sativa
atcaagccatactagctaaatatgcttgggctatttctttgaagagggatattctttgggtgaaatgggtaaataatatctatcttaagaacaagtcttggtgggattatgagcttaagaatgatactagctggtattggaggaaattatgccatctaaggggcaaattcactcgggaagctatagaaaaggcaggggcaggaaggcataaattcaattccactttattgtataatagtagccttcctcaaacccagtttgatttcaacaaatgtatttggaattccctcaacatgctgaaggacaaattcattttttggcaagctatcaatgctcaacttttaactcgtgacaagtttgagcaatttcagatcaagcttgacaacattaattgcccggtttgtgagttagtagtagagagcaatgctcatctttttttttttttactacaatttttctcagcaggtgatggcaaaaatctgttcgtggttgggtattagtggatggccgactgggtatactgcctggcagcagtggctgttgcaaaccagcacagacaagaagcaaagggtccacatctctataatggctgccatgatttacagcatatggagcaacagaaacaactgtctcttcaacaattactcgagtacaacaactaaacttacacaggatatcaagaaaatagtttactataga

SEQ ID NO: 12015 - DNA, 839 bp, Cannabis sativa
ttaagcattggtattagggcctagcacattctagacttgtctttttgtgattggttaacgatactctttaaaaattattacattaaattatataggatccgatacttaattggactaataacgatattgacatgctgtagaaggtgctaggcaccactggtatattttagcatttctcttttggtaacaatataattagagcattgctatgacatgacgtcttacaattagttagttattctctataatctttatcaaattaaaataagaagaacccaatactaaattacatcaatagcaatattacatttcataagggtgccctttagcatttctcatataattaaggcaccaatgtgattagcactactttggcgccttacattggaaaatttaactaattaggcatttattgggccaaaattatttttctatattcaatattagtagaataggtcattttttctttaaaccccattctacccctcccatttgaacatctctgtgtgtgtgtgtgtgtgtacacgcacacggaggagcagacaattagaccaccttgaccttgtgaccacacgacccacagaccaccgcgaccacaccacccaacgccgacaatatcttcgtcaaaggtaacccctaatttttttcatgaacttttaactgtaatcgttttataatttcatgatttagggttaaggcaattatatttagggttaagtctgtatttttagggggaaatatgtaatttttgagagttttaggctcagatctgtgttttgggggagaatttacgattttcgcctggttcgatgcaagtatgatgtaggcccaatataggg

SEQ ID NO: 12016 - DNA, 752 bp, Cannabis sativa
ggaactcgagacggatatgcaacacaaatatccagaattatttaggtaaatttcaggatgaaatttctataaggagggggtaattgtattaccctgagattaaggaaatggattagtaaaaccctaactcgttaaatgactatgattgtgaaattatattattgtataatttattatatatgaattaatgtgagatatcacatgttaagaccccattggtgagttagggacattttagtaattttgacccgagaagggtaaaactgtgaatttaatttatttacgtgcttatggactatattattttatagtatacctattttgtcctttttcaggagtgttctgataagtcagcgcggtatagttagaatagggtatttcaggctgaaccagattcggggccaaaatacaattttgggattaattattggcattttatttatgtgggaataatctgaaaattaattgagtttatttgtgtgaggtaatgatatgcttgcccttggagtgtatgtatgtatgttatttggctttatgggcatttggataatttttggtatatgtgctattttgaattagaacaatttctagaaaatgaaatagaaaattctggggttttctttcagtcatagcttcagtcatagccgaacccccttctctctcttatatcaatattttttaatttatgaagtgttgaaaaattgatcttgaagcttggattctaggtcggtttttgggcttagcttggtgtt

SEQ ID NO: 12017 - DNA, 699 bp, Cannabis sativa
tgtattaataaactaacttaatattgactaatacatttttaataaattagagtccaaacggcggtgtttcagcttgggagccaactggagctccaaaatggttggaggtaattaaattacttaaaaaaaattcataatcatattttaatttacatcaatcttcattattaaaactagtaaaaaataatattatttcttttcttttttcagtggctcaacccggtggagtttcttgaagaccttgttattgaatatgagtaagtaaaattatcatacatgaattatcaatattgtgtatacatatcaatagagaaaattatgtataaaaaatcggctctaatctttttcaatgttatcactttatactcatggccggctttctctctctctctatctatatttacatatataaacaggtacatagagtgcacctcttcttcaatccaggcattaaatctgtttaggaaattacatcctaggcacagaaagaaagaggttgataaattcatcaccaatgctgctaattaccttgaagatacacaaatggctgatgggtcttggtatggaaattggggaatttgttttgtgtatggcacatggtttgccattagaggattggagggtgcaggaagacactacaacaactgtgaagctgttcgcagaggcgttgaatttttactagaaacacaaagagaagat

SEQ ID NO: 12018 - DNA, 688 bp, Cannabis sativa
atggatggttctctataagatgctaaaaagtataaagtgtcattcttgttttgaagctcagaataggaaatatctagatccgaggtcaattaagcatgctagtaagactatagagaaggttatggtcaaggtacttgtttctcaaaggagacaataaaaggtaccctagaagaacaataaggtggaggaagccacctaggagttagagtctggtatgagggctcaatatcaagagttatttagggtagattttgaggacgaaattattttaatgaagagataattgtaatgaccgcatgattacaatatgaattagtagggtaattagtatttattgtctttattatatagttttattcgaatatttatgttatgggtcccatttttagaaaataaatgttagagttataattttctgattttaaagattttattaaactctaagagtattatttatgctaaatatgaaatatgtaatttttatgaattttgtttggggacgatagaaaatgcgatggatgacctatctagtcacttagatatggtttagtattatagaaatagcaggatgatttagttagacatttaaaatatcggtattaagcggggttatggtattggacaactttacccctaagccattagatttcttaagcttgaagtaatgggcaaaattataattttgcca

SEQ ID NO: 12019 - DNA, 1049 bp, Cannabis sativa
ctaatctggagattgcatcactcacattaaatatgacaattcaagttgttgtttctaggtattcatcttgttgaatgttagttgtattttctggccattcaataggttcttctaacacccttagtaaattctattgagctagcaaggatttgattttcctcctccatactctgtagtcacctgaactatcaaatttattaatgttagtattaatactactcatattaaatctgtcagaattcaaatcaaggatagggttaaggatttctagttgatcatttagtggtatatctaacaaatcacaccaagatcaaggccatcttcttgatccaatctttcttgtgattaaggatcaacctcctcctgatattaaggatcaattgcttcctgaccttgaatatcgatttcttccagtattgcttgttaattgtatcaaactataccttgaattcttggagaaaaaccttgctctgataccactgttaagatctgcagttcctaacacactcaagatacacaattaacacaaagttgattttatgtaatttgcaaatttgttatacgtccaacaagccaagcctttcacgaggatgaccctagcaagagactaattactcaatccaaaggttcgagattcaactcaatattgtatctctctgaacgagagaagcactagggttccaagatcaagtagatctaacttgatctctcagatcaaacacacacatattaatcatagtatacaatatcaagaacacgaacacacacacaacacagaagagattagggttagagatttagagaaacagacagtgtaacgaagaagagaataccaaaatttgatctcagagttcaccccaaatcagtgggctacgtctccatcaagctacctcagagtgcttgattttcactatgaacaacaggtaattacaacttccttttagatttcaaaccacagtttcttttggttgataatcaatgttttctctttgtttttctttctcttctcttctcgatctaattctttttgtttctctcttttgtgtacg

SEQ ID NO: 12020 - DNA, 640 bp, Cannabis sativa
agcaatggttttgtcaagggaggccgaggctaagagggtgccgccatttgagaatttgacacatgagatggagcgttcgtgggctccaagcgtcttcaggtaccggtaaggcgtgtaaggcgctgcctcttgctagcttctcgccatttttgtgcacgaataagaaataaacaaagaatcgaaggacataatatagacacgctgaaatgaaaacaagtgagaaaaaatttcgtcaaaaaagatcgtgtatgagtttgattcatgatcttaatgtcttcattttaaagaggtgtgaatgtgatagtgatactgaaataaaatagtgactgaaaattttgaaactgctattggtttaactgtttataaactgttttattttaattttttatataggaaaattcttttagaaattatgtttcatattttgccaatgttattcttccaggaatcaattgtagccttcaagacttcctcatctgctaaatatttggttcatgcccatgttctttaaattgtgacgctggttgtaacctaagtaaattaagattccatttatttatgttactttaaaaagtacattggtgaaaaaaaaaaaaaacaaaattaagagaccggaaccggatgataagcaaaagaaata

SEQ ID NO: 12021 - DNA, 643 bp, Cannabis sativa
tctcttctttttaatgttaatttcttagtaattacaagaaatatatatttttttttttttggaaaatcagcagtgtttttcattactccaaatgactttctttacaacctattcagcactttttttataaaacaaggtctgattttttccttctaattatgtacatttgttacaattcattaaaccatgttgtatcccctattgaaaccttcctaggccatacactttgtattctagttttacaaatatttttaatcatctatacaatagtcttcgggtcttcttttgtttgcagccacagtctattgttccttgctctccaaatatggtataataatgctgcacaggcagcagtaagtacctatcttcggaaagcagatgtggatctcttctctatacctcgcactagatcgtttaagttagttgctagagtcttccatcccaaccaactcttgacctggtttagacattcaatagagaaagggcagtgaaaaaacaaatgctcacaagtttctgcactccccgagtggagcaaacatgagggatctgttgcaatttgaaatctgagaaaacggtctctggttttcaatctattttgaatagcaagccagaatacaaaactgtgtttaggagtatttagccg

SEQ ID NO: 12022 - DNA, 532 bp, Cannabis sativa
atccaacactaacaccactgtaaagattcgatttaggtgaaaggtgggtaaaaaatctttgaaatgtttttaattttcttttcttagaaaattttggttatttatttgttggaaaacatttttttaggttctcaacaatcttcaacaatgattcaatgttaaggatttgaattggaaataatgatattaaagctatgaccatgagagtacgcgcgttcctgtacaaaggggtggtcagtgcctggcaggcccggccctgggcataggcaggctaggcctgtgcttagggcccacccagtccaggagccaaatttttttttctaacataagggcccaaaaaataccacatttttttattaattttaaaaaatactacattttttctaacataagggcccataaaattttcttttccatgtggcccactttgtttcaggaccggccctggtgcctggttggcaacttggttgctctctctctaactctctctcatgattgatcgaactaatttttttggtattcttgaaaggcc

SEQ ID NO: 12023 - DNA, 550 bp, Cannabis sativa
agttttaactatagagtaattgcacttttacccacatgcagtttgtaataaatttaattgtgtattagtccttttacctttctataaatagaagcttacgatttgaattcaatacagtttcagacaaagtaatctagagaaaacactaagagcgctcagtgttagtttaccgctttttttaattaattttcttatgagtttctaagataccgtattattaagttggatgatgaaatctaatgtattgagttaagtatttatttttattttgattcttagtacaatatatgcttatgatttccacttcttaaaataatttctttcatttttaatatcacgtagttttgatagttagaaattaataatgctggattttatatttttttaattaaaaataatattctttaattttttatatttacattaaattattgcacacttaatgcttagaagttatgattttaaagcgaaggaaaatctattttttgttagaaaataattagtttgattactaattatattatgagaattaatattaatataaatattt

SEQ ID NO: 12024 - DNA, 680 bp, Cannabis sativa
cagcctaacttttttattttatattttctctaatttttataataattatataattaatatttatttctataatatgtcttttcattttataactcacatatcaaatcaaatatctattattattacattttcttcatattctcatatttaatatttactatatatctatcttatacatatatattatttgagcatcaacaaatatatttggccaaccatatttagaagcatatattttattattgaagaagcttatactttcaagacatgatatgtttctcaactctgttttttatctcttgcctctactagttgtcatatctttcatcatcaccaattgtaactgactcgatcaagtttgtttgtataaaaaattattcctatgaaactaaaaaaattttgccatgcactattatatatttttatcttatgttttagttaattaatcaagttggtatgacttgtgatcatttattttttacttggtctgtacacatttacattgattttgtaaatattatcaaaattatatgtattctatttattttattttatttattcatgtacttttttttatatattacccacttaaatatcttaatatgatctcaatgtacttttaattttaggtgacatcttaatctttttccattctctattatttactttcccgatttcta

SEQ ID NO: 12025 - DNA, 562 bp, Cannabis sativa
aaaagaattacatcaagttaggcaaatccgccattaaaccggcagacgcacaatagggatattctcccaaccacaacttattacaatttgaactcaaagcctctttggccaacaagtgagcatccctattgttcttccttacgatatgcttgaccgcctcacaccttgaaaaatctggggactctcttatgtcgtcgagcagagcactccaatcagttttggcatgagactctctgttcatatagatggctgcccgaagacagtcagtttgtaagatgaacgggtaggccttcactttatttgccagctgaatgcccaaacgaatagccaacacttccgccaattccaccgagtaacaccctctttgctgcttaatttcagcagctaccacaaccccttcgtggttccttatcactgctcccagccctattttcctttctttacagagaacacttgcatctgtgttgatgaacaacgtcccgtggtgaggaggatcccatcccccagctggtgttgtaatcagcttcaatggctgatccgaattggagtggttgtgcatcat

SEQ ID NO: 12026 - DNA, 571 bp, Cannabis sativa
tttagatcaaatctcacacacaccctcacgaaaattgagtgtaattatactaaaaataattttaattatttcattgatacaataattatttaatatgatttaggttttcatttttatttttttctcatatatatatataattttaatttttgtcctagatgttatttgataattttttagtatgctgtatttcttgtattgtttgtaaataaataaccaaaaaaaaaaaaaaaattaatatgcgaatatatgatattttatttttttgacattattttttaagctctcttttgaattatatatctaatggatttatttatgatgtagcataaattttgattgatgaaatatttaatttgttttattattaatttttaatcaatataggattgacaaatatttaaacttctaagactgtaaaactatacaccaaatggaataggtcaagatatatagaacgtgacaatttttttttttcttaatacataaaaattattttaaatatttgttacaaaattgttatgaaatttgagtttgttttagaaagatatttttatttattttaaatatt

SEQ ID NO: 12027 - DNA, 1024 bp, Cannabis sativa
acgtcttactgtttcgcaagagacaggactataattggtcactttgcctgtgatgcaaaatattataacttaaaggctattatttgcaattgtttcaaaaatttacacgttccaaagtacctttggaaatcatatatcaacgtactattatttatgataacttgtatagtcatacctacgttgaatttcaaccacaaaaagtaagacaaataaaaattctgtactccataaaagttgagaaatgcgaaaaaaaaaaactaatcagtattgagtttggcgctgtttgcctccataagtccattacgtatctgctcaccaatgtccctaacatgaccaggaccatggggtataaacacagtagtgttatttgacgaactgccaaggtctttaatggtgtcaaagtactgagtgaccatgataagatccataacctccttagctgaagtgccttcaactttgtgagagaagttcactatgttctctctcaagccatctgtgatcgcctgcctctgccttgcaacaccgactcctcccaagtacttcgattcagcttcagcttccgcccgcttaacttggagaatcttctctgcttctcccttgtatacacttgcaagttggagcctttcagctgtaaagcataacaagattgattacttgcatacaaattcgagaagaaaacctttaaaactctttccccggttgccagttagtgacagattaatatttgataatcgatcaccattgagaactgatcaactacaccattgcgagcaatgtctatggtttagtggggattactatccttccactatttcagattgttcacaaatataactacaccacaaggtttttatttgtcctcaaattctgtttaactaagaatcttaaactttttgattctccaaacatcaatgttagtctctgtctggataaaagtacaggaagaaggaaataaaaataatgacctttattaatctcgttcattgctgtgcgcacatgagaatcgggtacaatgtcaaccatg

SEQ ID NO: 12028 - DNA, 742 bp, Cannabis sativa
gaggaacttcaagctttgttgatcagtacggacaataaaacggcgaccgagcaggtacgaccgccacttaaggaccgccaacacaatggccattaactccttctcatagatagacttaagttgagcttgaggtttcaaaacctgactgtagtaagcaatggggcgcccttcttgcatcaaaactgctcctaacccatattcggaagcatccgcttcaaccacaaatggcttagtaaaatcggggagggctaacacgggaactgtagtcattgctgtttttagagaatggaaagcattggtggctgccggagaccaggcaaagctgtccttcttcaattgatctgttagagggcgagcaatagaaccataattcttgacaaacttatgataataccccgtaaggccaaggaaccctcgtaaagctttaatcgaagtagggaggggccaatccaacatggctttgatcttcgtatcatccaccgcaaccctttggcccctcacaacatgtgccaagtactcaatccgtcgctgcccaaaagaacacttcttcctattagcaaaaaattcatgtttgaggagagtttgaagcacgagctcaaggtgctgtaagtgtgtaacttcgtcgggactataaaccaagatgtcatcaaagaacaccaaaacacattcgcgcagccaaggcttgaaaagcgtgttcatctgagattggaaggtggatggagcattagtaagaccaaatggc

SEQ ID NO: 12029 - DNA, 675 bp, Cannabis sativa
agatttggataggattattggattttattggattacattagattgggattaggataatgtaatactatctagtgtttggtgtagtcttgattggacatttttttttattattatttttaagtgtaaaataatttaaatattagtaatttaatttatatttcaatcatttttatttaaaaatgaataaaatataatgagaaatattgaaagacactaatggtgtctatcacccttatcggtatcatatcgctataagtgtaattaagtatcgggtctcatgtaacttaagaaaatatcttgtaggagcatctccaatggagcataacatttatagttgtcaaaatacggacatcatcttaaaatattatttttttttaattttctctctcatccacataaaatttgtcacattttcttaaaaaaagtactctaatagttggcaattctaaaagttgtccaccatgatcccacatcaaattatattaatgacttattaggtaagaaataaattttctctaataaaaaaaataagttcattctctctctctctctctagctttccttcaactcacaagttggtgccatggcaaaaatgggctaagacgcaagggaaactcaaagcttctatcaagaaacgcaaaaaatgggtcttgattcaagttttgatgtgcagaa

SEQ ID NO: 12030 - DNA, 1073 bp, Cannabis sativa
acactcatatattggagtcgtagtaacctaagggaacaaactgaaagaataatataatgaattgctcaaaataatgatcaaattgggctatggtaattctaaaatacattctcccgttgtatctcccaagtctttacaatttaaatttttcacaatgccataaatgtttataggatcaagtatgaaagatttgaaaaataatacataaattcaatgcctctaatcaagaaaaatttgattgtctatgaatttattaggttaaaattggttctctaaatctaagttaacctatattggtagaataggttaacatttcataaaactcaattttatttctctcatttcaaacacctaatcttctctcttcctcccttctctctctcgctctctgaactcaccctaaggactcgcccataacccacaacatctctccacgaccaccacgaccacaaactcaatgaccaccgcagactaaactacccacgaacccaacgacttttctatcaaccacaacttcttcatcaacaatatcgtcaaaggtaagtataattttttttgcatgatttagggttaaattttatgaaattatcgatatgtttatttagatttagggttaaaggtctgtgattttttagtttgggttaaatttaaggttggaatggccggatatgtgttttggggcaaatttaggtttttggcttggtctaatgcaggactaaaataggcccgatatatttttattgttggaaatgaataaatattgaagatgatagcccgatgtaaacccaatacttggcctaataatgtgcctaagttttatgttttttttgtaaggcccgattagaccgatgcatggtctcacatcttaaaatatataatttaggcacgtgaacatgaataataataaaatagaattaaatttagtaggcattttttttatattgcattggaaggaattttccaattatttatttatttttttagaataaaactctaaaagatcacctttcaagcaataagcttaaagagaaaatggaggggatatttattagatcaattcatctcatataaaa

SEQ ID NO: 12031 - DNA, 605 bp, Cannabis sativa
tgccccattccagttgactcccattctctacaaggttctcgctagtttgaaagtattgtacaaatttttgaattggggttgtcccacacccgtagagattgcatatctttactcagttaaagtcgttccatcgaggaagaatgccgcagtgggctttttctgtcttggtactcatgctagcgagccaaaaattattgtagacctgccaaataaggtgtccttcaaggacaacttcttctggatttctagtctctcccccatgggaacaaccacacttcgcaaactccataagtgattgttctcttctttcttacttacatcagttttccttttttttaagtactcgactaatgttttgtttattctgacagctcttctaacgagacctactcctacctccgagatggttattaggcacaggcttcttatgactctcccctacggtcttcgatcatgaaaattcctcttaaacaaagtaaacttgcgatcagcgggccttctcggtgacaaaaaatacacatgtgattacaagattcccaagtattcctcttggcagcaaataatcgttccacccgaggatcaggcctgggaccgcttggcccaag

SEQ ID NO: 12032 - DNA, 504 bp, Cannabis sativa
  modified_base (366)..(374): a, c, t, g, unknown or other
ttgtaatacaatattatataaaacgatatatataatattaatctatatataatataaatgtgatattttgagaatattaaataatatatattagcatttaaaaataataaaatgaggactgtcgtgatagatggattgttagatcaatttagaacattaatatccgatgaaaattattttgttggtaatttgtattccgcgaggtaatcgtataactcataatttaactaattatgttttggttcacaatatcagtgccatatagattgaaattatatattaccttcttgtgctcatcaagctttttttgcataatgtgcccaatcttgtaaaatattgtaacttaatgcaagatttccatttcannnnnnnnnaataaataaataaataaaatgacttttagatataaattttgttttactaagataaatttatagaaatattatctctttttttatgacgaaagtttactatatatagaagactgatatatatatatatata

SEQ ID NO: 12033 - DNA, 581 bp, Cannabis sativa
acccttggcgggatcaagcctttcatagttcaaagtgacactttgagtttttgtgcttctttactccatgctttagctttatgcttctcgctttctgctttgaactttgagcttttggctactctccttttctttaagcttttgcctctttttttggttgagctttcttgttgctttgcccaattttttcttcagcattagctttttgctttggtcaattttttcttaagtgctagccttttttgttgtgctcaatttttctaagctttattgcttattttttttctgagcgtttgcttttttctgtgctcttttttttttaatttttttttttttgctttttctttggagaattcatttttttacttgctctatttgtttgtgcttttgctttctgcttcacttatgtttattttcttttaggttgcaatgagtaacaacctttgttctcatttaaaaggaagacttgtccttaattaaaaagacaatgtcacaagtttttggtcggcatggtgggatcaatctctactttttataattcttctacatgcccatcatttgtgtttgttgccacaagtcag

SEQ ID NO: 12034 - DNA, 582 bp, Cannabis sativa
ttattgatattgatttttttttttattaagaaaagattaattagaatttttgtcctctgaactttgatatgtactaaattatgtctcatgaacttttaagatcgttaaaaataccccctgaatttttgagattgttgaatttaaggacttttgtctaatttcattctattttactatttcagtgattgtttatatactaaaccattctcctcaaattttgatatttactaaatcatgtccttcgaattttgacatgtactaaatcatagcccctgaactttctttcatgttagacttttttactaaaattggaaaaaagtccttattaaatataataatctcaatagttcatgtagtatttttaatgactttaaaagttcagggggcaaaaatcataattagccttaaaaaaatatatatatatttgtttttaacttaagaaaaaaatcttcaagtgatccaaaaaaatatggaattgttggtgttttgaccactttcaagaagtcaactaactgtttttctaacacctcaacaagttagttatgtttggtttttaagtgtcataacatcctatatatacac

SEQ ID NO: 12035 - DNA, 840 bp, Cannabis sativa
attcttttaaaaaacaaaacacaattttttctttctatgtattttcactcccactcatccaaacaaaccaatatactttatctttgtttggatttaaaaacttgaagtcattagtatataatgatgaagacatactttttatttaaaaccaacatcttgataatagtgctacctaaacctgaagattatgtaaaataaaattatgacaaacaggggcggagggaggactcaatctctacggggccaattattaaaaatttatattttaaataaaacatttttacatatatttaagtcacaaaaattatttataactaaattttttaaatatattatttcaagtaattaattagtcaaaactcatccctctaaaaatattagtcaaaatcattacttattattgttattttttttatgaatcagaggtatattattactcaaaaacatttattattattattattattttggaaaagaaaaaaaatattttattacgaagtgtatgaactattatatttattgttcaattagatcattttatagttattgtagagaaaatagaaattacagaataattattataattttcataaaaaaaataagaatgtattatgtactgatccattttgatttagtaaattataatatttaattacatatctcattaaataaagacaactattcagtatttataactatatttcaaccaatattttttttaattacatatcaaaagttaaagctaattcgcgtcaaaaaaaaagttaaagctaattgtatataatcctaacacttattgctcatatatatatataaagaatttttttgagtaaatataaa

SEQ ID NO: 12036 - DNA, 514 bp, Cannabis sativa
attaaaaaagaacttcacaataaaaattaatgctactaaacgtagttactaactcatttgtgaaactatgtaattactaactcatttgtcaaattccaaactactttcaaatatgtactaacaaaagaaataaactgaccagaacgaaaggctaaacacagatagtatatccttgtatagtcatctctccccccatatgatgatcatgatttcaaaagaagaaaccatcatcatcatcattaaagatatcatctaattctaattcttcatagtaattaatcctagtaaaatcatcatagtccaattcttcacttgagtatccataaccaaagtaatccctgaaaagccaagcagaattagcaccgcccggaaaatcaaagtcttcccttccaaagaacacattaggatcagccatataaggatcagcaataaatccatagcccttgagtgaatcatgaggtagtttaacaagtttaatttgctcaccacaccttttccccaaatttcccttcaa

SEQ ID NO: 12037 - DNA, 706 bp, Cannabis sativa
atcttcttcttcattttctccgctcatattctttttcatctagttatattatttaataataataataataataataatatataaatttgtgtatatatatatgtatgttagacacaaaatgtcagtagtattgctaagaaattatatttagtcttaatttaattataatgtaatatatatgattttcttaaaatgttagtttaaaaaagaaaaaaataaataggatgggtcgggttaaatccgactcgcttaattcaagtttggctctgctttagcccgatttaagagaattatcatgtcaaatcaaattactattgagtcggatcgagtgggaacgttcccaacctggcctgattgccattcctaggcaaagcatgtctaagtgaatgttagataataattatattttattaaaaactttgccctatatcattttttatattctggtaaataactctcttaattttttttttttttgaggtaaagtaaattcattaattaatcaaacgagtacaaggaaatgacaagtcacgttcaatctcgtgacgagcacaagggggagaaactccaatccacatagcactaactttgtttatcaaagcatacttggctaatacatgagcaactacatttgcttcccgaaaaacaaaccgcaccccagtaacagaataattcaagcacacataatttgtgtgtctgaaattgt

SEQ ID NO: 12038 - DNA, 514 bp, Cannabis sativa
gctctttcaacattttgacttgtattatattgatgcctgtcgtttttaaaaaaataataatattacgagattttgtattagtgactataatttcaactgtgttttaaaacttgggatcccgacccataagtctatataaataaaataagattaatttttagtttagcgagttttcaaatacgagcgttacaattgattgcaattttcactcaatgatagatcaataacctttgagtggataacattggggatgcatcatatgagttgtacaccatcctaaatccctcttttccagcatgctattattatcctggatgaattgttaagggtgtaaaattcctagttgaggattggaataacaattgtaacacccaaaatagttgtatttttatgcttagaaaaggtggtaaaaaatttatggcatactcaaacagttgtacgagttcacttacttgaaggattgtagtgttattattttcaggtgtaagttgggagacacaaatggtaataggac

SEQ ID NO: 12039 - DNA, 887 bp, Cannabis sativa
ttaggtaagacccattcagaccaatgagaaactcaagcaccttatcctcttcttcatattcttgaataatcttcaaggctccacaagtgcacactggttgttgtctgtattattgtagcagatcccgtagccgtttgagtttagtgtaatatgaagtaacatcactagaaccatgggttaatgtctgcatagacctttttacttggaaaattctaggggcatttttctgatgaaacctttcctgcaattcagaccatatacaagaggcatcttccatatacattatactatctgcaatactaggagaaacagagttcaagatccacgatattaccaaacaattacacccaatccagaaatcgtagttctcatcgtcttcctcaggagctgggagtctaccatcaacgaactttatcttgtttcttcctgataatgcaacaatcatcgatcttcgccatgagctaaagttgtctgcaccagtaagaatctttggtaccaaggatgaagatgcactgtcaacgctggagagaaaataagcgctccgaggatcattagctggatatttattgttttcttcaaggactgcaaattgattcgattcttcagcagtttcattgttcctggttcgagtctacgttcttcctcctcgcgccatgaaaactagagagatccaaagaagaacaagaaagaaaaacgaaggagaagaagaacaggtacaagcggaagcaaaaagagctcagctaattgttggctctgataccattttagttgtaaaacagaggaaaatggagtagtaaaaggaatgaatcttcattcatcaaaggggttcagtacaataagtgtgtctatatatagaacacactagaagcaagaatacaacagtagaa

SEQ ID NO: 12040 - DNA, 556 bp, Cannabis sativa
cggaagaaaagcactttgggtttcggatatcaccaatggtagaacgtctttaaaccgtagtacaatcactttagatatcagcttgcaaatcacattgcaaaggctaattggtctataatctcccattgctttcggcttcttaattttagggattagagtaataattgatttgttcaatctaatcatgtcatgaccttcattcaacactccaaggaccactgaagtaacatctgttctaatatgatctcagtaatgttgataaaacattgcagacattccatcattatttgggcttgtatcggtgctcattgagcgtagagcatctgacacttctttgacagtaaatggctgcagcagagagtggttcctttcgtccatcacagcggtaggaactgcttgtagcacttgctgcaaggcaaaacttaatataattaattgtacacttctttaaaaaaaaaaaaaaggattaaatttaaaatttattttcacaccaaattataaaaacttttcagataatgcagacaggactttccactaaacttatgaattatgtact

SEQ ID NO: 12041 - DNA, 639 bp, Cannabis sativa
agtagaacatctatctaagaatacctaataacttaataacttttaatttgttgaaaaaaatcaagtctcaatttgggtcagttataaataagaatgatctctaaattgtaaataattatatattttctaagtctcgcattaagaaagtatacatctatataagaataattatatcttaataaaatgtatgcatatagtttataaatttatttatgtaaaattaataattttattatgatatagtattaagaattgtttattgtcgttattgttttatcaataatattttggtgttttgatttttcttttctttttttttttttttgagtcaatgtaactctatttgagttgtaaactcttaattaaaatataatttacttagtcataaatcatgtattcttaaataacttaaaacaaaaattcaataaataaaaataaaattttaaattaagattattacgatagttttcttttatttttgatgagatgagaaaggagtactttttcaaatacttataaaaaataataacaaatcgacagcagactagattatgtgaatttaatggtggtgtgtggattaattatctacattcataaatataataatatgcatgtaatgctacgctagctagtagtact

SEQ ID NO: 12042 - DNA, 533 bp, Cannabis sativa
tacatgtatatttatataaattttggtataattaatttgaactttaatgtggtttgtaatagttagtaatcacaaagaaaagtaagttttggctctatggtaaatttttgccgacgagaaaatttgccaacaaaagttgctggcaatacttagttgagaaagtcatgtttgccaacgaacagtgaaagtcgcatctaccagggacaaaatttattggtgaaacattgaggcaccgatagagcctcatcgagaaagttttgccaactagaaatattgtcaacaaaacattttcgacgtatttcttcatttatgagaaagttttgtcggtacatgtaactttgttggcaagacattttttttaaatagttttaccagcactatataatgctccagtaaatttattttgtacttttttaatataatgaaatatatatgcaatttgaatgtaaatttaaattaattttaaaatttcataaataataattcaaaataatgaacataatttcgagagtatattatagttacactaaatt

SEQ ID NO: 12043 - DNA, 1268 bp, Cannabis sativa
  modified_base (85)..(97): a, c, t, g, unknown or other
gctatgctctttgaaaaaaacttgggaaaaatcatgaaaatggaatgttcacgcgtgtccaacaaaatggagccaatttgtatannnnnnnnnnnnnacctaacggtgaaagaggtggtgatgagaacctagttgaaaggacatgcacctacgggtatttacgttattgaaactcccttgcgttcatgcatgtgtcgcagcattgaaaatgaatacgagtatgtacacgctttgctcaccttattattcgtaagatacatggaggaagacttacgatgataccattaatcttgctggttatgaggaggattgggttctcgcaggacacatcaagaatatgaaagttggggtacctgtggaaaagaaaccaataggtcgtccaaggaaaagcaaggctagaagaagacaagagaatcatttcccgtctggttataaaaagttagatgtaccttgaaactgcagcctctgtggcagttcaggccacaaaaaagcaacatgcaaagcccacatttgaggcataatctacttattagttgtaataacatgttctgtatttgttatttaaaaaagctttaaaattaggttggtactctacttatgtgttgagaaagagaatttttttaatttttttaaagtcatcgacaacatatcgatatgacatcaataatattctctttttttggaaaaaaaaaaatagccaactattcgagcaaattatcgagaacatatcgacatcgtgtcgacaatgtcgataagaactattttttgtaaaattagtgtatcatgtagtatgcatcatcgacaacacctcgaaaaaatgttgataaaagcgtcgataaagagtcgacaaatcgttgataaagtgtcgacaacactctgtttgtgtgtacaacattttgtcgaacaaagacacaactaagtcatttatgtcgataatatatcgataatacatcgataatatgtcgatgatatgtcgacaagacactctacttgtgagaaatcatgatttgtcaaaatatattgagtaattaatgtcgatgatatatcgacaacatgtcaatataccatcgatgtacaaaatataacgatgtatttttaattatgtaaattagacaaaatatacaatatatttttaattatacaaaatatataactttttttttaattttttaaattagacaaaatatacaaagtatttctaattatacatagatattcaaccgagattttggtaaaacaaattaacgcaccaccattcacgaaacatc

SEQ ID NO: 12044 - DNA, 519 bp, Cannabis sativa
tgagcctaagatccctggccaaccccctatggcgctggttgttgggatctggctattctcaccatttgatctttatggcaaggcctgtcctccctcgaggtaggaaagatatgtcctggctcctgaaaaactgggttggccagcttgttgatagaccctccctaatctatcaactagtcttccttagagtggatctttgaagagatcctagcctattccactggttctcttattgaactgccttatcatgtcgttggcttctctattatcgcaatccagctcctcctagtgaggtcgaagatgtactcttgctcatccatccatctcagaaattcatgtctctgctaagcgaatatatcacgatcaacagcgcgtggttcttcaattctgccattttcgtagatggcctctctaagtctggctaactcgagatgttctcccaagtctacttggggcttgccaatggttggctcgccaactcctattctcatctcaacaacataatacaaggggctagat

SEQ ID NO: 12045 - DNA, 690 bp, Cannabis sativa
aattattacaaatgtagacaaatgattttcaaattcaaatatgacccagcttttaaataatacgacatgacgttattgctcttagtggaaatagcaacatgtggttttcattgaaacgacaactgtacattccattcgaaaacttattattatttattttgctaaggatagtccaaaatttcttaatttattattataaattaaaacattacaataataaaatataaaataaggaggaataaataataatagaatttccctaaataataatatgaccctggtttggtttccttgctttgcttctccataacccatagcttataccacctacaaacgacctcacccgatcccctacgactcctctctctctctctgtctctccacacacttgtaagtcaaggagttgcagatcgaaatgggttgctcttcctcccttccaggtaaatatccccaataatctcattctagttttaatccatttccagtttgatagggcatacaatacaaaccctcatctaggtcttcttttcgttataattttctgagttgataagttattgatttgattcgcaactagagattcaatttcgtcatgactttttgtattgagctattgatctttgagcaaatgctttgaacttggttgcccttttgaggatttctggtaattttattgaatggggattttgt

SEQ ID NO: 12046 - DNA, 554 bp, Cannabis sativa
cataatgagagaggagagaagtatggggccaaaatgtaaaaaaaaaaattaaagagggccaatatataaatttgtaaagaaaaataaaaaaaaaattataaaattataagtaaaaaattgaggagctaaagtccctatagcacctatgtacctccgtcattgatgatataattttttttttacatggtaaatagaggcacacatgattaacaaaccagcaaattacaatcggcagtaaaatctcttcgaactacgatagctcatcgtctaaccaaatgatatgttttgccaaacgataagctgcataattcttatcgcaagccatatgggacaaaattgctcacagaaatttagataataaaaagataacgtcttcaaatagcacctcatcacattagaaaaataccttcccattataaatagttgtcaccagagctagcgaaactaaaaatatcacaacaccaaaccaaaaacatacaattatattggaatgatagacttcaaaataaaacttagtaaacaaactaagatttaacacacaactcatatcacta

SEQ ID NO: 12047 - DNA, 574 bp, Cannabis sativa
aagaatcagcactccattgttcagtagccacagagattttttctcaattcttgctagatccgattcattcttgaaagagaatatcagaaacgatgcctctgttgtgactttctttatcttcactccccaatcaacctcagctaagccccaaattctgcccagaattgttctaatcaggttccggttcatgttcttgttcgaacataaccttcccaaaagacatgattttcccacctctgactccttctcttcatctatctcccatccatcttcgtcctcaacacgcagctttccagttcgatcaagaagatcctccatggctagatcaggcattggatgcattcctacggggaaaggctcttctcagggagagagcaaaagataaaccctttttaactttttaatattttttatctttatatattaaaagtaattatttaacgataattattggtttactttttttttcttctgctaaacttaatgatacatttttatctctcgttagctcaaaaaaataaaaatgaagaaaacaatataatcgtaaagcctaaaacccaaaaatcaaattatc

SEQ ID NO: 12048 - DNA, 501 bp, Cannabis sativa
tcaatattcaaaatttaactaactgcgtcaaaaccctacttctagtactaataggatatatagtttgtgattaacatatacacataaaggaaagcataaaatgagtctatatacatcttatatttttttccttcttaatatctagcttatatataatactttagttacgtttatttccttagtctaaaaattgttttattttagtcttttatgtgtgattaactaatgttttatccaataaatattttatttttagtaataatttttttttgataattttttatttattatgaaaataattttattttaaaaattttatttatacttttcaatacatttatattgttatttgttcaagttaaaaataactttttacagctgaaatattttctcttaattaatatttgttcaaaagttaaaattttattttttattttatttgtaaaaggtgattgtcaatatcatatatgacaagttgaacactcttaattatatatatat

SEQ ID NO: 12049 - DNA, 502 bp, Cannabis sativa
aagtggtgttgttggtattcaatattggctgcttattttgttcttttctctgattttttttcttatccttagagtgatttagaggtggtcctattcctatatgtgtggagtagctaaaaggcattcagcattattggtattggtaggcccaccataataagcaacttccaacaaggaacccatcttcaattggttgacttgactctccttgttactctcttaagtcaattttctaactgtggctgtgcctcatgtggttctaactgtatttttctgaggagttcagcggctgcaaatcagatttctcaccattctgcaatggtggtatgccaagactaagtgattgcttttatgatttgcctaatggaatggaagacataaaaattaatgccgagttgtagtggtgtggtagtgggaggtagtagaatcatttcacattgcgatcatataaagaattccgagttgaaatgattgttacaactactaactacctctaactgtt

SEQ ID NO: 12050 - DNA, 704 bp, Cannabis sativa
agcgcgggcaggggccacaggcgggggcgcgcggagctcctctgggcaaactttcgggcataacacttatgactccaaatattacacttagtaatgtttgggggtcaacacatatcatgatatcaatatatttcaaaatttaataaattaaatgtatattttattcttatttataatatatatataatcttataaactaaaattaagcatcactttattcatacattttttttcatcatcctttgaatttggtattttttttattttatttattttaatttgttattggagacataaaacaacatgaatttattttattttgttgctagttatatgaaaagaaaatatattttaataaatttaaaataatttaatattaaaaagtaataaatttaaaataaacgatctaattagattagatttaaattattacgtgaatttgattggatctaaaatatgaaattcatacttagtacaaattagacgcgatataagcaaaattgtacatattgaattaacatccctccaagtgtctatgttttttaatttccaatttgtttaattttaaacatccatagccgaaccaaaatataacctccaatctttgtggcaagaaaaacttggaaggtaagttccattgggtatataaagtgaaggtaggttccattgggtatacaaactatgtttttgctacatttttttta

SEQ ID NO: 12051 - DNA, 515 bp, Cannabis sativa
attgtagaatggatgatttcttaacataatttgttttaaacagtaatgagtaatgaccccttgagataagttggtttggtgagcacattgaagaatacaatttggaattttttatcaaaagagaatgtagtgtagtgtagaagatcttttactaattaatattaattttttctattttttatttttgcagggtaagaacaattaatccatacttaaatgacgagatgaatctttggcgtgattagtggattgaatatgtccgagcacaggcattgcgacaagggctattacgataatcaatttttgtttttgtttatactttacactaaaaccggttatactttcatataactaatgattaagtaagttgagtacgtagtttgtatgtatttcagtttttgttcattttaaatttatgtttatacttcatactaatacaatatataaattagtgaaaattaattaatgcaagagaaaaagtagattttttttcttttttatttgcaaccaaatga

SEQ ID NO: 12052 - DNA, 814 bp, Cannabis sativa
tcggaggagtagttaaagaggtgtctgggtgcagtcctacattgcatttctctaacaccaaatcccaaagaatcaaaggtttgtcccatgtgtcaaacctgagaaaggcgcacaacacaaaaagcaataccttttatccaatgtccactactctaacatttattgtacacgattagtggtgcatggccacctgtcaacagtactatgttgtcccgacgatggttacccctctattgggcctcacctacccgactcaaagtcaatattataatgtatttcaccccatcaatggatttatttcatacaaaaaaaatactaactcgtggactaaggctgtttaacgcttgaacccagacctgaattggacccctaaccccaaactccggacccagacccgaccccgagtcggtgttgggattgagactattaaaaatatattataactttacacatccttttaatacaagacaataccaaacataatattatattaaataatactaacaatacaatcagtgacggacccagaatttttattttgtgggagcttatttatcattaaaaaatatttatacttatattataatcactcttgctatatttatttaattttatgggggcttttttattattttggtttataattatcaaattaaaaaaaatacatttaattttttaaaaggcaatatttttgtttgtgggggctatagccccacattgataagagtaggtccgtttctgaatacaatataacgtaccaaacaagcccttagggacctagaaacagaataggccaatgagaaggcgagatccc

SEQ ID NO: 12053 - DNA, 832 bp, Cannabis sativa
agatttttgttgattttttctgtctcacttccacttccatgatcaccagcctcattttttctatttaaattagagtatacatatgatacgtgtacacatatgtaaagatgcattgctcttttctcaacaatgacatacaataaatcaaagttcatacaatataatacaagtatagtttattgaaatatgatacaatatttgtttaatgtatatatatattccatgtaacagtagttactgagagaaaaagataacaaatacaagtaaaataatatactaagaacaacacacacttactgtagacattgttaattttttctcagagaagaaggtttattagctgtttaacacaataataaagataaaaatagacactttcttctgcttagcactataacattatgtcaagggattattgaaaatcttgtgtacataatatagagagagtgagagtcatgatgagctaaaacagaggagcctttgggttttgaaaagagagactaaattaattaaatagtgttgagtgttcacccatacgacataattaatatagccaaattagcattgcattgcattcattccttcaactaagcattacttgaaatagtgtaccattactagaaattaatataggcaaattgaaataaataaaggataatacatgtatgttgcaagtcgggaaacacctgattgataataaaaggaaacaccacaagtgtttgacaaatttttcagaacaaaaattttacttgtaatttttcttagtaagctctacatatgaacttcaatctcctatatagttaataaaaccgaatgtttatatatatatata

SEQ ID NO: 12054 - DNA, 766 bp, Cannabis sativa
atgtgggcattgacttgacagattatgtatctacaaaagttttagatttataatatatgtattattaccgtaaaaatttaaacttaaatatttatccataaccaaaattaaatttaagtatttatattacaaattactcacattattattaatttatttacaacacatattttattaaaaataaataaataaaaaatcaaatgtatgtacacacaacactattctatgtgacccatcactactaaaagtactactacactttggaatcaaaactttttgaaacttaggacaaataataatagtgctacccaaaagaaaagatgaacgagccaattgtaaaattattaaattattatttggttttgtatttttttcttttgtttttgacaaatactaacaccaatttatattgaaacaaggagatgtattatcttcattctcttattatagtcttttagttaattttcatatgcctaaaaatatatatcgaaatattttttattcaattttttttttcatgacgatgtttattatagttacaatattattcttataaatttttaaaaaatttcaaatagcttacagtatcgaaaaatagatttaaaattttttaaatacgcgtaataaattaaaatattagtaattttatttttagcattataaatttttagaattttttaaaaaatttaatattttttttgaaaaattaagagtgtcctcttttggcaaagggaaaaattaaatgtatataaaattctaaattata

SEQ ID NO: 12055 - DNA, 557 bp, Cannabis sativa
ttttttttccgaactcttgaattgggctaaattaaggttatactagtaatatatcaacaaattgtttaaataaatgatcaaaattcaactgcaggggaacatttacaataatttatttagttccaagaaaattttgtaatagaaaaaaaagtaaatactattttagacctcgtgttttgcaaaagttatcgattagaacctcaatagatcttatattttttaaaatggcaaaaataagaccttgagcttaattttagagaacttttttttaatataaccaacttaaagacaatttctaatacgaacagatatagaaaatattaacctttttatcataacacttttagatcagattataattaaattttgttttgataaaaaaattaatttagagtcctaattgtacttttttagaaaatacacaatttattttgtcatttaacataacagaaattctaattattaacttttacgatacaaaatagtaattaccccaaaaaaattcatttgggcaaaactctcataattcgcgggagataaatcatatttattcaaaa

SEQ ID NO: 12056 - DNA, 577 bp, Cannabis sativa
aagcttcggtcagaaggaagaagagggcctcaaagacggtcagggatgttggcaaagatgatgttccattgttggaaattattagaggttgttttaaaaatctcttcacctctaatagaccgcctgaagatgatatttcaaaagcaacccattgtattaatacaataattactgaggaaataaacgaagtgttgatgaaaaatttctcgaaggaggaggtgatcaaagttgtcatgagtatgaacccaacagaggcaccaggttcaaatggtcttccttccatttcttaccaaaaattctggtaaactactaaaaatgatgctatcatggtttgtttgaatgctcttaacatgaatgggaacattgagtttcttaatgatatgctcattgctcatattcccaagattgacaaacttgataaaattgaaaaccttattaagtttgtttaattaatgttttaaaaaaatatctcaaagtatttggctgacaaaattcaaagtactttaggagatattatttttgaaagccagattgtgtttgttccagggatgcttatacttgataacaccatcaatga

SEQ ID NO: 12057 - DNA, 587 bp, Cannabis sativa
gcacttcaagacaacacctactatatctagtgactctcatggccgattgactttgtcactctcatggttgagtgatattatcactcccatgtctgaatgactgtatcactctcatagtcaagcgactttgtcactctcatggctgagtgactttgtcatgatggggtcgagtgacttttgtcactcttatagttgagtgacattgtcacttttgtggctgagtgactttgtcactctctaggcttaattcaccctaaccagggtgcttttataaagaatagattgttggctcatagcattctaatcttccaagacctcctcaaaggctacacaaggaaaaatatatctactagatgcataatgaagattgatcttaacaaagcatacgatacgatgaactggtattttgtctatgatttactaaagggactctgctttccttctcggtttattgaatggataatggcctacctgaagggtactacctatgtgttactatgaatagacttcatggtacattcaaagggaaaaagggtcttcgtcgaggagatcctatatcctctctcttgtttgtcattatcatggat

SEQ ID NO: 12058 - DNA, 1249 bp, Cannabis sativa
ttttaatagattagactgattagtaggcagtgtgctgcagtaggcacaggtaaatacatcctaatttcctaattaattttttttttaagtaactactatatatatatgcatacatatatatattaataaattaaattggaattgacttttgattggtgatattatattgacgttagctaataatagctgccaacctgccaagttaagccaaaaagaataattttatcaatttatttgaagtttgaccgagattaacgaagaatgaaactgtcaaataatatatatacacatacattgatacataaatattattattcacggtccggtccggtcaaaccaaaaaaataaattagaaaccatgaccggaccataatgctaagaacggttgggttcaatcggatcaccaacagcggtccctccggttacggtttaaaatggtttggactgtcttggtccggattgaatccgcggtttgccggtccacatgaacacccctagtattgagcaccttaaggtgtcacatagcaataataataagaaaaaaagtatttaccaaaaaaaatagcacaaaaacaattcataaaaaaaaaaacaaaaaaaataaataaattctacatcaagttttgtaattatgtattggagcataatgctaaaattgatgcaaatatatcacaagtttttttttttttgccaaatatattacatttttttacacgtctcattagagatattcttgcaaacttatatacaattaaaaaattaaaattctaatcaaagtaataaagatgcatacatattaatatcaaaaatgttaagagacacattaaggtgtcaagcaccataaaaggtagcatattgttatttgtgcatttcaatataagttcccacaaattttaatttgatgaataatttagaaaactagtaacaaattattagataccacatcggtatggtattgagcaccttaagacgccacatatcaataatagtaccaaaaattatttaccaaaaaatagagtacaacgatcattttaaaaaaataataaaaaaaatacaatcgaagctaataaaaatatgtacatattaataacaaaaatgttaatgatcacattaagatgtcaagcaccacaaaaggtaacatatcgttattggtgcatttcaattcagttcttacaaattttaatttaataaaaggtttagaaaactgttcataaaatagtatattacatcggtatggtattgagcacct

SEQ ID NO: 12059 - DNA, 898 bp, Cannabis sativa
tgtctgataatttgatattttttttgagagattggtctgaattatgacggtcgtcgatatagaagaactttcagtcaacaagttaattatttagtcaaagatatacaaaatcagaatatgagtcactacaagcaaaacaacttatataagacctaattatcttagaaatttagacaaaataacttgacactatattcaagaggcatctgatataagcaaccaatttagccataactacctacaaaattaatagatatataaaagtagattaacacactatacatgctataatgttatgaatttttaaattcaagataaaacacagctatttttttaacagaaaaaatttatctttgaagcctttctttcacttaaaatgtcaccattatattgaaactaatttgttatgtccaactattagggttatgtcttccaaagtaaaaatatactagtcaattaaacctacacatacataagatttgagagattaatcaaacttaataaatcaaatgccaactaaattaactaatctgttaaaaaagtaatcagaactcaattaactaacaaataaatgataaaaacaatgatataaaaaaaatcatttaaaattataaaaatataattaaaagcattttaactttttttttaattatacatagctttgtaagcttttttttacttgttgcgcagggcgtagcagaagttttcttatggcctttgctcttttatattttactatattcttgtttaaatataattttttttaacaattgtttaatataattgatgaaagtaatatatataattataaactataaattttgacctaagttatgtgcctgtaacatatcttcatacgcttaatttatatatatagatttataagttatagtatgtg

SEQ ID NO: 12060 - DNA, 792 bp, Cannabis sativa
gccctaaaagcccaatagaatagcagaaaaatatctagattcaatggcattttggtcttttgtaattaactaataaactatacaaatatctagggtttcaagttgtaatctagggtttaggccacctatataaaggtcataacactaacctagaaacctaagctgaatttaagcctaaaacctacctacaagctctaagcctaagtcttacaacttgtctcttcttcacttcctctctcacacgcctatacaagcattatcttaacacataagttttgccattcttgattcatactttgtattcctaagggtgctatagcagatcccatctatagtgatctggatagtattaatcctcggtattcatacaagtaaaaagggagtaggtcattacccattatacaaagggggctgaacctctacaataaatcagtttactactttcattcttgtttgtgcaacacgtggcaagtatcagatatatacgacatcactgtcgatttatcattttttgaactcaacgatatagattaaatactgtattgggtgattatgcatttatatatataatgatacattgtgaatggatgaaattaatttttttatgcatgaatgtgaatcgttaattatatggtaaaattgggttgggagttttacaattttattagaaaaattgtacaccatatttgtggtataggttttgatgtaattttaattttaaatttaatttgtaaattttggttgaaattgtaacatcaaaaagtccaaaatacctccattgatgggtgagct

SEQ ID NO: 12061 - DNA, 837 bp, Cannabis sativa
  modified_base (232)..(233): a, c, t, g, unknown or other
taaaataaaatattattactttgacagcatgatttggtcaatgtgtttttcttcaatcttcattgatcaacttaagagtcacttttgattctttgtcatgatgtgtagtatgttctatcttttttccttctaaaaaacaaaagaaatcaagtaaggtgggtttggttggaggtaatgaaatggaatggaaagaaaataatttttatttcattcttttatttggttgcatttnnaagtattagaatgtcattctaatggaatgctctttctaccattttggtggaataactattctattttaaaataaaaggaaagatcattccaatataacatgagaaaatatttaatgattattttatcaattttttaggcattttatattttattctattctatttaaattcttattcatatttctattcttatgttttcattccacccaaccaaacgctgaacagtatagatttcatgattgagaattgagatccacaatgaaaggttcatctgtccaacagagtagctactttctttcgtggattaccttattattattattagagtaatttgcggtataaatacttaagtttatcttccagttgcaatttaatacctaagttaaaattttggcgacataaataccttccgttacactttcagatattttgtaggaccttactgttatcttgcacactggataccagatggcatgacacatcatttaaaataatgccacatcatttaaaataatgacatatcatcttattaaatagccacctaatattaaccattaaagtaaaaaattaattttacttcaaaataaatatttacataaaaatt

SEQ ID NO: 12062 - DNA, 511 bp, Cannabis sativa
  modified_base (303)..(304): a, c, t, g, unknown or other
aactgaatacccaaaatgaaagaatggaagttttagtatctaaagtggaccacaacattcaatgtttttagttctatctagattcgatccaattatatattggatgttaaattttactatccaatctgatccaacatatatatatctattggattttttcgaatccatccaataaaatctaacatccaatatataattgatctaatattaaattaagtaaaataacataaaatttaattacacatccaaacttaatgaaaatactaattatttcgattggatattagatgtattggatttttnnacaccccatccaacatctgatccaatccaactgaatattcaagataacatccaatctgatccgcttacaattaaatatctaatttttggcagtcggttgtaattagattggatagatttatgcatacccctaatgtgaagtttgtaaaaattgaccaaataacatgtgtaaagattgataatgtacttacctatggtgcaggctatt

SEQ ID NO: 12063 - DNA, 677 bp, Cannabis sativa
tttctcccaaaataggatctaagatttagaatcagaagaaaatgtcatccaagtagtgattcagcccctaggcagtgaaccacactcggtgcccaagttgacatttggtctagggctcagtgttttatccatcaaacgataatctatctcgggcatcagtcttattttgccaccaaaataagattttgatgcttccgtaagttaatatctcatgtacatgtgtcatccgcaagtccaccgacacatatgagactagtgatcactggtgatagtagtcataggtgatcatttgggaaactccctcatgcatcatgtaaaattgccaaagagacagtgaataacgagtcaaagaatgaactaaggaatgcttttgcatcatccgagcatctaaaaatatgcttaaggcccataaaaccaaattttaacgtcgacctgggtgccccaaagtcaacttggtcgcccatttgtgaattcctagtttttcaacactacacactgcttattaaaatagccatatttcactcaatttttattcaaataatgcagttcaagtggaattggaaagctctattcaagatggatctaagcttgtctaatgtccttttcacgattttgactttttggacctaaaacttagttcgtgagctcgactatgaattgcatgaattttccagcga

SEQ ID NO: 12064 - DNA, 650 bp, Cannabis sativa
ttgttatgattggttacttttatctcaatttctcaaactcatttttaattctatttactgttttaagtaaaaaaaaaaaatcaattactgttatttattatttttttcaaaccttttatatttttttttatttatttgaatcaataacaattttaataaaatatttggaattttgaagtattttgtaaaatatgtaactgtatgataatatttaaaaaattatttataaattatatatgtatttttttttttgtagaggtcaattttaaaagttaaaataaatttttcaaaatgtttaagactacctaattttttttataacatttattattttagaatatatgagatccaatatatatttaaataagcaaatagtagtatgacatgcattttagattagtgttaagcactacccattaacatttctctaattattaacatgaagatcatattagatcagtccatgtcacccattactaatcgatcataacttattatggtactattgaatgaaatgaggtttgatatttaagtgactttttcaaactttatatttttaaattcgatcaatcatggattttgaaaacaggcccttagtttgggttcatgaatgaacaaaataaaaaccacctaagagtttaagtaaaaat

SEQ ID NO: 12065 - DNA, 692 bp, Cannabis sativa
ggcgggccgcggccccaaaagggctgggctgcggcgcgtgttgaagtttccctaaatggcttcttttcgacggtgatttttctactgcgtcgactgatagtatttttgcaataactctctcaatattattcaagatgttatagaaagataaaaaaaagagatctagaacttttatgttttgagtttttctaaaatctaaacagaagatagtcgaattcaggattgaagtttcagctttattttcttccacaattttctcaattttgtatatctatctttcttgtgagattttttaatctttttttcatcttattcctttgatattttctaatcttcttctattttaaatctgcaaaaataaaaagataacaagcgtgaaaaacactccaaacacgatttaaaataaattaaaaatatactaaaattaatttaaatttaataccaaaaataacctaacatttagaaaagaggccgagtgtattttacactttgatatgttgtcctcatgtatttcaagtttggttttatgagtgttataagtacatgaatggtaagtagtgccaaaaggaaatttctagtattccaaggattattcagtggacctgtagcagccagtcgactttcgaaattttaaagactagtattttttatgtctccaaatacaaggtatttctgtttgttttttttttttt

SEQ ID NO: 12066 - DNA, 682 bp, Cannabis sativa
  modified_base (226)..(228): a, c, t, g, unknown or other
gaaaagactactagtaaaatatttcgtgaaagaattatattaataatttttacaatttattaattttttaaatgtgcgaaacaatctattttgaatcatgattttcatgcaataaggtatgtaaaaagttcagaaaattaatgaaatatacatatcataattttactaatataattactcaaaatttaaagtttataagtgataaatttaatatttatttttatcnnnataagtacttaatgtttgtaaaactataatttttacacatataaagctcaaattctaaatcattggatctagacagagacacgagtatcactatcttctaaatattcttttaataaatttaaaatggagtctgtactgtctaaactgaaagaaattatagttttacaaacatgagtacttattttgctaaaaataaatattaggtttatgccgtttataaatttaaaattttaagtaattatgttactatttaccttaaataaatataactatttagaagaaaaagaaaaaaaaaaaaagaatacattgatacagagtgttttttttagggagactaccaaataatttttcaataatgaaatatataatataacaaagtgatttggtgaaaagtgaaaagaaaaatatggaaatctagggaaaataagcagtgggggggagtaggtgatgtgca

SEQ ID NO: 12067 - DNA, 583 bp, Cannabis sativa
gctttgctttctggggtttattattatctatatacacgtttttgtatatatataaacatatatacatagcgtacgttcttttgatttatcagatatggcgactggattatacactgcgtcaccattattgagtagatttgaggtatgttgcgtgacatatatgtagattatattacaaaattcctggaatagatttgtgttatttgatgtgagttggagattttcgtttggtagatttaataataaatttgtgtttttatgagaaaatatgtatgcaaaggtgtgaaaattaactaggcactgaaatatgtgcaaggccacttggagctagtttattgagtggttgggtgtctggagggctgaattatggcaagaacatttagttgctagccgtaatgtgtgagcaaattggtaaaacaagcacaagttttcgattatttggaaactagcagaattaaattttgatatataattatgtaaattaattgaaattaataaaataacatatgttttatggactcaaccatattccagctttcgtttcatgaccactattatgtactttgagtcttccttgtattat

SEQ ID NO: 12068 - DNA, 594 bp, Cannabis sativa
ggttggatgatgaagctcccccctctcacttactcaaatttatgaaaattttggcagcactttcccttaaaaaattcacttcccgggtaacaacccaatcacaaataaatcaattcctaatcacaaacaactttatccaacaatgtaatgagcaaaatcccaaaaattcacactaaaatttcaagattctccaacaatccaaaattatccactaataattgcatagagtctaaaaattgttacctcaatgaaaatccacctttattctacctccattgaaggaaaccttggagttcttgatgaagaagatgatgaatagtgatttttttttgaaatttggatgaggtttagggattttgggtgtcattttgaaagcaaaagagtgtttgatgagaggaaaagtggtttagaaggttttggaatgaaagattgtggttagatttgaagaaaaacggtttaggatgagattagatgaagagaggtggttatggggaggcgttttcggtggtggtgggttagggttgagaaaataggtgttttttaaattgtgtagtttgtggccccttttaaacccatcaggcttagctcgtcgcg

SEQ ID NO: 12069 - DNA, 765 bp, Cannabis sativa
gaaaaaacttagaccaacaactagagagcacatgttccaagtcaattgccatcaaagtaaatgcttcgactttagtatgtgatttgagattagcagtcgaaataggaaagtcgttataagatgttgagctcaactgccattctacgagttcatttccatagaaatctcccttttgaagacgatttgtaggtgttgtactacttccgaaagtccatacaacaccttgtgtgatgaaaagcaccatatcaagaggctctccctttcgaacaatataacttttctccgaatatgtaactggctttaaatatttgcatattgtttcgtaaacatactcatccatgcttcgaaacaaaggaacctgttaatttattcaaaataataacatgttaaaacactacaaaaaatcttacatttaatcacaacaaaacttgtaactaaaagtaaaaaagctgtgactaattataaatcatcatttttatattctaactaaaatgtttgtagctaaaagtattagtcacaaaaatcataatttgttgtgactataaattaatgtatttttagtcacaatagttgttatgactaaaactaaattaaacttgtatctaaatattatatcttcgttacaagtaattttttattttgactaaattcacaagtaaaaattgtttaaaattaatcaatttatcatattatttattaatatttatatatatatatatatgtatatataatatagaagacaaataacttactttttttaagata

SEQ ID NO: 12070 - DNA, 571 bp, Cannabis sativa
tgcgaagagttccaaggtttgtgcctttggtcctcgaagccaatacctaaagattttcattgtggtagactcgactaggaggagaaacgacttatcgttgcttagggccacaccatttggaaatgcaaggcctctgagcaaaactgttgttttctttgttcgtgggtcgtatttgattagtcttcctgttctttctccactcaagactgagtacaaccataccctttcaatttcacccaaagaaatcataattaatacaccaaaaaatatatcattaataaaaaatgtaagatgctcaaattttatttattatgtactagcactgcatatgatgtcttgtaaatagttcgtaatactaattattaatttaaattatgttgatctaatacttaattatattattgtaatacggttactacttacttcttcttttttttttgttgatttctaattactactaaatactaccatcttttaacctttagaaaaaatctgcatacgtgttggggcttatctgctttatttttaaagttaatttgctaatatgaataaacatattgcgcacatatat

SEQ ID NO: 12071 - DNA, 521 bp, Cannabis sativa
taaagccttacctttttcaacctgtagttgcacacgtgcacattctctctctgacttagtaaaattaagagaagacaaaggttcactcttccaaactatttcgtgcgaaattggctcttttggagcaacctccccaagtatatccgaaatacctagatcgactgttactccacatttctccattgccagagcctccatcataccatcagcaactggtgctacaacaccacatttcgccatgtaaggtacagagcttgcgcaaccagtcactgccttctccttgggcacttgatcatttgaatccattgtaagctttcccctatctttctcatctcgttccctagcttctaggattgaagtaggggctaactcctctgtggtaggccttgagtacctaacacgagctcgctccatagcaatctttattctagaagcctcccccataaacataattggacaattttctagagaagcaccaccatttttattgaaccagaatcggggtggtgagttagaggcac

SEQ ID NO: 12072 - DNA, 605 bp, Cannabis sativa
ccattatttatattaatcgttcccttgaatttcaaatcattaaaaaattaacaatatttggaaaattaccaaaaccaaaatttaggtagaaagtaaaatttttgataagaaacatagctttttactttattattaatatcaaccacatttatcaatgaaatagactaatataaatttttcaagccacaaaccacaaatcacaactcaaaaagatatggcaaactattgttgtagtattttcacacaaatatatgtatcgttaataagtaataggtttacaaaatgtgtggtcgatcccacaagaattgtagttaaatactttaaaattaaacttttacttttatttagttatttaaatttaagaaaaagttaaaactagaatttaaaacaataaaaacaaacaagtaaattgatatgtaaattaatgatgattgaaaattaggattattgatttaaattgaatccatctattatggtttaacaaggaatttatagtcttctcggatatataaatctcaatggcatgcaaattttctactctcgtgataaattaaacctataaaagtcattaaacgcagaaggcatacaagctatccaaactatat

SEQ ID NO: 12073 - DNA, 565 bp, Cannabis sativa
gcgagaatgggcacaaaacaacgtctccaagccctgccataggctcgaggctgattcacagcccatcacctctgtagcaatgcttttcgtcatcgatccgtaaagccacccaagcaacaactggtcattcacgatccagatctcaaactctggattgatagtaacaccttcttctcctgtcgatggatctgcaggaaggaactccacgggtttaactttggtacctttcaggtacccatccaatctgtgaccacggacaatggcagacaccattgttttccacaacgtatagttgtttctatcaagcttcaaggcaaacggttgatttaaagtagtgacaacctgagaatctgtacagcacctgctgaaggaacggaggactgagcccatgacgctggagatgctttgttcacctgaacgaactggggtttgttctgccatggagctgagacgaagtaggcaccaccggtgcagagagagctctgataccaagtttgaaagcagaggaaaagagtataatgaagaaaatagcagaaaaagcagaaggtgaaaagctcagctcaaa

SEQ ID NO: 12074 - DNA, 923 bp, Cannabis sativa
ggtgttaagtgggtgtacaagacatagttgaaggaaaatggtgaaattcaagcacaaagcgcgattggtggctaaaggctataagcaagagttcggcatggactataaagaagtttttgctccagtagcaagacatgatacaatcagattggtgatcgctttggctgctcagaactcatggcctatcttccagttggatgtaaaatctgcattcttacatggagacttggaggaacaggtatttattgatcaacctcctggctatgttaagaatggaaatgagcataaagtgtataaattaaaaaaggctctttatggactaaaacaagctccacgggcttggtatagacgtattgaagcttattttttaaaggaagtttttcataaatgcccatatgagcacacactctttattaaatttggagatggaggtaaaatgctcattgtttgcttatctgtggatgatttgatttatactggaaatgataatgccatgattgaaaaatttaagcaatccatgatgcttgaatttgaaatgactgatcttggactaatgcactattttcttggcatagaagtggtgcaaactaatgatggtatttttatttctcaaaagaaatatgtccaagaaattttagacaggttccaaatgaagaattgcaatcctgtgggcactccaacggaagttggtttgaagcttatcaaagatccagaaggaaaaaaggttgacagcactctatacaagcaaatagttggaagtttgatgtacttgacagcaacaaggccagatataatgcatggtgtgagtcttattagcaggtatatggaatgtccaagggagatacatcttcttgctgcaaagagaatttttcggtacttgcgcggtacaactgctttcaggctcttctaccagaagggagaaa

SEQ ID NO: 12075 - DNA, 701 bp, Cannabis sativa
  modified_base (229)..(229): a, c, t, g, unknown or other
aaattgatatttcaaccatgaatgcttttttttagtagtagggagtcatgaatttgcttaattaattaaaatcatccacttttataaggggtggaaatttgattcaatccaatttttctcttgtcatccgatctaattcaattaaatcgtaaaatcgaatccaatctaattactaattgaaatggatcgattttttaattaaaaatctaattacacacttaaattttantattagcttaaaaatataaagaaaaatatgtataaattaaatattatcatttatttaagtttgatactttataaacatacaatcgttacaacatgtaatgcaactaagattttaaaataattaaaataacaatattactaagtaataaaatagaacaaaacatcatgaaaataaatacacaaaataattaagtgttacaaattaaacgtaaaaaatttaataaaaatataattaatatacattatatttttttttatatttttttggaataagttaagaaatattttttttttgtgtatcaattaatcaaaagaataatttgtagcataaatatttaagtttgactcccgattgcaaataaatatttaagtttaatttttggcgcagaaaccctcccagccctctttctctccttctcctcctcttggcgtcatagttgatcaactgttgggcggccgactggtggtggtgg

SEQ ID NO: 12076 - DNA, 829 bp, Cannabis sativa
tctaagattctggtaaaataaatctccaacactatgcacttattttattagttcccctataaaattaagagaaatgttaagaaacacattagagcatctctaatggtgatgtttagagagaatgcctagtgatgtggaagaatgcttagaaggacgtaactatgtaactattagagatgtttggataccaaaccaaaaactaatatagatgccaaaacttggcattgataccatatggatgtgtgagatatggtagcaaatttgaaaaatgcttactaatacttttagaagtaagagtgccaaaaataacgtgaatgataaataaaataaaatattatattttttcttttgaataatgtaaagattttttacacaattaaaaagtgcctactattgaaaaatgctcttatggtgacaatcatcaaaagagatagtgtattaatatattactattatgtttcacacattttaattaaactaggtggatattacgtgttgaggcacgtaaatgttagttttatttaagttttaatatttttttagattttggtaactatttttgattgactatttgaattatttgttttatcaaagtaaactgtgtcagtgtatttagtaagtaaatcataattgtatctataaacttataatatgtacattgttattaataattaatagtatgttaatctcaatatattcatattcatgtagtaattattcttaatgtgatgaaataatttatgataagtcataacaacatatgactttaacatttattctttgtttctggcaaaattcaaagtatcaatatatgtgttttgcaaaattt

SEQ ID NO: 12077 - DNA, 2131 bp, Cannabis sativa
aaaaaaaaaaaaaaaaacctacaggtgatggaagacaaaatgaaaatgtaacttgaaatgaaattataagtcaacactcacaatgaaaatgaaactaagtccaagcaataataaaccaagaacataaagacaaatagtaagtttttaacctgaatatcgctctcattgacagtatgaacaatagcttgctcaaaatctctatatgcttcccatatcttacttccttcagaaacatgcaaaccagtggctgtaagagcacgttcgaatagatctcttgccttggagataccagcaggtgaacaatcttttactgaagcatcatattcttgaatgaaatctaagtagtcagaccaaagagaggcagactacatcaaaagtaatgcagttaaatgttaattctccaataaacatgtgaaacattgaaaaaggggggatactaaggacaagtaaaaaaactactaggctaaatatgtcactcgtaaaacctctcttgtagattgcataacttacatttaattgaaacttcaaagactagagaacccaaacataacaaataggaaaaaaataacaataaagtaaagccctgcattataaggatctaccaaaggccctttcaagagcatcatgttaaatttatgaattcaatttatttatcaaattaaaaggcaaacattgtcctgtactcctatgttgataatgtacattaacataatcacattttatttacttttaagttttgactgttatggttatcattttcatggtgatgtaaactaaacgatataaaagcaattaaatattcaaatgcttcggaaatatatattggaggttttgacaaggacaaaaaccttcatgtcagaaaacagtcgtgacaatggcaagaaaagtgttacatatctcattctcaacatttacttatatacattaaaagaaatggttgagcttcagtggtattttagtataaatttctaattttttatcttcaaaagatagacagaaaagactcaagtacaaaacgaaatatgccatcctccagtccatggaagatcttttcacacccttttgctttctggtatgcaaagcaaatgaagataaatttaatccgattgtctcaacaaaaagcagtactaaccagataatcggatactcctcgctcgtaaagcttttcaattgcaggaaatgcctcagttctaacatgtaaacacaaacaaaaaccagacccaaattaatatatagaaactcagggacgtacatatatgacaattaactctacaatgcatatctatacacctatcggaaagtgaaaattttaccacaaattgtaaagggcagataatgaaaataagaggaaaatggcatgcatcaccttgagataagagaagattcatctctagcccattcctgccacataacagggatcaacgggaacaggtcactcatggcttctcttgctcttctcaacttctcaatgtcacccgttttcctaagaaggtttatgtactggaaagcattgacaacatcagctcaaaaaaaaaaaactagaaaacgaacttataatcaatcaaaccacgatattccaaaggtcaatattttctagttctggttttcctttcaggtcattctaggaaaccagacagagaaatagctatataaagaaagagaagggtccaaaaatgaatgaagtacctgaatatgagcgtcgtagttggaaggattagttgagagctcagtttccagagtttgaagttgaaggttgtcccgagcatcgtcgtcggagtcagaatcggagtctgagtccgattgagggctttggtgagccatgtccggcatcggttcgtctccgtcagttggcagctgagattctaaggttagggtttcctcctccattgctaattaattattatttttcacttaacttcttcacttcacacacttctcttcgccagaatgggcaagactcaaactcatatttgtaatttgaggccaaatttcttgaacttgcacaatttacaattaaaatttggcaccatcaactctttagagctatttaccattacatttttaatattttattattaaactagaaaatggaactgcgcttcgcccagtattttataaattacaaaaaaaa

SEQ ID NO: 12078 - DNA, 699 bp, Cannabis sativa
  modified_base (92)..(93): a, c, t, g, unknown or other
ttctcccagaatattctatgtcattttgattagaagtcacttcttccgtcacagtttgagatagaataacagtagcactctgagcatcttcnncactttgctcgagtggcatggtccaagattcatcagagaaggctacattggcatacactctctggtatgacatgatcaaccccacctttcgaagatttttcaatattaaagaggattcaaccttctctctcacatgcatcaatttcaagcaacatggcatcgactctcctcttcatgtcaataagaggagcaggtcttttgaaaggccagatttttagaaggtaatgtgtcttgacaaaagaacaagagtatagaaatactcctggtagtaaaggccacagttactcttggttatgtattctatgaaggggccaaattggtgaaagtggtaaaagccttgatctctatgggttggactcctttttaagtcacagagaaagtttatctcatgaggagttggaataggccaattcctaagatggtaaaaatatgaagaaggtggctagaatcctataactattggggtttatccggtaagggcaaacactaaagaagtcaactatggatataaaccatggatgtaagggtaagtaagcacccacattcacgtggaatctcgaccaagcattacaacaagtattatgggaacccttgggagcaccatgt

SEQ ID NO: 12079 - DNA, 519 bp, Cannabis sativa
ctgctcttgagaagtcgacttagtaaggatgtaggcatgtcaaagattctccatgcttgttttgcaagtagtgcttgattataatgtaaaaggaacgaaaccccattccgccttcaatttttgacttgcaaagtaaattccatcttttccaatgtatctttgacccgtctttgtttgttccccaccaaaaattgccatcatgctttctagctgttgacagaatgttttggttagtcgaaagcagctcatggcataagtaggaatatattggaccacaccctttcacaaaacctcctttccaccaactgaaaacaacttgtcattccatgcgtgcatcactttccaaactctttctttaatgtggctaaacagagccttcttatcacggccatagtaggaaggaagcccaagatatctttcatggcactcactaataggcatgtttagagtttgttgaaaaaataattgagctgacataggagtgttcggagagaaggacattactgatttttgtggatt

SEQ ID NO: 12080 - DNA, 627 bp, Cannabis sativa
tgtgaatgtattgaatttgattatcttcatcccaatccgtatatttaaagatagatatgccatattttgtgaagagtgaaacttcaatgtcccctttgaggcatcttcccggccaagttcattataaatggcttcttccattgaagcattggaatttgagcctcatgtttccaatgtccaatctcaaggaaaaaaatagccaataaataataaaaaaaaaataaagagaaatacttaaccgtctttttagtatgatatcattattgctataagagaattgctaaaagtattaaaggtctataacactttcctcaatgtcatattgttattagtgtaattaagtttaagaaaataatttttaggcaatatcgctaactcattataaggtaccacctatgaaaggtgttgggcaacacttgtgcccaatagcaatgctcttaatgtaattaagtattgagtctcatataatttaagataataatttttcaagaagcgttagtgatgtctaacacctttagacatgtagcattgcattagttaagttattatatttaattatatgagatttgatacagttagaccaataatgatattcacacatagaaaagtactagacactatcagtac

SEQ ID NO: 12081 - DNA, 1112 bp, Cannabis sativa
atcagaactagtcccatgacaacctaagaataatcctataaggtaagaaccttcatatctattctaattcacaaaatccctatacgaaaccaattgtttttaaacttaaaacaaaattaaagcataccttaagctttctctcttcaagaattagctatccagctactactggagcttagattgctaaatttcggattgaaaatcgaagaaaatggatatagaggaagaaagttttattaaagagagaagaacaagggtccgttcgttctttactgttatatatgttatatatatatatactaaacttagtatcatactatatactaagagcgtatataccctttacaacaaaaaattcgtctaatctttagttctatttccatcagtatcctttatgttttttttcaaccttttagctctatgaaagtaatacatatcctaaatatattttacttataataaaaaaaattattaaattattactataaacaattatatgttttcatttacattgcccatttacattattacaaatagacgtatataatattaatattatagtgacaaattaatgttaattaatgggtaagtgtattgtacacattcttttaatgaggtattttaatagattttttatttgtttcggtatttataaaagagttttttgattttttttttcaaatatcattgtgtatattatagttatttaggattatttgtaaatttttaaaaaattttgtatgtgtacaatatcaaaattaaggtttacatattttgttgcacaactaattttttttatgtgtatagtaagtaattgtttaaactttattttcggcactatatattataaatttttcaaaaatttacaaataattctatactactacaacatacctaattatgaataaaaagattatactatttttttttttataaatttaaaaatatataggagtgtgtcttctaaaatgagtgtactacaaaaattaccaatattatttacaatttttttttataaaattattcaaacactactacatataaatacatttttttataatttttttttatcataaatacattttcaaaatgaaaacaattcaataaattac

SEQ ID NO: 12082 - DNA, 813 bp, Cannabis sativa
gtcatcgcggttacccaccaaacttctaacgaaaggtttcaaagaatcacccttcgaatctaaacaagagttacttccagtcgaagagccctcgttccatcgaccccgctgcactgaataatttctgaccctaacgttattgccattcgtattgctgaaatgcaaattttcgcggtctccggctatattacgccgctctgataccatcttcctcaaatctatcggagacccagtaatgggtcttgtcgcttctgtcgattctatgtaatgctcccgtacctttgatgccggcgtggacgacgtaggtttgacgggaccgtcgcgctcattccacaagtcctcggctccttctttcatgaaccgatcagctagtgcttttacgtgatcgttagggctcataggcccgtgtccggactctgcaagaggttttctaaatgggtctggttttccggtaaccttggcccgaatttgggagcggattcgggcgtggtaaagctctttctcttgttcaagaagagatttttctttctctttggctcgcttctcgtgcatacgcttccattgccacttgtttaagccgccaggaaaggttcgagggccaccacccataggtcgggtaaggatcaggtttgagagaagcttggaaattgttttaggacgttctagaaggatggaaaaaaacatggttaatggtgaaaggaaaagaaatctttggtttcagttaaattcagttcagacactgtgcgaggaagaagaagaagaagaagtggggtttagggtttaacgaggaacaggaagaagaaaactgattcg

SEQ ID NO: 12083 - DNA, 675 bp, Cannabis sativa
ttaaaattctcccactaagataaaatactgtgatactatgtctaagaaatttattggtatcaatttctattattatagtaactgtttattggaacactaataggatcaacaattagttatactagttgctagttcgtttattatattatatccatgtctaatcaaaatatgtgtgccatagacatactgtgggtattgagtataatctagagttcaatgttaaaagtgtttgaactacatatattaataacatttccaccactaagtgttatagagattttgtggagttataaatataatctagagttcaatagataaaaaagatcattgaactgcatatattacttaacttcttccacccctataagatcaaaagatctttttactaaacgaaatcttaataattgcttaagaaatgataattattcataaacattgaatttaaattctaaatttttatgtggtattatctctttgtaaagattaaaaataccatagattttgtatcaatttctattattatagtaacgtgttgattggaacactaataggaccaagaataagttctactagtttgctagttcgtttattatattatatccatgtctaataaaaatatgtgtaccatagagatatcgtgggtattgagtgtaatctagagttcaatgttaaaag

SEQ ID NO: 12084 - DNA, 656 bp, Cannabis sativa
atagtaatacatgcatttttatatcaaaattacacatttttatatattgttaaagaatgccttattattcccttttaaaaatatatatatagaaaaagaattctttatttttaaaatgcaattccctcaacactatcataagataccgtcttacaagtagttaataatttttttgttatgaacttaaaatatatacaaaaaatgatattaaattataccaataatgatacatcttagatgatattagacagtgctaattttgtcacaaaaattataatttgttgtaactaaatgtatttttagccacaatacttgtgactaaaactatatatcagtgtgataaataatttttgttgtaactaaaagtgatatttaacaacaaaaaatatatattatgactaaaaatttatcactaaaaataacatttttggtagtgttcagtgattctccatgacacaatgcttactaaattaatgtaggattgtttcaatttttcaaataattttgtagttacagtaaaattatttaatttagagtattttttatttatacttttataattatttttttatttatttataaaaaagaaacaacataatctcaaaataaaattaatttttataaaatgaaaataacataatctcaaaataaaaaca

SEQ ID NO: 12085 - DNA, 694 bp, Cannabis sativa
atgacacattttgccacccttaattctgaacattacttgtaggtccctcccttgagttgttgatcgatcgatcctggagacaacctcttccactagtcctctgtataatttcttagtgttaacgaaaaacataaatattttgcatcatcactggtcttggcaacttgcgtgatgcgattgtattttgacaaatggtccctggggtccatacgtccttcgtacaactccatctatggcattctgaaacgctctgatagtggtgcatcaatgattcttatcacacaaggctctgtatcttcttccttaaagtcagacacgacaccactttgttttctagaaatcttttctgtgatttgcatcagctccttgactttgcattctaggcgttgagtcttatcacttaaagattctcttccgtaaacacgattatttatataatttctcagatcattctcacggggtctatctttttctactttggatttatctttgttagcatttaatcttcttcaaagatcattcatggaaagacttctgccactatcgtctgataccggatgtacttcgtcaacatcttcatcatgattactggaatcactaggaagatgcttatccatcagggactctggcttatagactttggcattagtcttatttttcttcgtgactctgcctctagagttagtctagtcac

SEQ ID NO: 12086 - DNA, 970 bp, Cannabis sativa
ctcgtgtgttgctgcttcggttgggacaggtttctttcaagacaaaagttttccatcctaatatcaacagcaatggtagtatatgtctcgacattctgaaagagcagtggagcctagctcttaccgtatcgaaagtaagacagcaatggcagtattttttgaggatggatatagatatcattcttggcatcccgttgagaagtggggtttgtgcagatagctggtgttggcatcatacttcaaatgggtgctatactgtaaagagtgggtatgcggttgctcttgacatggagagtgaacataatggaagcccttctgtgaatcaggctcactggtggaatgggatgtggaatttaaaggttccacaaaaagtcaaaatttttctttagagaatgtatcatcgggctctcccgactgattcccagcttatcaagcgtaatcttcctattcagtcgatatgtcacagatgtggtgaggatacggagactccggagcatgcttttgtttttttgctcttcattgtctccaatttggtctaagctgcggatttggaatcttctttatcgtggtaggcatgggtctttagtggagttgcttgtttatctctttgacatgcttgatcataataattttgcgttatcatctatgttatggtgatggatgcggtatgataggaactctcttctgtttaggaaaaagcaatctagattagatgtgattgtggagttagctaaggaagctttggaggagtttcagggggtggtcgcgagtggtggatgttgggttttgggggcctgtgatactggtggctctcgattgggtgttggttcggttggggttgggcaggggcaggcaacgagtggtgggtgtgaggctaggagggaatgttggtgcccaccgtgttgggtgagtttgtgatgtcggttgatgcggcggtgactccgggtaggggatatgcgggatttggggg

SEQ ID NO: 12087 - DNA, 711 bp, Cannabis sativa
atcgagtcggacagccgtctcagtcgcacaacctccttgacgtttggtggtcgagtcgagtcgcacctttccgaccttcttaatcgcatctctcaaccattatcctcatcctggtgttttttcacgtcgtcatcatataatttgttcaatcatgtttggtgcaacagtttttgtttctttcagaaataaaaaggatggctagctttgattgccactggttccagaaataaaaaggatggctagctttgattgccactggtgctggtgtttgcagtggtgtgaaggtctttcccactattatctttgataatcttttattagttaaagtatcgacattaattcatatgggagaagtctttcgctttttgttttaacatttatttttgtgatttttttgttatttaagtttaataatatttctttttatatgacctgtttattatagtttatattgacattttgtgtattcttttcttttcggtgacggataattttttcatgagcttttccaaatctcttcatgagagagagaaactatgaaagaaggttcaattattatgcattatgtgtaaagattaattcattctggttcgaatttgtgtttttaatttttctttgtgatttgcttgtaaatttggtggagctactaaagagaaaaaatgataattcttttttaatttatatttagattagcattataatgcaagttct

SEQ ID NO: 12088 - DNA, 542 bp, Cannabis sativa
cccccccccctcaaacttagcctagatagaaaatctaagctaagtttgtcacgaagatacaaaaatctggtgctagacaatgcttttgttaggatgtcagcaatttggtcacaagctggagtgtgtttgacaatcaattgcttgttgatcacacgttctcgaacaaaatagaggtccaattcaatgtgcttggtgcgagaatgcatgatcggattagcagccattaagacagcactttgattgtcacaccaaatcacaggaagctgtttgagatgaacaccaatctcagtgagtaaggcttgaatccaaatcaagtctgctgtagcatgagcaaggcttctatactctgcttcagaactagaccgagagactgttttctgcttcttagaggagcaggagacaatgttgggatccaaaaacatacaaaaaccagatgtggatcttcgatcatcgggatccgaagcccaatcagcatcacaaaaccctgtcaaggtaagagtagaagcagatttgaggtgcaaacctgttgggttttatgccct

SEQ ID NO: 12089 - DNA, 691 bp, Cannabis sativa
gagcatcatcatttgaggaatcttcttcctccaccaggactgcttttccttttccctctacaggtgttggtggctgagcaagcatactaggttctttaatcttgttagcatcttctattggtgcttgctcggtcgggggagctatcctcttcttgctcgacctcttctgctctgaatattattgagcatcatgctcctgctctgaatattcttgagcatactttttggctccaacacctcccttcaacttagcctcatgcttaagttgaatgagctctttcacctgctcggcatcctcagatcgactcaccttggacttcttcttctgcttcacgtgctttggcacaaaatcgtccagatagagcttgtacttcacaaagttggcctcagtggtcaacaaagtgatattctgagcatcctctggcagttggagaattttttgtgccctctccctatgtttcaacgtgaaaggatggcggcagtacaaaggaatctgctagaaccgagtgtggacggtctccatgcacgtcacaaagtagtactcgtccacgaagtaccctattctgttgactgcagggtctacggtacccttcagccacttatcatccagccgagagaagtaaaaataccccgacctgctctgcttgagaatcgacttcaggtcaaaaagccaattggtgttgtgcagaga

SEQ ID NO: 12090 - DNA, 502 bp, Cannabis sativa
atattagcacgtaatcttcgtgaaagggcgtatcatggccggggataaattcttaattatttatatatattatctctttttgataaacgagatcaacaaaatgttcctcattcttatcttataaactttgattccatccgcagatgtcttccggtataaatccatattccatgtattgaacaggactatatattaaactattattaattgagatttgagaaatgaattaaattatattaactatacatttaagtttttatttagaattggtgcaaatttcttattaataaatcaaactctctctctctccattatgctaatccaaactaaatccataataaaattttaatatttaaataaatactactttaatgtgattaaatttatattaaaaaattaatgataataatagtattttttttttatattggaggagaagatttaaatacatctataaccaaaattataacattgttattattattaaaaaattatgtatttt

SEQ ID NO: 12091 - DNA, 636 bp, Cannabis sativa
aagaaatagttattattctagttttgacttctacatgtcccaacttaaattaacaaactgtagagaaattaggagaacatacgacatgtctacatatataccttgtgattaaaacttaaaaaagaaagaaaaagaaagtcgtgtaaattaacgtgatagaagtaggaacacacaaatcatacttatattcactattttgcaaattacaagcaagacactccttaaatgaatataactattaattgatattttttgtagtttatctgctcacaaaggggtgtatctctatctcttcattcaatttaattcgtattattttactcataatgtatccgattcgtactaggtgcagaatttatattttggattcaatctaatctatatagtaactcaaatttaatccaatccaatctataagtgcggattagattgattattttagattgattactttttatattagattatttaatatttattaaaaaatattttttttccttcacataattaacaacaaaataaaagaaattattatttttttatgtctctaacaacaaattaaaataaataaaataacaaataacaaattcaaaacaagaagaaaaaaaatatgtttaagaaaaagtttaattttgt

SEQ ID NO: 12092 - DNA, 614 bp, Cannabis sativa
ccctacaatatctgtatatcaatctcagaagtacaaaaaggttcattattaacagaacaaaattccaccataaaaaaccatcaatttcaccatgaaaatatctctactaatcattgctctaaatcagttcaagtgtgtcaaaaacatgcatcatagattgtcaaactgagtaggaaaaatattactttgaacttaatttttgtcaatttttttttaatataaccaacttgaaaataaattctaacataaatagatgtaaaaaaaatgtaatcatcattgtcctaacagctctcgatcgtatttaactcagagtattattttatactattttttaatttgtcatttaataatttaaaaaaaacattttacaaaacattgtatctaaaatagtatttactcttatattatatatccttccctttaagttatttttacaaacacttagaattcatttttttacagattcataatcatcattaatattacaaaggttcactattgacaaaacaaattccaccaaaaactttcaatttcacgatgaaaatgtctccactaatcattgatctaaatcaatactaatcattgttcaatttgtaaatatataaacatacata

SEQ ID NO: 12093 - DNA, 568 bp, Cannabis sativa
ctttctttcaggtccaacaagcaaaggcaacaagagtcaaagactcttcagtcacaacaaaggggttcggcccatggtgaatggtgatgccagcccaagacaagaaagcaaaccctatccaacatataggagattttttaagggaaaaaaaatataaatatggtatttattgttgccttttacttttttatggcagaaaaaaaataaataaaaaagatataggaaaaaaaaattaattaaatggtaaaatatgggaatctaaaaaacatataaatatgcttaaaatggaaaattccatactttccaaaactgcaaacataacagaatcgcacaaacccagccacgattcgatctctctctctctctccctactctctgcgattttgtctccgatcatcaagttcgaaatcgcacaatcaccagccacgatcagtcgactgcaaaccgaactcaattgatcactgcaattcgatctgcaaaccgaactcaaacgcaacagtcgacttcgattgtcttctccaaaaccagcaatgatcgccgcctccgatgtcttctccagttgcggaca

SEQ ID NO: 12094 - DNA, 552 bp, Cannabis sativa
aaataataaagtaacgaatagcaaatttttttttaactcatcagtttggtaaaattaccgcacccacaaaaagaaatatattaaacttataacttcaaaattcgcactcactatcttaatctttctatccaaatttctgatatacatttttcttttcacaactcacttttcttctcacaaatccacccctcttacacgcaaaatacatatttataaagttagtcatcaaagactctaaaatttgaacaccaaaactctcattttcacacaattaataactatcccaaaaattacacatttataaatatagaaacaaaattaaacaaataatttgagtccaactttaatgagtaagaatagaaaaagtaaaatttttatgatatattttaaataatagaatataaagaagttgttgggagtgcttaactattattaaccaacatgtcactactacaatcgaatcaattgttttaattcataaaaaatcataaagaaattcattcgagattggtaagaaaataattgaatgaaaccttctgagctacattgttt

SEQ ID NO: 12095 - DNA, 842 bp, Cannabis sativa
agcatttttctcattgaatcacccatatagctctgtccagatttcagcagaattgtcatgatacattatgttatctgcgatttcatcagaaatagcatgaagtatccaagaaacgacaatactattgcatcttaaaccatctagcatagtcttcattaggttgaggaagctttccattgacaaatttgattttgtttcgagcaaccagcgcaaccaacattgctcttctcaaggtactgtaattctctttgcctttgagaatttttagagcaagaacaacacctgagaattctcaaaaagatcattagcgaggaagtacgaatcataatcctttgagaattctctttgctttctcattgctcttcttagcgaggaagtacggattcaaaagatcattagcattagttgatcgagaattctctctaaaaacaaagaacatgttcgagtcattagagttattttcagattcacgatttgcatgagtatgaactcctcctcgtgcttgacactacaagaaatgttacttttgccagcacatttttgtgctggcaaaattttgtcattctgcttgtaaaatggaatttacttttgatgtgttggcaaaaaaaattgacaaatcaacgttggtattaaaacttttgccaacacaaaataaaaagtgctggcaaaaatgacttttcacatcgcgtaaatgcgctggtaaaagttaaattttagttactgcaaatgtgtgctggtaaaactttgacctttttgctagcacagtttacgaaatacgctggtaaaagttacttacttttatcagcgtagtagcgaattgtgctggtaaaactttgaccttt

SEQ ID NO: 12096 - DNA, 693 bp, Cannabis sativa
  modified_base (356)..(361): a, c, t, g, unknown or other
gtttatatatatggagcaattataatataggttactcttatgtttcaattttagtatttgaagtaattataatttattgtttttacatagtgatctaccactataaaaaatagctatttttaattataattttttaatcacaacataaattttttgtgcctaaatatgatttttagttgcaacaaaaagttacttataataatatttagatacaagttgtcactaatttagttttggtcacaacaagtattgtgattaaaaacacatttagttacaacaaattgtaatttttgtgactaatacctttttagccacggacattttagtcacaacttttttttacttttaatcacaannnnnnttgtgactaaaaataaaaaaatttgtagtgtacattgtagttatagtaagcatcatattaattttgaaaaattcttaatagtttatgatatagagttcaaaattacaatttaatgttcgaaccctattttaaaactattcgaaatattttaaaaattggtaaaatatctttaataaatataatatacactgtcataattaatttctaaccttataaagacaaaagtggtgccctaatttttctttataagggtatcaataatgtttgttaattttgtgaagaaaagaacaattaatgaactaataatctattgcagatgaggtgactccaag

SEQ ID NO: 12097 - DNA, 539 bp, Cannabis sativa
gcgacattattgagaacacaagaaggttgtcaattattgtcactcaacctttgctggtagtggtaagttccaagtgagttataaagggttagaaacttatgtagttgatttggtgaaaaaagtgtgcacttgtaggggttttcaattaactggcatccgttgtccacatgcattttctgctattttagcatcaggattggattatcataactccattgatgagtggtataaacaggatgcatatattgctgcatactctgataattgaacccatgcctagtccaaacaaatggcctaacactggcctaaaccccattcttccaccacccgagcaagccttgcctgttagacctaagaagaaaagaaatagaagtaatgatgaaccaccacccgatcctacaaaacaatcaaggaaaggccaggctaattattgcagcaattgcaagcaatcaggtcattctaagctgacttgtaaaaatgagttagctaataaggtaaaaatctccatatttatatattgttgctagtttatatatgtg

SEQ ID NO: 12098 - DNA, 543 bp, Cannabis sativa
gagagagagagagagaaaattggtatgtgctttcttttaattttttgaataaaaggtaagtaaaaagagttttatttaactaaatcatataataaaatcagattagtaacttcagataacctcattaaaggacaaaatccaaatagccaaaaagactattttactcctcactaaaaccataaagcttcaaagttacttaggggtattttggtaatttataaaatctcgactaatcccaacattctcaatgtctaactatattgccccgctataacaaaaatactaaaatgtgatctattggccaaacgccgcgttctaatattaccgggcacaaaacatgcaaaaatctaaaatttcatatatgacataatttcaaataaatctccataaaatgataaatcataaatattatgcaagtttcataattaaaccctaataatctgctaatttccaaattaaagttaagcgatctttacatttgtactattacattatttttttttatgaagttggggtggtatagttggaggaagaaaatgatgt

SEQ ID NO: 12099 - DNA, 1437 bp, Cannabis sativa
aggaaatacacaagaaggatgttgagaacgcttttattggtaaaaggtttggtgatgatgatgagcttgcattgaaagttgctattttgtactttgttcagtgttttgtcttaagtgattcagactctaaaaaagtatctgattaagagttggatattattgatagtgggaggtttaatgaatatgcttggggcaaagagtcttattctttatttcatgattcggtaaggaatgcgatatcaaagaatcttgtgaaaataaataaagttgataatggtgagagaattggtttttatagattgagaggtttggcatatgtttttcaagtttggttcaatgaatgttgtccttacattgatggcattcattgttctaaattgcgtgatcgtattcctagaattcttaactggtccaatgattctgctccttctgttaaagagttcaagaattcaatcttcaatgtatctctttctaaggtatttagttttaagagtttgatttcaatgttaatggtatgtttattttatgtgtttttaatgttttatttcatgctttatgtttgttgcagcttaaggtcaagaatttgctcccaactgaggaggaatcattgaggttacatttagatgaattctttgtggataagaatatagatggcatggggaaagggaaatctgttcagattgatgatgttggtagtcaaggttctgttgacgaaaatagttcatcttttaaattttctgattttcataggagattggcagatatttctgccaagcaggaagcattctctgctgaatttgtcattttaaaagaagattttaagagtatgatgcaatctttggaatctgtacataaaaagattgacaagttgttgtcaagacctcctcccaaggtttgtttgtaatttgttattatactgttaattattgtttaattatcaatatttatttttatatttctttttttatgtgaaggattctcctgatgttgaggaatacgataatgatgaagatgttgagattgaggaggcttctcatgaggatgaggatgaattggaagatgatgatggtgatagtgaagagagtgagactgatgagggtgcgaatgaggatgaagagggtgataacggaaaggatgtgaatgaagagaaggaagggggtgtggatgaggatgtttctcagggcgagaagaatgataatgaatgtgtcattaatgatccggatcatgttagtgacgtaccaaaagattgttttaacgatgagaaaaaaaatgatgatgctgattttttcaaaggttatagccagcttcctgttgaggatgatgatgctgttatggctggtttgaaagctgttgcaaaatttcaggtattttattttttattcatttcattatttaattgtttacgtgttgttatttttttgttgtaatgttgttatt

SEQ ID NO: 12100 - DNA, 768 bp, Cannabis sativa
gtagaactgtaagttcatgcgtatactctgtgccgtgttacttcggttcgtatttatttatatttcttttaaaaagtgggtcgtcttgtatcgtactatataaaattatagatcatgtcgtgttttgttaatatttttaaagggtaggtctaacatggtccggtatttttgtactcggattcgtatcgtgctttgctcgtggtgatctgtatttcttaaataggtcaatctattttcacatcttaagtgctttactttttcatatattttttacaattactaaattgtatgtatatttcaaaattttaattatatttatatattttttgaacaatatttcacatataattatataaaaaaaatgattaacattattagaatttgaatatttacttataaatacttcaaatttttgtatcacatcttataaataatcttaattgttcatgttttaacaattttaattataaaattataatattcaacattatatttaaattttattatatttgaatttatttataattaaaaaattcatatcttattattattactattaataaattataagattttttaatatgttcgtgtagtgctttttaggcttatctgtgtgtcgtgctttttgggttagtctattcgtgcttacctgtcgtgtcttttgtgtttctcgtgccgtacttaagaacaaatttttcgtgctgtgtcgtgtcaatttgtagcatcgtgctatatcgtgttcaagcacatatatatatatatttttta

SEQ ID NO: 12101 - DNA, 507 bp, Cannabis sativa
catcttagtgttcccttcgatttagtagagatgccattgcagttcgggaagctacaaaatttgcaaacactaaatagatttgttgtgggaagtaatagagattctggtggtattgaattgttgaaagagttttcagatctacacgggagtctttctattaatggactagaaaatgtgagtataagtttcagatgcaccattattaaagagtaagaagtctcttagccacctatttttaatatgggatagtgaacctaaacttgatgagttgcacaaagaaagagaggtactcagtgccttccagcctcatccaaacttgaagaaactaaagattgagaactataatagcaacagtttcccaaattggatgggagatcctcactgcttgtctaatttagtaagcatggagatgagacgttgtggtaaatgcagcttcttgccgtcgttgggacaactgccttctctaaaagatcttatcattcgggattgtggtgtggtgaaaataga

SEQ ID NO: 12102 - DNA, 720 bp, Cannabis sativa
tggggccatggtccctcttcaagactactatatcaatttccttgtctttgttggcctcgcgccttatcaattaattccgcaagcttaccgcctgctctcaggcttgtttattttttaggttgctagaggctaggcttcgcctagcccggccgaaattttgtatttttacgaacttgtttctgtccccaagaaggggcacaagtttaaagacggatttttcaccctccgggcccatcctttaaatgagggcccggtcccttttaatctccaaaagaatgtaaaggactactgccatcgccttttcttctcttccggcttccaagccctggatcgccgggagcttctcccaaagtgggttaggattccccctcttctccgcactgctcctacccgactgtttctccaacacgccaagaccttctccacttacgacaaaaatgacctcaacgtgggagacttggttacaacggaaaccttccagatggccaaactgatctccgggagccagtcggtggatgacttcaatcgctcaaaggttctctgtcctaacatctgcaccccggccatagagaaagtgctccgggtggggattatagcctagacagaggaccggtaccagaagtacctctttaggagggaacatgagctggcttatatcaatgctcaggcccctaaaagtaggtcggagcaccctgacctaaaagtacgtatcaccctgac

SEQ ID NO: 12103 - DNA, 669 bp, Cannabis sativa
tttagaattaattttattttgttttaagttgatgttttcaaaaaatatatataaaaaatttttaaaaaattatatatattcgagtttcaggtggatttgagtgtaatttgattttattaggttttggattaatgaagcccgaactcggccgatgatgaagtgagtgtaaccaaaacttgatttactaaaattgaaacctattttttcgggtttttttgcgttggccaggttggtttcgggtgtaaatgtacacctctatctaaaactttgagaaatttaaaataatttataatattaaaagcagtgttcaaacacgactatgggaaaaaaattaaactaaaaagttcagcgagttaaattttcttgaatttctcaaaattttacacatccttcctaggaaaacttgaaggaggtcacccatcccaaaatgactgtggagttcttttgggatgagctatcagaaaataagatgatataagtggtatcaatcaatctatttaaatagtcacatcttgaaatcttaaataatcttacctaatatataaaatggctatctaacttattttgttgtgcacttaacagattcttgtgtatttaacagaatataccaaaaaataaagttaactttaacagacacaactcattctatttacaaacattattcacaat

SEQ ID NO: 12104 - DNA, 630 bp, Cannabis sativa
taaatatttctacttagaaataattattaatcatatgaatcatgatatccatttttatcattacaatttaaagtataaatttcacatccacataaattattaaaattaatcttcttattaaacatttcatatagaataattttatcattaacatttaatataaatccctcatttattagttttcaaaaacaaataatattgtggaaatttttcataaatatggaaaaaactaatggagcttacttttgtatggtagaaataaataatacaaaaaaatataagaacataaaataaataataattaatatatgagaaactaaacaaaagatccataaataaaattggtaaaatttataataacaattatcgccagaaaaatcaccgcagaagtcatcggtaccaaaacagttatcagaaaagttatcaatactagaaaaatcattgaaattgtcatcgtcgtcagaaaagtctagaattagatatctcatatataaattataatagaaccggttctataacataatgaatagaaaaaaattaataacacaaaataacaaatattataaacttttatatgtcaccatatatgtatattttaaagtccaaccttattttataataaataataat

SEQ ID NO: 12105 - DNA, 548 bp, Cannabis sativa
accgaatatttgtatatatctatcatagaaggattatttgtcttaaaatacatatacataggtaatttgcagtcgaattctctactgctattaaaggaaaattagaaaattaactgtacacaaatcaaaaattaaaacatatataggtgtggcgtaaattacccatataaatagcttaattatttatttgatggtgtatgaaattaattgaaagaaattcaaaaaatttagagcaactccaataaaatagtgttaaatcaacactaaaagaatactatttcaatattaattttttattttaatttcaaccataacactaaaaattatattaaatctattattacattatttgattaatagattatattattatataattatttattttttaaaaaaggattatttaattattaaaaaataaataaaaataccttagtttactgtgcctgctattgttagtatgggacactgtaaacttccacgaaaatataaatacttttacaatttagttggacacttttggtaaaaaaaattatatcatattaatt

SEQ ID NO: 12106 - DNA, 769 bp, Cannabis sativa
taataagtttaacttatttgtaatcttgttatgataaatttatgaacaatttaacatgtttatgtcttatttaattaaaaaatataatttagatataataaatataataaatttaaaagtagtgtatacttttacataagtcattattgtgtcatttttaaattaaaggtgtcaattcaaaaatgacatgtttaataaacagattagccgtgagtcaattcaaaaatgactcaaactcatttattaagacaaatccaaacttatttatttcgtgggagtttcgagtcgtgttattgtgtttgacccaaattttcaatcctacttcaaagtcaaaccaagtctatagtacattaatttatctaaattaataaagtgcattataaaaaaaaaaaacaaaggagaaaaccattttagatgtgtattttataaaaattattgatttgattctttattcaattaaatgaaaaattattagacaaaacttaatagtacaccgttttatttttatcaaaataaaacttaataatagctgatatagagatattatgacaaaactaattacgtttttatatttattcatgttagaaattatcttcatgcaagttaattatttataaaaattattgaaaattaagctcaagtcttatttgtatcattttaaaaaaaatacaaaatttattttattatttaacaaaataaaaggtccaatatcaataatttttaaaaaagacagaatgatattaatcctaaaacaaataacatataacat

SEQ ID NO: 12107 - DNA, 615 bp, Cannabis sativa
tcttaaaattgtccagcctttttttacttcattccattagattcaaatatttatacaaacttaattaaatttttaccatataagaattgttgtataataatcatggaataactcctataatcatatacataatatactaaagataaataaagaattaaaaatctaatacaaggataatataagagattaattatataaatattacaacacatatattgttataattaataaagacactaaaagatattggactttgccacattagcaagtgctctaactaactctgttagttacaacctaatattacaacacatatattgttataattaatgacactaaaggatattggactttgccacattagcaagtgctctaactaactctattagttacaacatgtcctaattataaatagccattagctctcttttgttgagagaggacttgcatcattattttatagaaatagaatcagagagaatattgagccataattacagacgtgagatttcttggaagaatgttaaagggattgtcaattcttgaaatagcttccctgatcatgagagatgaatatgaaatcctagttatgctagtttagggtgctcgatccat

SEQ ID NO: 12108 - DNA, 942 bp, Cannabis sativa
atatgggcacaaaatacacatatataatgggtaccaacaaagatgcacataaagaaaagaaaatgaatattacatttacattcagtaagaaataagaatgatgaagtacccttgtctatgtttgtctatgtttgccttaagagtctcacattgtcaatggatttattgaagtataataataaagatgggtaaccagctgagggacccttgtcccttgtaatatagtgaattagtgatcacttattacacagagctaaaatgccaactaagttcagaaaaagcagctaaggcagttgaggatgttaaggatgtagaatcaacttcaaactcattggaaaaattttcagccaaaaagtcgacaccatctacaagaggcgaagcacgtcctttaaatttctcttttaatgggattagatcaactttccacttcctaaagctactcccaaatatcactacgttttctaacgtggcttcttggttttcttttgctagattcacatacaatggacaatcacaccgaggcatgaagaacactgttggtttattcacctttcgccctcctttctcattctcccgcaacactttaaaacccatatcactcaaaacttcattctcttcagcactcagaattggatcaaatatttctatgttaccattaaatatccaatccaattcttccttcaacagaagtgccaggcttagctgcaaccttgattcttcttctttttttatgctcccaatacaatatatcaccatgtctatcttactaccattggtagaattcacaagattttcaaaacgtagtttaatctctggagtttgaattatttgatctaaaaacttgacaaaaaatggcatgatttccggtttattcttattttgttgcacaagtgactttattgttggtggtgtctcctgagatgagttagatgacagaaataa

SEQ ID NO: 12109 - DNA, 560 bp, Cannabis sativa
cagcatcaattccaaaattttttgcagcaacaacaccagtcttttcctcaacaacaacaacagtctggtctgcaattgggaaataagttcttatattgaactccatcagagtctcctccgcttagctcaaattttgttgattttagattatttgggagttcatcgcaggagcaacaattttttcgactcctattctcaaccagggtcagctagggaatccaacaattggtttatcgtcagatcaaccatatgttccttctctgccacaaccgtcgggaactcgtaatgacaataatacggatcaagactttataacccgagaaccttaacgaaaattttatggaataatttgtttatatttttaataatttagtttaattttgagacattgtaatagaattaacgttaaagtagtttgttttgagatattttcaaattatttataaattttattggagtcaaattataatatttgtaagtggattaattatatttaaattattatttatatatttataaataatgatttatataataattattaattttttatatattat

SEQ ID NO: 12110 - DNA, 688 bp, Cannabis sativa
cagccgattgagtatgagtggctctcaactaaatgctcagtttatgctaatttggggcatactactgctagctgcaataaaaagaagaaagtcatatggaagaagaaacaaggtactgagaaagaaaaagagaaagacaacaaactaatattgtccaagacaaagagccaagggaaattgctaaacatagagcatatgctactgactcgagattggttttgatgcaaaattaagcaggggatgttggtaaagatagagtagagaatgatggtaattagattacccccataagaaaagggcagagacaaaatgatgcttcaaaaatactggaagttcctactattactagtaggaataatggctacgaagtgctgcaggctgctgcaatagatgaggttttgattcctaactctaatctttttttatggatgcttataatatgttagggtggaatgtgagaggtttgaataaaaaggataagaaacttgttattcttgatgtttttagattgattaaaatttgtttcggagccttatttgaaaccaatattaaacaggagaaaatctgtgatagtatggagaataattttcctacttggaatttttattctactaatgtggttgctggaagaatcctgctgctttggcagaagagttatattcaggtcaatgtcattaatgaggacaac

SEQ ID NO: 12111 - DNA, 556 bp, Cannabis sativa
aaagtttataaaatatattattagaatttcttaggaatattgtaatagattgtattgtataatattatattaaattgtgtttcatttgaaatattgtattaaattgtattgtatagtatattatattaaattgtattttatattattttttgtatatttttatgttaaatttcaattatgtcaaaatattatatatacacacatacaagtcaataccaactataattataattggatattagtaacatgcaatgcatatttgcttagagttgtattaaaattgttattacttaattattaattcaaataataataataaaaattaaatctaatacaatttaattatattttaaaatatataaactttaatctagtattaaatttatttataaaaaatgtagctaactaattttattagacaataaaataagtaaataaatttaaatattttaaataatataactaataaatttattataacgtatgatcaattaattgaattaatgtctaattcaaattaaacaaaaattggtcctctctctttctctctctctct

SEQ ID NO: 12112 - DNA, 838 bp, Cannabis sativa
gggacaaaatctttttgagcttattttggaaggaactttttcgcttgcaaggtacttctttgaagcatagtaccgcttaccaccctcaatcggacggacaaaccgaagtggtcaaccgccgcttggaaacttacttacgctgcttcgttagtttcaaacccaatcaaagggtcaagtggctgccttgggccgagtattggtataacacttcgcatcacacagccacgggaatgacaccttttcgtgccttgtatcatcgtgatcctccatcacttgtgcggtttgagtccccttcgacacgggtttcctctgtggaacaggtgcttttggaccgcgaggagattttggtgttgctgaagcaaaatctcttgcgagcccaacaacgaatgaaaactcaagcggaccgtaagcgtcgagatgtccaattcaacgttggtgaccgagtttatgtcaagatccgtccataccgacagcgcaccatggccaaacgttctaatgagaagttgtcccctcgtttctttggcccgttccccattctggctcgcattggccccgctgcttaccgccttcagctgcctccggacaccatgatacatccggtgtttcatgtgtcactgcttcgtgctgctttgggaccccaacagcaagcttcttcccttcctcctagtctcacggctgagctggagtggctcttggaacctgaggccttactggccattcgccccggcactcacaagactagccctcaagctttgatcaaatggaagaaccttccggaattcgaagccacttgggaagacttctcagtaattcaagctcaatttcctcatttccacct

SEQ ID NO: 12113 - DNA, 721 bp, Cannabis sativa
atgatatatttgcatcaattttcaacattatgcttcaatgcacaactgcaaaatttaatgcaattttttttttgttttttttatgaataatttttgtactatttttttggtaaatgatctttgtacttgttgactggatttttagccaaccaacgcggagtcataataaatgagatttaaatcaaaattacaataataaacgcagttgagaataccgaaatttacaataaatgtaaataaaagacatcaaaatttaaagaggttcagcctcgaatgtcgataatagcctactccccttgtgtttcattgatctgagttgcaaaagtcaagaacaggctcttgattgcaaaaaatgagaagtgttaattttctaagtgttcaagattgtggatccccctcccaggtcaaaaatgaccccttatataagggagcggggtcggtgcttctcgcttcaggagacgcgaccaacacagagctacctcaactgtatccttgattttcggaggtagttgaagtctgatttttatgataatatcccgctatttttgtggattgacaactgtctttgagcatttcatgggatttgaacatttgaaggagttactgacgacgagagtcccttatgggtgtgacatggtcgtcaaccgcctttaggaatgaagcccatacttaggggcaacactcccggggccctcattcaaagggtgacgaccaccatcgt

SEQ ID NO: 12114 - DNA, 748 bp, Cannabis sativa
attccctaaggaaactaccacttcagcaaagtggtcagatcccaagtcttctaatttatcactagactccccatcatcgttttagaggacgtaaatctcaagattggtatcattgtcattggcaagcacccactgggtgtattctttctcatccttcccaagatgtttgaggatagaagggtcctttttccagatagtgtggaggagcaatgagtaggacatttccatggattgaagtcaaaaccttttagccctagcttcagctctgcctccacctcgatagcatcctgaacaaattacgtagccatttctttggctctttgcatggcctctaaggcaatgaaagctttgatattattggcagattggtgagtagcttccctctacaatctctctataatgtctttgcggttgttgctggtcgagcgagtagcattgaagatcaaattttgttgatcatatttgacactcaatgattctttcgccttatttaaatccttgagatccttcttcaaagcttcattatcatttagtatgcctttgatcacttgatcttcccatcaatcttcctttgcaaattgacgacctctcggatgttggtgttcagcgcatcactttggattgagagatgggaatccttggtatccctctcctcagtcacctgacagatttcatcctcgaggaagatcactcgagatttatgttagtccatctcatccttgaaatcttgttcaacttgggccttatg

SEQ ID NO: 12115 - DNA, 643 bp, Cannabis sativa
taataccttcatataaatagtcaaaagtgtaattttttttttttgggtttttatataatttatgtaaaattattttatgagaataatttaaaaaaaaatatcttactattataaaagtgttgtaatgaggtgatagtttggagacaattttaccctttaagaaagtcagtattaacaattttgcctttccaccggtcaataactgaggtattgtaattccatctaatagtcaaaattaacagctcatgtgtttgtatttcccaatattacattaaagtgtatttattaccttttcatcctctatttaattatctgtcttcatattgtttttttttttttgaaaatgtctgtcttcatattgttaatgtatgcttaatatattaaatagtaagattttgaaggtgaaaaagtgtaatagtcaaaattgacagctcacgtttttgtaatttccaatatttccatttccactttttcttaaatagtaagattttgaaggtgaaaaagtgtaatagtcaaaattgacagctcacacctttgtattttctaatatttctatttccactttttcttatattgttaatgtaatgcttttaatatattaaataataagattttgaaagtgaaaaagtgtaagagtcaaaat

SEQ ID NO: 12116 - DNA, 569 bp, Cannabis sativa
ctcttagcatttctcccatgatataactatcccttatgaaaaggtggaaattaaggattttgaaacaatgtttgaaaagtatggtatgtttttatttgctcattttttatggtatttttattttatgtctttgaaatttttttatggtattaagtttatcctatttttgtaacacttatttaaaatagaaaattacactcgatatgaaattttaaaagttgtttatttaaatatggtacttttaagtttaaccaatttatatagtattttttttttatttttaagtatttttgtaatagttcatactcatatatatgtaaattaggttttcaaaactcatatttaatgtttttatttatttttagaaagttttatttgtcaccgaagttcactaacggagccgaaaaagttgtcgaagtagctgttggtgtcgaaaaagtcactggagttattgccggcattggaaaagtcgtcaaaatcagcattgtcgctggaaaaatcactaagaaactggtttcttcaaaatcaccaagtgtttcttcataaagaaaccagtttcttgatgattt

SEQ ID NO: 12117 - DNA, 559 bp, Cannabis sativa
aagttttctcaatgctaagatggagaaaaggaagagggtacaaatgaaagttattaggcagaggccggttctttcaaatcagcatatatctttgttggaagtagaattttcaaaagaggaagtgaagactgctgtatttagcatacctggaacaaagcgcctgggccagatggatatagtagttttttcttctaggataattgggatcttgttggtaatgatatacatgaagcagtaacctcctttttacactctgggaagctattaaaagagattaactcgacagtccttactctcataccaaaagtcagatgtcctaacactgtaagtgactatcgcccaattgcttgttgcaatgtcctgtataaaatagctacaaatctcatatgttctaggctcaagctaattctccctgatattgtctctcaaaatcaaggagggtttgttagaggtagatatatagctcataatattatgatatgtcaggacttgatacgacattatggtaggaagtctacaaagccgaattgtatgcttaagcttgatttacaaaaagctt

SEQ ID NO: 12118 - DNA, 565 bp, Cannabis sativa
gctagacaatctgcatgagcatttttttctcggggaatccgttcgatcttgtaattcttaaattcttgtagcaattccctaacagctgagatgtaagcgaccatattttctccacgcgtttggtattctcctgacacctgattataaccaattgtgagttgttgtacacctccactctgttggctcctactgccctagccagctttagtcctgctatcaaagcctcatattcagcctcattattagaagctggaaatgtgaaccttagggcggcctggagtctcagtctgtcaggagatatcattactacccggacccctgatccattctcgtttgatgcgccatcgacatacactttttatgtagacacatctagatctgacacattggcattagcctcggtttcattgaactcaacaataaaatttgcaagcgcctagccattgatcgagatgtgggatatgtattgtatgtcgaattggcttagctccattgcccacttgaggagtctcccttaggcttcacgtttctataagacctatcggagcaggtggtttgtgaatac

SEQ ID NO: 12119 - DNA, 791 bp, Cannabis sativa
aacattgtgtttgtgccattatcacaattcagtcctctggtttttttatggcaaaatatggtgcaaatcacatggcattcaatgcaatacactggtttaaataaaagcaacacaaattagcttaagagtttaagcattgatcctcaaatttccattacccaatttactcagcttagttcaccttcccactatctattattactctaaagcaatatgttaccaatgtggaagcgtagtttagaaggtagaataaagtgaggtgtataattaagttatcacatgttgtcagtgcaggacactctaatatcccacctcaagatgataattattttttttagctcaccaatcttggacagctcgaacacaagggctcactatgacttgctatctccaaatcaaatcacaagtgactttgaattggatttacaaacaggttgcaaggtgtatgataaaatgtccgaaattcgaatagctcatgcatcttatatattatactaagttatcaatgtagattctctaatacaataacccaaataccagatcatttcttctcatttcccagcaaccaaacacaaaaaaacccacttaacaattccatcataaatttcacctctacccagtacatctccaacaatatcaaaaaaaaattagtttcaccttagttcacattcccaaattagcttaagagtttaagcattgaacctcaaatttccaattaccaatttactcaccatatcatttttcatctcatttcccagcaaccaaacacaaaatcccatcacaaatcagta

SEQ ID NO: 12120 - DNA, 625 bp, Cannabis sativa
  modified_base (100)..(103): a, c, t, g, unknown or other
ctctatgtctaaaagtttaattaggatttttacttccgaaatttgacatctattgaacttttaaggtcgttaaaaatacccctgaattattgagattgtnnnntttaaggatttttgtctaattttaataaaaaaaatctaacatgaatgaatattcaagggggcatgatttagtatgtgtcaaaattcgaagggcatgatttagtacagaaacaataactgaaatagtaaaattgaatgaaattaaacaaaagtccttaaatctaacaatttcaatagttcaggatgaatttttaacggtcaaaaaaattcaaagaacataatttagtacatattaaaatttaaaaggtaaaaattctaattaacctttctaaaaactctaatgttatatattactttaataatttgtaataatatatataaagttctataatataatacccttattaaattaatacacatttatcattgtagacatgtcaaaaatataatatttttgacattggttggagtgtctaacttatcatatatcatatatatttttttttgacaaaaatatatgtatatatatataagtataagatgtcgtgaaaattatgaaaattttcaaaataaaatatatagt

SEQ ID NO: 12121 - DNA, 830 bp, Cannabis sativa
cttaatgttcgatactgtaaattagattaaattttttaaattataatttactatacaaacaatgtacacaattttgacatcccaaaaaagaaaaaaaaatagtcaaaatttttatggttatgtacgttataattattattaacatcctgtaaaaatttttgagatattcagaataatttacaatataaaaaatagagttcaaatagtatagatcatacacgtatgaaataaaagagtcatgtgtgcaacaagactgtttgaaatctatttttggcatatttaatttcaccaaatttttaaaattttacaagatgtcttaaataactgcaatatacacaaccataaaaaaattagactaaaaaatttgttaggatgttgaaatactcattttaggagtgtgcactataagtggtaaaaataaataagatgcttctccgatccacccaaaaaaacaaaaaatggtgcacagatgtgcatcacctattgtttcggcatttagaaaagaaaaaaaaaattagtcaaattttttcatggtcatgtatgttattgttataatattttgagacatactgtaaaattttaaaaaatttagaataattaacaatataaaaagtagtgttaaaacagtctatttcacacacatataaaataaaagagtcacgcacacttcataaaaatattcctcctagagtagctcttaacagaatttttgctttctgttatagccatttatgtacatttaatgtactctacggagagataaatacataaagttaaatatagtgcaatagattatttgaattctctttttggcgtgttaaattttttaa

SEQ ID NO: 12122 - DNA, 515 bp, Cannabis sativa
gtaaaataaattccaacagttacagtttatataagcagaaaggattatgaaataatggagctcaccatcatggtagatattgctgactcaaaaatttggactagacttttaagtcatacccccttcgctaaatgggcgagaatgaataaaaatagttaagtaatttagagagagacaaccaatttatagtagtccaccccctatattgcaatagtaatggggctacgtctactttgagtttttatttctcacgaaatggtaattatagaaatagactaagtatcaaaaactttaaactctagagagagaagctctgaccttatgggtagttttttgaatgtggaaatgagctaagggagctctccttttataggtgaatgaggctcacaaaaattggaaaaaaaaaataaaaataagttgttttccaccgtttatgatgatctaacagttaaaattagcttctggtggtaatggccaacttttggttttggcgggtccctacgaattatctagag

SEQ ID NO: 12123 - DNA, 644 bp, Cannabis sativa
atttgatgaatatgatcataactatgcttgttatttatactctttttcaaattaagagtgccctgttttgggtctgtagccgttttttctgttttttctttttaactaccactttccttttgaattgctatcttcacccatttcaaccgcctatcctgcccatctttttcaattttttcctgataactgttccctccttactgctgccttgccgaagtctgagttcactgttactgccctgcctccgattactatcatggatcctctaatcaatgatattcatactgccctttctctcactgatgaggaacagtcagttttcacaatccctgagtattcccctccacaaactgaaactactcaacacactctccttgccaaagttctcactcatcagaatgtatacagtcaaatcttcattgatcaaatgggtggtcactggcgaggtcgattccatgttctcattactgaatataaggaaaaagaaggcttatttcacataaagtttggttgtgaaggtgattaaagaagggtgttgaataaggaaccatggcactttcaaaaccacttaattgttctttgcacaccagatgctctacaaaatgcctcaaaggatgatctggttttcactcccttttgggttc

SEQ ID NO: 12124 - DNA, 621 bp, Cannabis sativa
ggaaggtcttttagagagtgccttcgaccgtgactctagaagccctcatactcgctcccagatgcactattccttagcctgacgtggacaccttactcagaggagagttagttaagttagttattgtctaactaacttaacaacttaaccttcttccagccaccgactttaggaaattgatcttaagcctataaataccacaaacatttatcatttcaaaaaagaatgatcagattgagttgagtgttaaagagagatatagagaaaagagagagattagatttgggttttgtaagaagagtcttctgttgatgaagaagattcttagggtaagagtgtgagggttgacatactttaagagaactaatcagagaatcgatctcgactgtattatacctattcttgctcaatcaataaagaggatttgagttttaaaaaataaataaataaagagaatttggtggtgtaccagaactggagtagagccatagatcacatcgatctatcagacttaaaatagtatatatcttggcgttgattttattgtttaacaacttcaattgtttttagtttttccatactctgttcatccccgtttctttttttttcgattattgttcg

SEQ ID NO: 12125 - DNA, 532 bp, Cannabis sativa
ctctcattttaaacattatatgggtagcaagagttctagatctataaagattgatgaaagatgtatggagatgggtcctcgacttagtatggagcttcaattgaacttaataaagaagttttctaaggaggatgtccggagagcaatctttagtattgctagcactaaaagtccgggtgcaaatgggtataattttgagttcttcaaagccatgtggaagttaattggggatgagatagcggaggttgtgcatgattttttttgacacatggaggatgcctgaagagttaaacgaggttgttattgcccttattccaaaagttgagttgcctagtaaagcagtggattataggtcgattgcctgctgcactactctatacaaatgtatctctaaaatgatctgcagtagattatctgaggtactatctctgttgattggacaaaaccagggagcttttgttaaaggtagatctctggctcataatatacttatttttcaggatctaaaaaagaattatagtaggaaaaatgc

SEQ ID NO: 12126 - DNA, 676 bp, Cannabis sativa
atggctgcctcgtccatccacattctctctttgcactccagcaaaagttaatcatggggccagtttggatcaaatgaaggatgctgaaggttctcggaaacaagatactatagatcaaaccttccacccagatgatgtcccccttattctaggtatggccccttgctttaataatgataatgatgatttagtgttgcactacactcgaacgacatatacacggtgagtagtggttataaagtggctgccttcagtgagatagaaacaggccctcctcggatgagatcactaggaaatggtggaacgagatatggaagttggagattctcctaaagttcgaaattttgtttggcgtatctgtaatggctggccccccgttaacatggttcttcagtctcggggcatgaagattgagccgttatgttgctggtgtgggcagaggaagaaacaattgaacatgggctatggttttccccatcagttactgatatatggcaacattttttgatgtggaaagtaatcaaaatgtgccgaggtgaaactaaggacatgcttatgaacataaagcagcgaacaaacaaagcagattttctaattttcatcattctctcttggctcatttggaataggaggaacgaaaaaagactcaacattcatcttcttcctaacactttat

SEQ ID NO: 12127 - DNA, 527 bp, Cannabis sativa
tagaaattcaattacttctgctgttccagccatttcaaggagaccattaccacagccatgtcctcttcttcaaggagaatcttctgaagaccagcaaagaacaaataatcttactgcatctgttcaatctcgggtctcaactatgggttctaacatgaatataactgctaccgttactccccaatttccaatttcacatgagaaaccagcaactactgctatgttgtcctcttctttagtgaattctacaccagtaaccactgtgaaattcacaccaacacttttaaatggacttgtcaacaagcaatctgatgcaaatcctaacaaagttggctcttctccgactgttattccaacaacaaatcatgccattgattcggttgatgtggatgacctcagtgacattttcataccagatattggtactattgctacatatcctcccaatccaacattgacttatgcgccacatcatggcaatagtctccagcggttgaaaatctcaacaaatgtagcagccgatgcag

SEQ ID NO: 12128 - DNA, 600 bp, Cannabis sativa
cccacacaccctctcataggctacttgaggtaatattatgtctctattgcaggattgataccaaaacttagcattggtgccaatacaaaaaatatatatttttttgattggttgttatcgatgtttagacttgaatgccaaagtagtcttttctagtgctaccattagagattctttaagttctagtattaaacctacccataagtcaccacttgaagctaggtgtatgtgtgagttcaagtcccaacataatatataaatgtttaaataaaaaaaactacccataaattacataaatgggaactcccaagttaaaatgtttcatttcaaaaaaggatttgtaaatgagaaacatgaaaggatgctgtccctactacacaagaatcaactcagaattccacgtctaattcagaataaggaacagacttttcaagtttttgcctgaaattgagaaacaaagattggaataacatatatttaaaacatgtttaagataaaatccactatttaattgaatagcatggaaaaactcaagtgaatttccagtacttatgtttcaatttcaacaacacaatggcaaaatttccacacaaccaaatt

SEQ ID NO: 12129 - DNA, 627 bp, Cannabis sativa
aatgttagcagccgattcatcatataggatactagatgatatctctttagaaacagaattcaagatccatgaaatgacaatattattattcctaatccatgcattatatagaatgtaatcagatggcatagttttaggaatagatccatccaagaatccaagtttattctttacagatatggagagttgcattgctctactccaggaaacatagttatcttgcccagtaagaagttgtgagaagaggatgttacctgggttgtcgtcgtggtgaaggtagtatggattcgttggatcctcgagtggattcttttgattaatgaactgaaattcttgatttccatggctagtggaagctgatggattatctgcagatttcgacatgggttcttcactttccatttgagtcgtggaaggattttcattcgacatgaatgaaagacagaagaacagagatagaggcgcggtagaaaggtcgtcggagaagaacacaagaacacgacgccagtactggagaagaagaacggagtcgattggatcgcttcagggaaactatatctttccctgctctgataccataatgtggaaaagaaataaggtctgaatattatttgattgattgattaa

SEQ ID NO: 12130 - DNA, 508 bp, Cannabis sativa
gacatttgttaatatattaataaactatttaattttagtggcaattaaaatttataactagtactgcatattttattttattttatttttttaaaaaaataaagcatttctctaatggaattttgaataattaaaatgttttaaggcatttttagtttacaaaaagccactatagctagttagtgatatatcgtttcagttgcatttgtagattgctactaattaactagctaattaattaattaagctaaatacgtttaaatattttagtaacacctaatttgctacaaataataataataataataataataataataattataacaaaggctagcaaggtgccatagaaaaaaaaatatttttagacccttatttttttaaaaaaaagaacatacaatatttttcaaaataaaaaatgtataattttaaaagaaaactcacaggcctaacttatttatattcaggatctctacatttatgttattaacatttttcactaaatgtt

SEQ ID NO: 12131 - DNA, 595 bp, Cannabis sativa
atccactacaatgaattaattaattaatttagaagagtgtgagttagtgaatagcaaaagacatataatattaataaagttttggtaacatttagtgaaaaatgttaatataacatacatgtggagacccgattttgagtataaataagttaggcctgtaatttttttttttaaaattatacattttttattttgaaaaatattgtatgtttttttttttttttaaaaaaaataagcctctaaaaatattttttttatctatggcaccttaaatttcagggctagcctttggtattattattattattatttgtagcaaattaagtgttactaaaatatttaaacgtatttagcttaattaattaattagttaattagtagcaatctacaaatgcaactgagatatatcactaactagctatagtggatttttgtaaaataaaaatgccttaaaacattttaattattcaaagttccattagagaaatgctttttaattttttttttaaaaaaaaataaataaaatatgcagtactagttataaattttaattgccactaaaataaaataatttattaatatattaacaaatgtc

SEQ ID NO: 12132 - DNA, 520 bp, Cannabis sativa
ttgtaatcacataatgatggaaatatccaaatactgattaatttattattcaaatgaatattgcaaagtcaattatacgattctaattgaagtgttccaatattaataccttagaatgctaagttcaatgcctagttcaatttaataggtgtttctctagtttgaaaagaatgtccttttatttcagtttagattaagaaatacttttaatcaattactcatcatcagtaagtagtttagaatattgatatatgaaggcctttttagtgttaattctctctggtgtagagctagctagttagctagatagaaggtcaccactttagatagttgtatattttccttatttggttacaactttgtcactaacaagaatttttataataaagatataggcatcatctcattggctcgtgtactagagagtgaccataaagctttaggtgaaaggagtttcacatacttaattgctcaatgccttttttattttttcttctttttaaccatttatttattgatt

SEQ ID NO: 12133 - DNA, 644 bp, Cannabis sativa
ttatagctaacatcactagtaatgttcaatatttttctttggtctttatcatattattaagtttttggaatattttttaagatagattgatatgtatcaactatcaacttgaccctctttttattgaaaggtcaattagtagaatatccttatgattgtgtcgaaagtcgaatcccttatttgaaaaagaccataacaacatattattagtagtttaattagtgcttaaaaaagcttcttcttctaatcacgagacctaatgatctaaagctttttcaaaatcattattgctaatgatacgataatccattactttttggaactattaaattaataccaaaatcttagtttaactatgataatttattcaatatataacaaaaagttttcacgtatttaattgcaaaaagttttgatttatttatgtgctgaatactcttaattattattattattataaaatttagagaaaattgcataaattgataaaatatttacacttttatgtttaatatatattttttatattttattttattttatttttttttttttgatgatatttttttatattttatggtattctataaaaacacaaaaaaaaaaaacaataagattactacatgaagttttttttttttttt

SEQ ID NO: 12134 - DNA, 508 bp, Cannabis sativa
caactctaaggtgtcggtttataattgatcatacctataataattttaagtgtcggttagtagaccgatactaaaacaataaccgagagccaaaaaattgaaaaatatatacatacagattgaatagaagtgttaattcataaccaacactaaaagatttggtgtcggttataaatcgacacttataggcactcctctctctctctctctctctctctctctctctccatagaggtggacgttggtgttttgcggagctgtgggttctcggatgtagggttttttttaaaggcagagaccagagcctagattaaggtctggggctggggccaatgctgagatcggggtccaaatttggggtcaaggctagagtcaggatccaatgcgaaaattgggatccaaagccgagtgggttctaaatcaagtttataataacctattaatataagtcaataccaatcatagtattatattaaaataatagtatacaaaacaatgtaatccaaca

SEQ ID NO: 12135 - DNA, 543 bp, Cannabis sativa
agtatattcaatactaagttaggatgcacgactactctttatctttaagatttttgtatttagttactttttaacaatgacaataaaatgtaagccatagaggacacaaccgaacctattatcaacagaacaattttaacagtataatctctctgagcagcagtatcaaggaccaaaaatgccgacgaaaataaaatgtcaacttcaattgttttgctagacctgattcaacttcctaactactacagtgcatccattaggcaatataggcataacctaacatgaatggccagtagtactatgcacaaaaaagtatacaaaattctttattatagagagctgaaagaaaacttgctttgtttcttcaagtccttcaaatatcttcaattcccctccttattaaaccacttcggctgttataaaaaagaaaaatgaacaatccttagcataatataaattaaacataatcaaatacatgggaaagatgattgaaaaggtacctcgtgttgtagttcagtccaggtggtagatacactagttcag

SEQ ID NO: 12136 - DNA, 1040 bp, Cannabis sativa
ttgtaaatgaattatgttgatcaacttgtagatgatgagcaatgttatggtcagactccattttcaaactcttattcatgttgacacgtggaaactttttctctaattataatgtatattcattttatataccatttaatataagataaaagtagttattttatattcatctaaaagaacctcattgtgatatataatttaccaattgtgccatacatatatttatattatattcatctaaaagaacctcattgtgatatataatttaccaattgtgtcatacatatatatcctgacttcggctccaagattaacctttccacttttcttattcttcctaagtaaaaaagggagggaaaattttcagcaagagtattcatcaatattcagattttatcttcaaatgcttccatatttatcaagatttcatccattttaaagtaatgactaaccctttctttatttttttagtatttttttttgaactcttacagttttttttttttaatttcattatttgtatatatataaaaaataaaaataaaataaaaaaggaaaatggtaactacaaaatttattaagatttataattatttctctaaattttgtttaaaatgctgatcttgattttcattccatttggtgtatggttttccaaccttagaaatttgagtgtttgccatttctatcttaattaaaaaaataatattaaaaaaatttaatttcatatattcatatcatttgttttttttacaagataaaatgcactcaaaaaaatattataaaatagcattagacataagaaaaataataaaattgtgtacatgagaaaaagaaaaaaaaatatgagggactatcttaattaaaataatgaaaaaaataatattaaaatttctgatttcatatattcatatcatttgtttttttacaagataaaatgcactcaaaaaaatattataaaatagcatcagacataagaaaaataataaaattgtgtacatgagaaaaaaaaaaaaatgagggactatcttaattaaaat

SEQ ID NO: 12137 - DNA, 1552 bp, Cannabis sativa
  modified_base (64)..(73): a, c, t, g, unknown or other
  modified_base (487)..(496): a, c, t, g, unknown or other
tatagtatgaagaaaggcatagtgcttattttttttttcttatttatataataataataataannnnnnnnnntataataataataataagtgtaataatatatttgagtagataataaaaagtagtattgtaataaaatcgaccgttacaactattaatccttattaaaaaactgttacaattattaatggttacaatgtgttaaatagagatagtaaaaaactttgagtatctcattatcttttaaataacaataattatgtaagttaaaaaaacaaagaaaactatttgtattctttgaatgttataaattaatgtaataaattttaaaactatttcatgggtttaaatggtactaattaaaagaaaagaatagactaaatatataattgaatctttaaaataataggagtaaatttagaaaattgagagaagagagattggaaaaaaatgacatagaagttgccacatcaactcccctaaaannnnnnnnnntatatatatatatattgattttaaaaactttgtttttttggaaagaaagaagaattcattcaaactaacaatttaaaatacaaacaaaggtgtggttgaagttaattaggagaataaataggataatgtttatcctgtaagcttttctctctctggagtcttctaggaggtatgcgaaaccgtttcatggctgttggtttggtcccaaacatggtgtttctcttccaccctactcagttaagtggtggttttccttcaactctcctttctttttgtcgttttagttcctattctttcatgattaagagcattaattgctctgtgtgttatctcctgttcacacaatcccatcgtattaattgcaagccacccctttctctctattctctttctatttctttgttttacttaacttctgggggtttatgttgggatctttggcatttattatcacctgagcatatctctagcaatcttttctctcttgaagattggaaaatgggggcggaggtctgggcttatgaagattttaatagcttcaccatcattgcgcctcttcaggtggaggctagggatgtgactaggggcgattcgagaaggcacttacggggcttctggttttatctatatatagtaagactaaggtatggatcatggcacttccctttcatcttcttaattccttggtttgcttgtttgtgttctgtgcgtttctgttttggtttctttttattcatggatgattttcttaataccgtttccaatactttagtctttccatctgatgaaaacactatttttacgtatgatgctagctcttcctcttccactcctgctaccattagccttcttctgaaactccataccattagaccatataataggccctctttgatgaaaaccctctctggtatttggtcatcacagtgtaggttccctgtctctgtcactgagcatgccgatggtctgttccttgtgacttttggttgtgagggggataagggtcgaattttagaaggatagccgtggcattttgctcaaagtatcaccatcttt

SEQ ID NO: 12138 - DNA, 972 bp, Cannabis sativa
taaatcgattgtcatcagtaggcaaccaccatgcctatatattaataagcatacaatataataaaagagaattatgtgtatatataattaaattgagataacacaaatatattttgtgatagatgggtattctttttttaaaaaaaccctatatttccttttagtattagaaataatattaaattttaaaagtaatactattatatcattaattaaaaaataagactaaaaataatcttttaatatcaataactaataactattattttaaagagtaatattatttttgtaatcctttaataaataaaaaattattttgtaatcttttatttaacatcacattcaattaataattaataattcttttttctacaaagtaacttaaattgtgtaattttaaataattactttttaaaataattaaatatttttctaacagcaaataatcaaataatattttaatccctaaaaaatgatttatctataattttttaaaataacaaaaaaataaaaaaaaaaaacttatttttaaaaataacgactaagaatagtcacaataaaaaaaaaatcccatgtattgaggctgcaatgacacatgagaaatgtaattaatttacaacgacacataaactgtgaaacggtaaaaaagaacaaaagttaacaaaaatactatatttctgtaaataaaagagttcacaaaattttgtcaccatatataatgtatattttagaggatacaatttgatagtgttataaatttcgtaaataaaatattaattattatttttaaatagttgtgtttaaatatttttacgagctacacgtggagcacgtgagactccactagtttatataaaagagaggaagaaagtggtctcttcaaaaaaaaaaaaaaaaagaataaagtggttacatgtcactctataatctctttaaagctatttttcgcttctctccttaattctctcattt

SEQ ID NO: 12139 - DNA, 639 bp, Cannabis sativa
tatccacaaaatactcataactctttgtgggaagagaatttagtattatgattgcttgatcttcatcctcgattgtgatccctatatttctagatcgagtatcaccttattgaaatcatcaagatgatcttcaatgctcttccctgctatcatctttaaagaatacaatttctgcttcaaaaataacctcttagctagtgactttgtcatgtacaaactctctggtttcaatcatactccagttgctgaatcttcttttgacacttctctaagaactttatctccaaggctcaatatgagagcactatgagccttttgaagaatgtttgtcttctcttttggagttaatccctctggtagatttctttctacaagaagagcaacttgtagaccctgttgaacaagcaaagccctcatcttggcacgccacaatctaaagtagggcttaacatttagatccgtaaacccgaaaacccggccacccggccacccgccccgacccactgccaaaaaaagttgaaaagttaaaaacccgtatggccgggtcggatctaacccgaaagtgcttcacacgggtgtcgggtttagattttacggtaagaaaaatatagtttcgggtgtaaatccgaaacccaaaaa

SEQ ID NO: 12140 - DNA, 1155 bp, Cannabis sativa
tcattaaccccacttggagacctttctatttgagttagggcaccacaaaacttatttgtagcttgttaaatgatagaccatctatttctaagagagcatgaactgcggtcataagatggagattttttttttctcataatgttcatgaactctgtctcaaaagaaatattttgattgatcaatcccattgattgattccaaactagtattaagccaagatgacactaataagttgtcatcgtttgctctaattttttttttctgggtttagttattttagtactctcttcctctaagttgggtagactatattgagattctaagtcattcaaagatggaagatagtcactataacttttttctccatcttgtaatagtgtagtgaaggaatgaactccacatagttgagaatccatccttcaaaatctgacaagagatattcatacattgctgttaagtttgtttatctttgaaaaccaactaaaattgtctcaaaagttatattagtcctatagatgttgttaccaagtctatagctgacctaaacaactccaatgccctgcacttttttcttttatcatgaaacacttaaaattaaaaataaatatataataaatcaaactcatctcttcaaataaaaaaagcaaattcaatatactaagcaagattctactatcaatgcaggctccaatttctcttctggtaaggttctttcttacaacagtcaaggccaattgaatgttcgcatcaatgaattcatctaaagatacctttacaattttaagaatcggataaaatcatgtctcatgtattcatttttataaatgttattaattagccatataattgtcaatgataagaatcaagcaataaaatttaaaattttggccttaagtcaagtgtgatatgggcttattgcagccttcctaacccagcaaagaacaaactcacaatgacaaaattatgctaacaactagcatttaaagttttctaatagggtacataacaacaagcttgatcatacaaatacttaatgaattaggatttgaccataaatctaagtagagcagagtaccttatatgcagatattatacaaatgtactactataacttgacttatatatatgtattacaattaatatttttatgaaccc

SEQ ID NO: 12141 - DNA, 592 bp, Cannabis sativa
tgcgaggcaacaaaaagtttgaatagacagacgattgcaaggaagccttcaagaacataaagaaacatctattaacacctccaattttggccaaaccaataactggagagagttcactcctttacttggctatctcagagaacgctattagtgtagcattagtgcgagaagagggagggcaccaacaaccagtttactatgttagtaaaaggttattgggggcagaatcaagatatcccccttttgaaaaacttgccctatgcctaatctatgcatctagaaaattaaggtcttacttccaagcacatccaataatggtgttaactgaccaactcgtaaggcaagttttgtcaaaaccggacacttctggaagattgataaaatggcctattgacctggggcagttcgacataacatatcacccaagaacatccatcaagagccaagctttggcagatttcataatagaaaggataattctagataaaaatccacttatccagcgagacacagacacttggaagttgtacgtgggtggagcatttaatgaaaatggcttgggtgcagcggtgatactgatcccgccaaaaaa

SEQ ID NO: 12142 - DNA, 545 bp, Cannabis sativa
acattacttttcttttttaagaaacatttatctttattaataaatgaaatcatctcgaactaacgatcaataagaagatatattttgtgtttggtgatcgtttttgagtatttccagcgatgtaagattatataatcatatcttataatatatttttctttatcatttttatgaaatatatttgtttgttggggaacaagaaaaaaaaaataaattaagtgattttgtcaaattttagtggttaatttttctgtttcttttttaaataatttttaaattatattttaaaatataaaataaataatttccaatatctgaccaagtacatgatttaattttcatttttttttttaaagaaaaagggactaaaatactgaatattttcaaaaaaaaattatagttttatataatttttttctgtttggttttctgcggtcaaatatattaatatttttaaaatgtctacttttatacctaatactttttttttttattattacttctttggtagtaatatatataatgttattaaaatatgctctttt

SEQ ID NO: 12143 - DNA, 634 bp, Cannabis sativa
  modified_base (249)..(256): a, c, t, g, unknown or other
cctttggtacgtgatctcggaagctcgtatatgtttccggatgcacttagactaacgctgacattgagatctcgcgcataggagagttgattaagttagttactgtctaagtcacttaacaatttcaattctattagccaccgactttaggatcttaatcttaaacctataaataccaccaacacttaaatattgagcacgatgaacgtaacacctgcttccggttgagattgagagttaaagagagannnnnnnngagaggtagagagagagaggtactaagaaaagagagagattgggtttagattttgtatgaaattttttttgtagatgaagaaaattcttggaaaagagtgtgagagtgaaatacttcgagaagactcaacagagaatcgatctcgattgtgatgtactcgtttttgctcaatcaataaagatatttttggtggtgttccagaaatagagtagtcacaaatcacatcgatctatcggacttgaaccagcacatatcttagtgttaattttttattttctgcgtttattgtttctggttttccatactctgtttgctcatatttttcatccaattattgttcgtgatatattaatctaatcattgctaattatttgattg

SEQ ID NO: 12144 - DNA, 971 bp, Cannabis sativa
ttttaataaatgggacctttcttaaataaatatgattggcttaagttataacttacaacaagagtaggccaagtttatttatttgtgaattgtgtgtgcaggtataattactcattaattactatatattaactctatctctttccatcactgtctctcttcctccctctatctctcttttctcttttctcttttctatatccagtgatagaaatatatataaaaaaaaaaaagtaaaaatatatagtctactcattctctctctagcactctttttctctctctaggggcagaaaccatttccagttattatatattgataatttttctaaacaaagaattcttaatttattaattaaattcaaatatataaaaaaaaatccttagcatatttcatttctttttctcttaaactccatagtctaagactccaaacaaaaccataaagaattaaggtaattaattagtgctatacaatgtaattgacatcttatatacccgcgattaaagaagacccattactatcctctcgggcggggcatgatcagaatgcggcatggcgtgcgtacggcccaagcaagagaaaagagaggagaaaaacgaagctctaatgataaacaatattttaccaaaaaatgaaaatttatgagaatacagcctagtcgagccaaagtggtaaaagtaaatttaactaatgttaaaaaaatcatgagtccttccaaatcttttcacaaccaatgtatctttgtgtgtatctaaagttgctttcaaatcttcattacttaaattatgtggggaactctctttactttcccattagccctcacatcatttttcaatgtgcatgcaaaacaaaacctcattactttaatgctctcacactgcctaactatttatataaatatatatatatatacacacctagctaatttattcaccacttaatacatttaggtctctaaatatggacc

SEQ ID NO: 12145 - DNA, 657 bp, Cannabis sativa
attagtctaatacttaatatcattaatctttatatattaacacataaaatttgttacactatatgaaaatagtgtaaggcctattagcaatttattaataattgtaagtggtaaaattaaaaatctagaaatatgtaattctcaaatcattaataaatataaaatgaaaaaatacaactttagttcaataaggagattaacactctctcacacaatgcatttggaaatttcctctattatcatcaaatataaaaatattgagtcatatataataatataggctactctactcatcattaattattttcaccaattgattttgagatagaaacacataattctcataattaatcatatccctagcaaaccttcaatccatacctattaaatatttaggcagccgcaagcgagtaaacgacactcccaatcgcgaacaataataagtgagtaaaatggcaccttgatgataaggtaattcaagatggtaattagcaaaaaatagtcatcatgggaatattagataacattatctcacacatggatcaaatgtaaaaatattgagccatatataagaacataaattattccattcattactaattaattttatcaattaattttaagatggaaactcagacatgttctatcttgaaaagt

SEQ ID NO: 12146 - DNA, 502 bp, Cannabis sativa
ttcaaaattttgcagaatgtcctataattataacatcacgatcatgaaaaaaaatatattaaaaaattctctcgaatgtcaaaacaaataggatgcatcggtgtatttcttttaagaaatgcattgtagaatttttttatattttacggtgttcaacacaacatatgtaccattatgaaatttaagaaaattcttcaatgccccctttaggacatcgatacatccctatttatttgacatttgagtattttcatcatcttcaaaaaggaaatgaatatataagggattgtttgtaatttttaaaaaataattataattaaatgtcaacttaacaatattaattttttaaaaaaattaatctaacaataaataaaaaatttaaatttttgtacttaattttattatttaattaaaaaaaattattttttatattatattaaaaatatatttgtattcagtattacgtttatctatctctttaacttaatttttttttttttat

SEQ ID NO: 12147 - DNA, 668 bp, Cannabis sativa
tataatttgtcaaatgtcttttttctattaaaaccaaagtccttcattcagagagagaattataaaggattggtagctgaattgccaaactcgcacaagggtaattaactctaatttatataacactagttttattaattaaaacataattgatttaaatatggggacttattggtttggatagcttaattaatatctatttatttattttttgaatgtaaattggaattttattaatttgctaaatctgccaaaaacaagactgtaattcagtagaaacatccctttcactgaaaatttgatgtggaaaagaatatgacactctagcaaagctgtgtgcagtcatattagcagattgtttaataaaaaataaagaaacattatttaaaatagatagaagtattcgacaattcatggtgatgttacttcgaatatatatttatttttaagtaatatctaataaagtaatgatgcattgtatttttaatttgagtattgttattggatattagtgctgccctgtaacatacaattagttactgatattatcttaaaaaaaattattgaattgatacttaattatcctttaatttgcgtacttaaaataattttaatatataatttgaagtgtgatcataataatggtagaaatataaatatttatttag

SEQ ID NO: 12148 - DNA, 529 bp, Cannabis sativa
tatatatatattacatgtgctttggacttaatcctatataaatatatcgtatatataaataatattttatttaatccatagttgtttgtaaagaattccaatataaatttatttaagatacattcaacatctcagtttttttttttctcttcaaagggacaagctaaaaacatatatatatatatatcactaaatatataaaactatataatataatattagaatttaaataattaaaccaataagataagttgccatgtttggagcaaaaatgacttgcacgctacttgcttattatgagtttttatttatataaattaatagacagttagtagttagcactaatgattaataatatattaagaaataattatttattagtttagttttgtttcttcattttgtctcatccaaacaaatgcaagccactacatacaaatatttatatattttaatgggtttctaattgtaattaatattgagaaagtctactcaaacacccctccttagttggtgcaaatatatattt

SEQ ID NO: 12149 - DNA, 549 bp, Cannabis sativa
taggagtctagtcatcgcatagcaaggcaggtatgaagttatcgctcttttgagactcatccccgaaagccccctctccatagtcgtatctcttgctgtctgataggtcactcatctaaaagatagaagatttttttagcgtggtgcgagtgcaatttgactagaaaatgttcttacctaaattataaattaaagttcaaagtaagagttcgtaaaactaatcacatgtctcaagaaatggttgggtgtgtcacattatctcaaggggcatgtgattgcatgaacattaagttactgttacactcccacccttttgagaacttagatagttttcacaatcaataagaatgcacataacctaaagctagatataacctaaaagttaaactctaaaataaggtcaaaaaagttgctctggttgaagtaaaagtgtgagtatgcaaaaggatattagcatgaagatgtgagtattcaagaagttcttcctaaaaatcgcaagtattcaagattgaggcacttattttctagaaaaataccatattttgccta

SEQ ID NO: 12150 - DNA, 543 bp, Cannabis sativa
atatatatatatatgatgaagatacacaaaaaaatagctctctctagcaactaccaccacagctgccacaacttgtagtagttgtgtactaatgcagcaatcctttctctatacatatattaattaatccattttcattttcatatatttattaattcttatctcatcacatcacataattattatataactaactactttgcctacttatacatatatatatataactagaccctcaatcaatacacactaccacttttctccatctcatctcatctcatctctttaaatataattataaagaaaaaaacaaaaattattagagaatatggtagtagttgctattgttagaaatgttatagcattattactagtagcagaactgtgttttagttcttataataaattagtattagcaagtaataataataataataatgaaagagaattggatggcatctggggtggtcttcctggtcaacccaaagtggaattttctcagttttctgggtatgttacagtcaaccaaaaaaatggtagagc

SEQ ID NO: 12151 - DNA, 902 bp, Cannabis sativa
acccgaagcacgacaatagaaatcaaaagatcttttaattgtatcaatggatcttttattagcacgactcaaaaccaggctatcatcgacaaagaataaatgtgagactgatggcgcaccccgtgcaactctcaaacctttaagatgaccacgattctcctcatattgaaaaagtctagaaagaccctctgcacaaatgatgaaaaggtaaggcgagagtggatctccttgacgaatacaacgacttggaacaacctgaccttgaattgaaccatttatcagaaaagaaaacgtgacactgttcaagcatcgctgtataagctcaacaaccgaaggagcaaatcctaaggcaatcatcatgctgcgaagaaaatgtcactccactctgtcaaaggctttactcatgtctagcttcatggtgccaaggagtgttcaaaaatatttactaaccatcaactaaatcgaataagctgacaaaaaatgtaatccaaaataacttaatataactccaaacagcctcatgaatatatttggtggattaaaaaatagtctaaatcatccaattaacctgaataaaccaaattatatattttttgaagaaaaaaaattgtatataatgtactacataaattacgtttattggttaaattattttaaatttaaaattttgactttaaagtatttaacttgaaatgtaaacaatgctgatagtttcctctaattttaaaaaaaaaaaaattattaagaatgcaatggaattcaatggcaaaccacaactagttttaagtatattttataaaattaatggtatagtttgagtcgcaattattaattcaaacttttaaatcacatcgtatgattgagcagaaatacaaaccacaactacactggaaagaatatca

SEQ ID NO: 12152 - DNA, 558 bp, Cannabis sativa
cctcttttcatagtaaaataattacaagtatgtctatattatacctctaaaaagtctattttttttttaaaatcacgtatgttgcaactatataagataacttgttaattttttaaaaatttcgaataatttatagtgcttaaaataagttttaaatattttgttgcacgtatgactattttttcttatacgcgtggtaaaaaattatttgaacttttatttttggcactgtaaatttacacataatcctaaatagctacaacttatgtgatcataaaaaaaatagactaaaaaactctctactgacatagatagaagtctattaaaataatcttttaagtgtgtatattaatatagaaattttcaataattatgtatccatttctattgctattatcttgcatattgtgtattgataacgtgttaataacataattagagctataatctttattattattattattattattattattattatttgaattacatcatcaatttataatatatattttaacttttaagagtgtggagattgaaagttaaatttatttt

SEQ ID NO: 12153 - DNA, 672 bp, Cannabis sativa
catcatgatgcttaacaactttatatggtagcgtcctataaatgattagcggttttctgtaatcattaccaaagtgaaataagttggactcgatattgaattgcacccataaggatgcttggcatcatgagtgtcctttaacatttctcgttatcatattaattttcagtcttacaaaacaaaaccccttaatattgatttcccattttacagaaaagaagaaagaattttacaaaaatttgagggaagagatgaagcttgcagacaaagaagacaagctcctcgaacgccagcgtctccaagaaaagagaactaaggagaagatgaaaagaaaaggtagactagaagatgaagaagaagatgatggcgaggacgactctgatgaagaagaatctaggaagaagaagggcgctaaaagatcgaagaagtacttcgatagcgagagtgatgacggagaagacaatgggggtaaagctagtatcaacactgacgcaatatcgttacaggagcaagaagctttggctctcaaattgctaagctcgatgaacaaaatttaagagggaaacaaacatggatcgatcgggtattgaaatctaatctaaacctgcctagtccaaccaattttgtctaaatatttaatttactgtttgagctttacaagttgaattttgt

SEQ ID NO: 12154 - DNA, 675 bp, Cannabis sativa
cgaaaatttggtaactaattaatagtgattgttaaccaacttttattagcctaacagtttttattagttagttaataggttgttatcttttgtatagtcagcattatcttttcattactcacgtgctatagacttggtctatatatagtctacttgtttccttgtttaaagaattgcttttagcaccattttctcttcttgtattttctctggttctgtaaaaggcttttaaccattcctctgtttttaatataaggcttctagccatttttcttcttcatcagaatttttacattcttcagtgattaggtagtctaatataatacatattggcggttggttggaggtaatatgaaatggaatggaaatgaaacaattttcatttcatttatttgtttggttaaatattaaagtattggaacatcatttcaatagaatggtctttttactattttggtagaatgactatttcattttaaaatagaaggaaagactattctaatacaattttaaattttattctattctatttttattctattcttattccattctaatacattttaaattttattctaaacccttttctattaatacaaatataaaaatgtcacatagttaaactcaagatgttattttttaaacaaaaatttttttgtctaataattatttttt

SEQ ID NO: 12155 - DNA, 511 bp, Cannabis sativa
gttctctactgaaatgcaggccagttcagttgttatggggtagaaaaatcctacacttaaggcctgaatgtaatcaagttaagtgttattatatgcttgaagcagcctttacaaaccaaaaggtgctacacagcctatagatagcttggaaattttaatcacatctactttatagatgatcaggggcgacaaaacaaaagaatgattagcctaatgaaaactatttttaatcaacttcaccacttctcttaatggaaaccagactcttaacatataaacattcaaaaaaaagcagccatgtttctaactaaaaacataaaaaaaagtggaaaatattaaacataaaaaagcagccagactctaaatggaaagttgcaagacacaaaatgtgtaaaaacaaaacaagtcagatctatttgttaaattaatcatctagactagtgtaaaatatatggttaaatttcacttcaaaaggggaaaatattaaattagaaacttaactagtatgaat

SEQ ID NO: 12156 - DNA, 650 bp, Cannabis sativa
tgcatagggtacatccttcattttctcttcctctttagcactgtttggacaatgttccttcaataagacaaattttcctcccaatagaatggatgtactctttgcatcttccatgttgaacttctaaataactttcttgatgtacccggactgctttaagcttatcatcccttccttcttgtttctagaaacttcaccaagctccttcatctcaaactctctcttaagcttggctttgatacttttgatcatcgattggtcttttctcgttatgaacatatcgtccacataaagcaataataacacaactataaattgctttagattcttgaaatataaatagtgatcataagctaatcatttgaacccgatttgttgcatataagtattaaatcttttgttccattactttgagactgttttaaaccgtataaggacctgttgagcttgaaaactaactcaactccttttctttccacttaaaacccaggtggttgcctcatgtagatctcttcatccaagaatctattcaaaaaagcagttttaacataaagttgttcaacttcaaactccatttgagctaccaaggacatcatcaatcttatcatttgtactttaccacaggttagaagatttcattgtagtatatt

SEQ ID NO: 12157 - DNA, 557 bp, Cannabis sativa
tatatatagatttagtgtatgtttcggttacacatattaatattattttgctcatattcattcttgttagcattcatattggctacaatttgtgtctgtcactttttataggtgacgttttatgattgattaataatattcttaaaaatattacatttttaagttatataaaattcgatatttaattatactaataatagtgtaaggctatatttcttttagttattctctttggagaaagaaaatttgaataaggtcataattaattcatatgataaggttattttaagagaaatactaaagggtagcactctcctatgtgtcaatattgctattagtttaactaagtatcgggtcttatataatttaatataatagtttttagtgagtatcgctagccaatcgtaatgcgacatgtcgagatagtactaggcaccactagtgccttattgcaatgctcttattttaattaccccaagtacaagaatgtaattaaataattaaaaaggttgaaagaaacacatacatcatacataatacatacatgtacagataac

SEQ ID NO: 12158 - DNA, 568 bp, Cannabis sativa
ttatttattgctagtacggtcataaatattccacgctctagtagttctttattgccgagccgttgagtcgagccaatttataatctctaactctaactactgcttcgatgacatatggaccctctcaattggggttgaacactcctgcaaatgcatctctcgtatttgcaaatactcgtcttaacaccaaatctccaacattgaatagtcttttcttgacttttttgttgaaatatcttgtagctcgatgttatatgttacgttggtgattaacgactcagtttgtttttcctcaagtagatccaaggacaatttcaaaagttcttggttttcttcttgattataaaactctattctgtgtgttgatatgttcacttcaacaggcatcattacttccgagtcaaatgctaacaagaaaggaatgtgtcatgtcaaacttcttcttggtagtatcctttaaggtcttactaacagctacttgtctatttgcctgaggcctggatactgacaagaagctttagatgactttgttcctctcacatattttagtgaacaagtcggcgtcaaa

SEQ ID NO: 12159 - DNA, 508 bp, Cannabis sativa
ctgcctatccctactgtcaaacaagtcattcaaaatatccacatcccaatcgttgccttgatcatagaagagattgcataccttagaggtagctaatgcaggatgtgtcgaagtaacaaaggggaaatctgggtcaggaagccaaggttctttaagaatgttgattaaagaaccattcccaatgcaccatctaacaccagaccgcactaaactttgagcttcccaaacacttcgccaaacataacttgggttagaaccaagtgaagccgaaaggtagctaccattaggaaaataacgagctttgaaaactcgcgaagcaagagaatcagatcttgtcaagaaacgccagccttgttttcctaaaagggccaaattgaaatccctgagattacgaaatcccatacctccattgtccttgggaaggcacattctgtcccaggacatccacggaatacctttgtcgccattctttgagcctttccatcaaaaaccagccattgagctctca

SEQ ID NO: 12160 - DNA, 592 bp, Cannabis sativa
caccaatcctttcctcttttgacaaaatttcattgaaattgcctagtacccatggctcacctgtattacatctttgcagctcttcccacaaaacagacctcccacttgcattgttaaaaccataaacaaaggacacaaagaaactagctcctttatctatcattgtaacaaacaaatgaactagctgactagagcagctaataatgttgactgtgaacttgtgaggattccaagctactataattcgacctcccttatgccacgcattattcgccttaaaacaccatccttgaaacatgtttaagtataaggctcccaacttggaagccttaactcttgtctcgagcaaaccaactagcccaattttttgatgagcaataaattgcttaaccaaaatttgtttattaaggctattgatcccccagacattccaactaagaattctatccattaaggataggaggatctccccctcctcgtgtactattccgtttgtcttctacttgttttgcccatgaaacttgatctttgacaccctctggctctaccaatacacaaaaggaattagaggtagatgcccctgcaccttcag

SEQ ID NO: 12161 - DNA, 762 bp, Cannabis sativa
tttcacctttgtagcttaagtcatgaatctactgatgctagctctaaagggttctcctggaatttgcttcacttctaccaggtcttccaagtgagatggtagttgtcaagataaggagaactgtgcatgaaattttgacatgaaagagttccacaaattacacttccccgtagctaatttgaagtaccactgctaggcggccttggctaaagtagttaggaagattttgcaccgtagattacctctcaccgcttgtaagttatttgcattttaaagtatttaatgtgagacaacgaatcttctttgcctgtatacattttccatgttggcaatttgaacttaggaagtaggtcgagagcattgatttatggtgagaatagaaatcctctagtctggtcaagttccaaatctatgagttttgggccaatcaggccttgacgaggctcttaagatgatctaatggatcaacttgacctgcctgttggctgatctgtgttacatgaggatctctttgaactgggcttggtacatagttatttgtatttactgtacggtaggaggaatatcatgtctgtccaatcctctccggcaattcaagtcatttttgaggtcatgcatggtacctaatcggtcaaatactgatgtgtcgagaggcctttgtgtttaactattttgagcaaagggttggcctgatatctctgtttgagtatgattattaaactgatcattccctccccaaggacgagttggtaaaattttccc

SEQ ID NO: 12162 - DNA, 513 bp, Cannabis sativa
aatttagggatgttcttgataccatatgttataaacactgtaaatattaatttagccctaattaattcatgagaattaaacaatagaattatagattagcagaagcgtagtagagtccattgaatcgcttgaaaagggtatgatcttctaattttgcattgaaatctttttctgtaacctttgtctcttgatgatggggtttcaagaaaatgaaaagatacgatactgcaaattgtggatcattaccgtttatattactaactgacagaactgttagtaatatttattgactatttttatttgacccctcatcaaattagatattatctttatggtatccacatattaaaatcatgacaattatgccttaagtcataaattttatttcaaaatagattatataaatttgacttatttatttgatcacccaaacacacattttatatatacaattgtgaccctaataaattcctaaagatagtcaagtaatatgatacacaatggtaatacaga

SEQ ID NO: 12163 - DNA, 612 bp, Cannabis sativa
cataattaggtgtgctaataaatccgagtgaaaatgctgctcaacaattctaaggtcttaagtcacaatcatgcaaaataggtaagggactcgctaactgactttttggttcttaaaattaaaacaagaagttttcctattaataaatagcatggaaataccctaaatattgagaaaatacgaaaaattaaggtagccaaaaataccctatctgggtaaccggttccccaaacggttcaccgttttctgggattttgcctggggaaacggttcacagtttctacaaaaacggtggactgtattgtagcaaaaaaaaccaaaactagatttttctaactcaaatctactccaaatcacatcaatttttttaaaacacatatatagaacataatgaacataattcaaccaaaaactgcatcatcaaaacttttgaataaaaaaataccattgttaagcaagttttgagttcttaaactcaaactttcttaactcacacaacaaatgttacaaactaacaaaaacaacacaaatcaaccataaataactccccaaaaacaattctaaatctctcatattcattgagaagtgaacctagaattttacacctcaaaa

SEQ ID NO: 12164 - DNA, 900 bp, Cannabis sativa
ccatttcacaagcaagaagaaacatatagaagtgttttactttaaaccgttcttgtctatcatcctccagcaaaaaatgacggatcaataaaatttttcagtttgagaagctttttaaaataccaactgtaattattttttggactaagattccaaaaatcttggtcctttagagcatctccaatggttaaattttagagaatatttactgagatggacaaattagttaataaaatatgagggtgctataccattggaaagaaatggatgtcattttaagaattcgtattgatgccatacaatgacattggtgctatattttttaataaaaaattaaagtaaataaagatataatttataattaaaacaaataatatatttataatagtattcttgaagggtgttgttatttttagaagtaagagtgtcaaaaaatgatgtagaagagagataaaataaaatattatatttttagatgatgtggaggttttagcaccattaaagaatgctaccattggagttggagatgctcttaagtagacagatttagtccatctcacccaaagacagtcttgctttgctgagataacccaaatgtacttcgccataagagctatattctactttttttccttctctaaaaccaatacctccaaactttttgggtaagcaaacatgctcctaagaagtaagatgaagcttactacgattacctttagcacccaaaagataatctctacagagtttttcaatctcagtagttacattttcaagaaggagaaaaatgctcatctagtaatttctaatttccagtaacactaaaatggataagttgagctattcaagcaaacgagagattcctgttagcccaattatggagcttcttttgaatcttatcaa

SEQ ID NO: 12165 - DNA, 943 bp, Cannabis sativa
  modified_base (387)..(390): a, c, t, g, unknown or other
  modified_base (621)..(626): a, c, t, g, unknown or other
  modified_base (674)..(674): a, c, t, g, unknown or other
atgccacgtaatgaattttcacattcataaagttcagctatatcccttaaatttttctgccatataataacaagtgagctcaagaatatccatgttacttaaaatttaacatcagttgttttaagttcaagcaacttggtaacagagcatgttaacaagagtggcaaaggttattatttttagggtaaatattattctggatcctgtaaaagtttctaattaaattctctgttttgttaaatgataaaataaactatgtattttctaaaattgtacaaataggattctgaactaattttttgtcaaaataaaacttaataacaatctgatctaaaaatgttataacaaaactagttacatttttgtatctgttcgtgttaaaaattnnnntaaagttggttatattaaaaataaaattgttaaaaattgagctcagagtgctatttttatcattttaaaaaatatagggtctattttattatttaaaaaaataaatgatcaaattaaaaacttttgcaaaacacagaattcaaaatagtttttattcttatttttattatttaaaggctaattaggatttttgtctcctaaactttaacatgtactaaattatgccccctnnnnnnttttgaccgttaaaaattcccccagaactattgagattgttagatttnaggacttttatctaatttcatttagttttactaattcagtgattgtttatgtactaaaccatacttcccagattttgatatctaccaaatcatgtccctcgaacttttacatgtactaaattatgcctcttgaacttttatctatgtttaaaccttttttactaaaattggacaaaaatccttaaatctgacaatctcattagttcaggaagcattttctacttttgtttaaaaaaatattgaatttcacgtttttttttttttttttt

SEQ ID NO: 12166 - DNA, 511 bp, Cannabis sativa
gtttatattgagacttttattgattgatttattaattaatttatgaaagaataattcgagaaaaaaatctatgaatataccactacaagaaaagacatcatgataataaatatgacccccacaactcatcaatcgtcgacattcttcgcctcattattattcttaatggtgaagatgttatggactctgaaccaatattaggtttacaccaagaaatggaaaaacattgaggaaacccaaacaattatacaatatctctcccaggtaacttgttgggatttttagctactatgtttactgaagtgatagtcataaatggatgagagttgttgggaaatatctacgtacctataagaactagctatattagaacaattatgttggagtttgcaagtagggattataataccaagataacccaatccaatctaatacttaccaagcagtcttaggttaaagctgaaaaagtttatttcgtttgtggcagacaacttgagacaagcttaactga

SEQ ID NO: 12167 - DNA, 946 bp, Cannabis sativa
atccaaatgacaagtagggtatcgaggaaggcctccaccaaaactgcttggagaggtccccaccagattcatcatctacaagatcactcttataaagcaacctactatggtgatgaatcgaaaacctaaaacacaacaacagcaaaaaacccagacttcctctttcacaaataaaagaaaatatatacataaagcagcaaagggggattatttctgaaactagtgtaaacccaaaaatgctcgacctaaacatctagacccaaaatattccagataaaaaatattcttttcaacccaagctaaagggaaagtacctcagtagagccctaactccagaggtattacgccaaagctcatgcagacaaatctcgcacataacaaccctaattttcaagcttaaatcctacgcatgcaagataatgaatttctgcgagctcgagactacatttcacaatcaaatcaggaaccgacagtttgagtggaagaaatacttacttgtagatggattaaaaggaaaaaagctagtaatacttacttgtagacggattaaaaggaaaaaatgctagttgacttgtcgtcgtatgaaattccacgggtcgcttgatgatctaatgatgccttactctaacagtggatgtgttgtttaggtaggtgttgaacgttgagaaatatagcggtgagatagagaagaggagattaggttttttggtttagaaaggtgagtaggggctaaggtttctgggttgaaggttttgtttgaagaaattctctaggaaagggattgtagcttaaggtgaagaaggaaaagtgaattccatcgccaagacttttatttatatgggtggcaacggttcaagcatttttaaaatatatggtccagatggaatcaattaaaagttacaccatcaaacgattgaggattcgaaaggtttgcatttaatgcacc

SEQ ID NO: 12168 - DNA, 744 bp, Cannabis sativa
  modified_base (221)..(231): a, c, t, g, unknown or other
aggcttgggaggcaaacccagcaaaattttgataagtactgtctcaacgagaatcgataactcggcggtttctgtttcgaagagaagcacgataagtatgtgccagtgtatactatttaccaagcttaatgaaactctagagaatatatacctcgcacatgagcaaaaggttgcattcagcaagctcgagcccatgaggcatgcgaggaacaaaagagatnnnnnnnnnnnttgtaaattccataaggatattgggcacacaaccgacgaatgtcgctagttaaaggatgagatagaaagtctcatcgctcgaggccactttaaacagtacgtgaagagacagggccatggacacaaccagcccaatctgcccaataacccaaacaaccaggggttacaacctcttcttgctgaaggagaggacatcctggttatttcgagagggccacatatcgcaggggagagcaataacacccaaaagagatatgtgaaagagataaagaacgagcagtcggcattcaccccagaaccttccaagaaggtgaaaattgaggaacctccaatcatattcacggaggaagacgagaaaaatgtgagatatcctcacgtcgatccattggtgattaccattcaactcaccaataaaaggataaagagggtgttaatagacaacgaaagctcagtaaatatcctttataaggaaacactgaggaagataacgctcgaaaaatccaaattgaggcc

SEQ ID NO: 12169 - DNA, 654 bp, Cannabis sativa
tgaatctctttattacaatgattaaaggcagtacaagaaaattgagatgaacacatctcggactgggcaagaagacattcagcagagtcttttgatgaacaagaagtatcaccaagagagtagagaccatttttacatttccctttgagaagcacaccccccgtttgcttgtccttcacaaagcaacagtgtttatgaaattcaaggaaaacatcattgtcatcagttaatttggaaatactaactaaattttttgtgatttggggaacatgaagaatggactttaaagctaaggaagaattgggtaagaaggttgaacctgtgtgggaaatgattaatttcttaccatctccaacagctaagccctcagtgccattataaggagtggattgatcaagttgagtgccatctgatgtgacatgatgagtagcccctgtatccgcaaaccattgacagtcatctccaaaatcttgcaccattgtagagctgtaggccataggatcatattccagttcttgttctgtgagataggccctcggattggtggttgctggtttaggaacttgccaatttttatcaaacctgtagtggcaaacaggtgcagtgtgaccactctttaaacacacttgacagattactctgttaggaggaaat

SEQ ID NO: 12170 - DNA, 627 bp, Cannabis sativa
tttccaagacctcgacagaggataccatcctcggaaggccacccatgggatatgacattaaataattattgcttgatgactaaagtaaatgtatcatgccggatgaacgatgtcatccaaccaacatcaacaattcaggcctctccatccagggtaaacgcaaggatcagattaacaaagttactctcctctttttcgtataaatcaaatccctattttggtaaaatttctacacgtaaatgatgtaattcaggaaagtaagtagttttcctttttattctttaattcttttgagaaaccttattgatgtaattattctctataaatagtggaatcatttcactatttagggattcgaatgcattcattcaatagtgcacttacgttgttgaattctctgtaaacactatcgagagagatcaagttttccttgcttctcatcttacaagcttgtcaataaaagtataagggaagtaagctattaccataatcaagggacagaatctctataacatttttgtgttcttattttgctctatattattcgtattctatttgaatttagttatcctcaatcactttaaagactcagtgttgttagccaaaagcgaggtcaacaacatcctt

SEQ ID NO: 12171 - DNA, 545 bp, Cannabis sativa
atatatatctataagagtcgatttcaattttttcagttggtttattatccaaaaaaaaaaaactcactgttcaatggcggttttaaccgttagcagttttttcggttttcggtttcgtcagtttcggttccaacggtgttcggtaagttggtttgaacggttttttcagttttctggattttatgctcacccctatcaatgaatctcttttaagggatgcattgtagaatttctaaaaaaaaaaattcttccaaaattatggtcttgactcatgaatctctttccaaacaataaaataaaataaaatcattcaaaaggctgctgttcaaatttgtcatattagttctaaactgatatttttcattagatcattctatttagaaagaaaaatgagagagagatcattgtatgtttatgtttttttttttttttttgaatactttataggatagagtatctctatattcaacagtaacaccattgtttcatatcccaccataacaatcttttacactactcattaaaatgtagggtagggtatatat

SEQ ID NO: 12172 - DNA, 555 bp, Cannabis sativa
tctttcaagttgtatacttataatatattaatttatgtctgaaatacaaatatatatatatatatatatattctataatatttttactgcattctcaaaacgcagtatccctcacttgttttgagcaaggtcggccctgagggtaggcaggttaggtgtgcgcctcatgcccccgaatgctcagggccccgaaattgtgaaaaaaaaatattaatatataaataaaatattaaatatgaagaaaatataataaaaattatttggtgtagtggtaaaagtcataatttaaactaagaggtcatatgggatcaatttccaaatcttactttttaatttttttaaataaatatttaatgtgtagttatgagggattcaaccttgaatctcttaagtttttttaaaaactttaccattacactaagcactaaatatattaattttattatagttaaactatatataagggccccaaaatttaattttgtcttaggccccatataccttaggaccggccctagttttgagcaagcgatttgttataatttgaacttctta

SEQ ID NO: 12173 - DNA, 541 bp, Cannabis sativa
aaggcgactaaaaaatgtggcgaattctgcgatccaacggtacctgggatcccaaagatatcttcgcatggagattgctcatctgaatctggatgtgaatgtgtgttgactcccattcgaatctggccaccagtgggagtttgtagagctcatgagtaattatatgtaaatcatgtatgtatatatgtatatatcgattgacacctaaatatatatctatatatatcgatataataatgtcaatcgatggtactataagtagtaatgaataagaatgttaaacatatgcatgtatgcatgtgtgtgtggcttttggttttttctctcttatgtacttgttcttaaaccaagctaccttttatgtatgcttttttcataaatggaaattataattactacgtaactattatataggtggtgtttggtaacaattttttaatcagttttttctttttaattggaaaagtgaaaatatttttccaaaacgcgttctataaaactgttttcactttcgaattttttaattagaaatcaatatttt

SEQ ID NO: 12174 - DNA, 522 bp, Cannabis sativa
tcattccagggattgttcacgatttcccagtcaattcgctcctgaatattattgggagaggccacattgttgttccaagttaacgggggccccttaggattaagaggggttagggtaaaagaatctaaaagatgtcgaaagtcagaagaaggtccccgatcagggtttcctccttgtttgtcttcagaaaaaaggaaagcattgaaatctccaatgataagctaggggtctctgggattgtctctcccgatcctatttagaattttccaagtttgtggtctaagggactcagtcaaagagtcgtagaaacaagtgagatggtaaaaaatattatttgcagaaccagaaacataacaatcaaagtgacttatagattgcgagagcagagtgactattacatcattggtccataacaaaatgaggcccccacttctaccaatcctagggacctccaaaccggagttaaagtgaagcttaagtctaagcttatcaacagcgtttttagctagcctagattccata

SEQ ID NO: 12175 - DNA, 932 bp, Cannabis sativa
attcttatatttaagtattgagttttgcataacttttcacttttagtaaatactgctaactaattatatggcatcacttaggccgatcccaagttaaaaatttaggcattttagaaaatagaatagaaaaattattgagagtgctctaaaagtatcacataataaaaagtgatctaaatttatatgacaatataaatgtaaaatttgcatcacaataaatagtatgcttttatatttataattagagaattattaaaagacactactggtactcaggttcgaccctgggcttaggcaggctaggcctatgcctagggcccacctaacccaggagctcaaattttttttttctccttttaaaattatatatattttaaatgactttgaaaaatactatatattttctaacataagggcccaaaaataaattttttcactgtggcccactttgtttcagggctggtcctgctggtacctaacaccttcgtcggtgttataccgttattggtgtaattaagtatcaagtttcacataacttaagaaaataatttttagacaatattactaattaatcataaagctccacctataaaaaatattaagcaccactagtctccaataacaatactcttataattatgtcattttaatattttattatttaattttaattaacatgttcttttacatctcaacttttagagatggtttaaggttccaaattttaagtaataccatgtatggttgatgttaaaatcttgtcttatgtttgtaagttgaaattttacgtagaaataaaattccaattttcttcttcttttttttacaaaaaggccaaaaataacatagaaaatgatatctcaacactgtggttttctatacacaaaagaagaaaaaataatcaccataacttgtagttatggttttcaagt

SEQ ID NO: 12176 - DNA, 757 bp, Cannabis sativa
aaacgccgaaaggccggaccacttctgttcgagaaatgttgtttgacccagaagatgaagggtccatcaagatctatctgataccctcatagggtgattcggatatggaaaattgaagagacatccagaagcccctggatatcatcctatctagtgtcctccaaacacaaacccccaccatgttaggggtttgtctcctacgtcaaacacagggagtgtgtgcaccaccaaaagaaagtcacttttttgtccaataccatattctctcacattctcatactaacacagtagctcatgacacgtggtgtaatgccctaatctataggtacaccacgtgagtgattttataaactagtttagtactaatagattaattaatcattaaaatctatgataatattaaaaacttcacaaaaataaaatcctagtaatggacattataacgacactaaaactttgttctatggatccctattatcaaagttttacaaaaggactctatacaataacaaatcaaaatacgaaatcaaaatacacaacagatacaacccaaaaataactaaagataactcggcaaacaggccggtaaggtcaacatgtacattgctggagaagatcgtcatctcatggctgctctaacttttccttgccattacctgtaccacagaatacccgtgagtcacaaggactcaacaaaaaaagtaataaaggagtatacatgtgataactagtgatccatttcactaatataatttaa

SEQ ID NO: 12177 - DNA, 719 bp, Cannabis sativa
tcaatccaaaaacaatttatagcaacacaaacatataattgtaattgaggcttaaagaacatgttcaaatcaatatttattgtactaaacttgatgaatacatgttctgaagtatttctccaatatgcataataaaaatataaaataagtattatattgttgatttatttatttatttatatttgtgaagttacaattcttttgggtaattattaattgtgtgaaaaggaaagtcttggtggccaagttttgaaaagtttttttagaggaaactttggactgtcttggtccccagttgtcttagtgcccaagttttgtactttataaatatatattttgtgtgtaagagaaaggtatgtgtgtagagaaaaatagtgagttgtgaaatgagaagtgggtgtgagtttgttgtgtggtgagagtgaggaagaagcaaatagtgtattgggatttgggtttaggtagagagtatatgtaattttgaagttataagtgaaatatatatctctttgtgggtggatttggtagttttatcaatcaatccgagttaaaattctttgcttcttttatttgttatttcgatgtgcttgaagtttattatttttcccagcaagtggtatcagagccaaagttcacaatcaacacaaaaaatatcaataaatagtgtctttcacaaaatttgagatcgagctataggatgggaagaacaatttgagttt

SEQ ID NO: 12178 - DNA, 694 bp, Cannabis sativa
agttaaaaaatgagaaaataaagtgacatgttactcttctattatgtacatatattatgtaagtagattaattatatatacacacatgcagttttcaaaccatataatatgacagctctaatcaactcttaagtataaatatatagacatcgatctacttaatcagttttcacatagggaagagtgatgtatatattgatcagttacatgcatatgatgcatcttcaagaaaactttcatatttttaattaatctataattaatataaatttctatgagtaattttattcaatgtcaaataattttggaggatcacaggacagtaagttcataaccatgtgataacagaatataaataaaatttggaaaaagggaacgaagaaatttctgaaacctacaagtaaagaaagacctgttgttacctaaccactcctcaaaaccctaaaacccattcccgtaaaaaaaccaactgagacaaaagtcgaaagatcttaccaatgcgaacaggaacaggacagctgagagagaggaaaggagaggaggtagctccggtgaaccagtgaccaagagagaggaaaggcgaggaggtagctccggtgaaccagtgacaagagagagagagagagagagagagagagaaaaggcgaggaggtgagccaaccacgctggcttcaatgggtttcagtttcagctt

SEQ ID NO: 12179 - DNA, 676 bp, Cannabis sativa
gaacagaccaaatcttccaactaatacatgctgcttcctgaaccacggcagccgagtgatgctcaataagagcattgaaccatctgttgaagtctccattattcgcaccagttggagcattggaaacacaccagcagctccgtgcaaatcggcattccagcaagatgtggctgatagtttccacgtccagattacaaaaagggcaatacaaatcgacattaaccttttttgtactgagctgaacctttgtaggaaggaaaccgactaacacacgccacaagaagtgctgcatttcggaggaacttccaacttccatatagccttgaacattttttggtcttgatcagcaacatgcacaccagaaacttgctgtagccttcggtatgcacttttgaccgtgtataagccattgggttcatcattccaacaccacttatcagctgtagcagagccactcaattgaatagacaacacaagattcttatccctttcatcaaagagatcattgataacctcatagtcccagctcttagaatgcaccgaaaataaactagaaacattttgattcactaaacccggatgatcagattgaacaaaaggattagaagggtcgggaagccatggatccaacaaaatacttacattatccccattgccaatagactttctagaaccc

SEQ ID NO: 12180 - DNA, 649 bp, Cannabis sativa
caacaatttataatttttgtgattaatatgtttagcgacagatcttttagtcagatatttgaatgatgatatttatattaattagtcgcaattttttaatttttagtcacaaattttattacgactaaaggtaaaaaaatttatagtgcggaactattaacttttataggtgtaaaaacattttctttctaaacaatgaaaattgtattgtataagcgtggacataatacttctgaaaaatatacattagtaatgtctactacactaaatttgaaataggttcagaagaaatcaaataataaacttgaatcaagctgatttagaaagacatttatggcgttaacgttgtgaaaaattaatgagtgattatatacataaacatatatatatatacacacatacacacattattctgtccctactttcatatccatctatttacttttatatcttatcaaaatactaaaggaattcacaatgattattacacctcattaaaccatcaccatttcaataagttgagaaattaagagataaaagaaaaggataatccgatattaaaagttcgattataaaagacaactttggttatgtattaataatgggatcagctagatctactaactagctagaaacctaatgctgcata

SEQ ID NO: 12181 - DNA, 675 bp, Cannabis sativa
ttaatattaattgtaaaatggttccataaccgatcagttatgtgtaactagagtgacacttgctttgtatataaaggagtgatccaacctgaataaactagacaaaaatcctttgcaacagtggactaaacagatcatgaactgactgaaccactatacatctttgtgttcattccatttttccatttttgttctattgtctgggtagtcttgttcgtatactcgttgttctaagttgagtacttgtttatttttctattaaatgtttattatttatttactttttggtgttgtccaaatttctccaacaacaggttacaagaaggtgataataacatcaagtttttccatgcctcggcttcagctagaagatgcaacaattttatttcaaaactcaaagactgtaatggagcttgggtcggttgggaacagattatggtggattattttactgaccttttttctgcctcttacaccgactggaaagaggtaacaacctgtgttcattctcgtgcctcgactgagaaaaacatagagctactacaatcatttttggatgaagaggttcaaaaagtgctatttcaaatgcacccggataagtccccaggtcccgatggtatgaccattggcttcttttaaaagtgttagccggttgttagtcgagatgtcacccaa

SEQ ID NO: 12182 - DNA, 642 bp, Cannabis sativa
gtatggtcttttaagctttaggaaattttttatgtttcaggttgaacatgtgatcagagaagagaaaacattgacagcttataattttattgaagtatactgtgagcttattgcagcacgcttgccaatcatcgagtcacaaaagtatgtacatattttaaatcttatataatcttcattgcttatggattttataacatgtggatagttagtttagtttgtcgctggacttgttttttttgctaattttatatgccaataacattgtgcttattttttcttggtctgtctttagaaactgtcccattgacttgaaggaagcaattacaagtgtaatatttgcagctccaagatgtgcagacatacaagaactcgcagatattcggaaacattttacagcaaaatatggcaaagagtttgtctctgcagctattgacttgcgaccagattgtggtgtgaatcgtgtggtcagtacatttacgtgcaaatttccatgatatttataatttgcaaaatgaaagtgacccatttacagaaaacaggtgactcagcaaaaattagcatagtgtgattgattattttcatgtcttctgtgaaacagttagtggagaaactatctgccaagacacctgatggtccaac

SEQ ID NO: 12183 - DNA, 776 bp, Cannabis sativa
aacttacttttatacatacatataaccatatgcacatatgtaatttatctcacaaaaacatataattactaactcatttgccaaacacaaaaattcatatacaattactatttaacatccaaacacacaatgtattttaaaatagaatgtaattactttcatgtgcactaccataataactaccctacctaataactatacctttgtttccaaacacatactcaaaaatttgttgacattctaaaaaaaatctaaacttatctattcatttttttgaaataaactcttcattaataacttatctattcactttaaatactaacttttaacataaaatacacaaaaattatgcatacacatatataagcataaatcaatctaatacaaatacttttcttcaaaaaaaaaaatgtaacataaacattagaaataaacaaacgtttttttttttgaaggaaaaaacaagcagtgcaatatctaataccctaatgaatttactaaaagaaaacttacccctgctgctgagagggagggaggagctgccgaaagaggaagagaattgctgagatttatacattatacaaacaaaaaaaacaaattaatataatgtatacactatacatataaatacatatacatatgtattaaaaatacagaaatatgtatacctttgagttgagagagagatcgaagtgggagaaaacatttgcatcatcatctgcatcatctgcaccggtgtcatcgaccaagcaaatggtgacatctgctgaggagat

SEQ ID NO: 12184 - DNA, 896 bp, Cannabis sativa
acaacgaatgtcattgaggtaaaataaaagttgtttgtaaattataccattcaataattttaaataactcttttgttctttgattttgtttttagggattcttaaattatctacatataattccaagcaataagaaaaaaattgctatactaaatgggcttagtggaattataaaaccatgcaggtgaatgacttaatatcattttatttgggtatgtaaaagaaaagtaaacaaatgaatcaataagccagcttattatttttcagaatgacattgttattgggtcctccgagttcgggaaagactacacttttactggctttggctggacaacttgacccacgattgaaagtgagattttttttttatttacattgatttattttcaaggtttaaacttatttatgtatgtatgtttacataagtgaattaatgtttcagttttgtggaaaggtgacttataatgggcatgacttggatgagtttattccagaaagaacagcaacgtatgtaagtgagcatgattctcatattaaagaaatgactgtgagggaaaccttagatttctctgctaggtgccaaggagttacaaggcgttatggtatgtgaatgtccccgcttatgttttgatttgtgtgaaaaaattagagacttggaattcatcttcatttggctatttattctcacagagttgctagcagagttgtgtagacgagagaaagaagccaatatcaagcctgatcctgatattgatgtcttcatgaaggtgacccttgtgacaaaattccttacttgaaaatttttagaagataaaaacaacattcgagtaagatgcctgagatgttctctatgcttgtttctgtctgatgaactgctattttaatctatataggca

SEQ ID NO: 12185 - DNA, 953 bp, Cannabis sativa
gccactctcagtcgtacaactgaaaccgaaccaaatacgtctgctctggagccactctcaaacggtggccgccggctgactgaaccgaacggagacgactcgtcgaacggagacgccgaccgattgaactgaacgaagacgactcgcctgtgggttatcgcagaagcttctggacgctcctctccaacgcgatatgttcctctctcctggcctctctaaataagatatttatttatttaaaatattaataataataattaagcctttaaataaatatatgtaactgattctgttatagaatgatttttaaatttaaatatttaatttaaatatctaataacaaattaagaaaatatctcaatcacttgagaaatatttaaattatctgaacagaatctcttaaccactttgagagaatatctcaactataaataaatatctataaccagcttttaaattaaaattttgataaattaatcttttgaattaattaattaattcaaaaataaatccaatgggatccatcataagttttaggggcatatcattgttattacatagtgattgtcaccatcttgcaataacaatgatgtttgtactgacaacttttttgtctctccaatttatttgaagaataaatttaaaattaaattatttattacaaaaataaataattactattttgctatttcaaaatagatttttcttattttttttttttactttgtgtcatccatacccttgacaatgttatattgtggtaatccaaggactatagacatataataccaagctctaataaattagattagttattgaatctcataaataaaaataattctatttattgattctattattactttactaaaaatattgaattacacttttagtaattatacaattatatttattgagtttcactacaatattcattgttatgatgaatacta

SEQ ID NO: 12186 - DNA, 648 bp, Cannabis sativa
aagagagaaagggggagcatggggaacgtcaagataaatggaaaagaaaaagaaaaaaaattaatttttacagttatttattttatttttattttttaaattatttattttatttttaaattatttttataaaatttaagtaattaaaatgatgtggacgaataaaaatatgcaacatgtacaattgtacccacatagaaaatctaccttggcacttaactgtataaatctaacataagactaaatagcataataacataagtgagatttggagagtttgccaccaaaaaatcatttttattagttaagtgtaacaaaatgaatagtttaggtagttttgccgcaaatatctttttttaattatttaaataatttttaaatataatttttacgaactagtcataagatttctgaagattttggtttgtcatgttgcgatgatttgttgatctctttgaaagcaaaatgggcttgtttggtaaagtaaaaattctgttgcaaatggggtggtggctgttgcgttgtcttactttaatcagtggaagattggtcacaagaattgtgcaaacacagtgggttccagttcttgtgttcgtgtggagtattagtcggtccctagtattaatatgattaaagtcaatgtagatg

SEQ ID NO: 12187 - DNA, 845 bp, Cannabis sativa
cattcctcccaaccaaacgccaagtcaaagaattgtgaattacaattggaaaatgaatccaagaaagaagaagtgtatttgacaagagggagaccacctaaaaaattaagaagagtaaacaccatcactctcaattaagattgaagttcaaagagaaggaaactctaaagtgttacttctgtggaaagtccggacacttgcaaagattttgcaagaagtacaaggaacatcaaggcttcaaaaaatcttgcaatggagatagtaaggaacaccagtatcatcactataagaaagattcaactgctatcacggaggatagttatgactgctcaatagatggggaattgttttccatcttggaattctcaatgaatagggagtggattattgactccgaatgcacttatcacatgtgtctaagttgagaattattttttgattataaattagttgatggcggtcaaattgtaatgggaaatgatcattcatgccaggtcattagaaccgagaaggttgacatcaaatagtatgatggtggaatttaagtgctgacgaacgtaaggcacatttcggagctgagataaaatctcatatccctgggtgcacttgaagatgaaggatacagatacaattccatgcataaaagcttgaggatcaccaaaggttcgttgatagtggtgaaatgtgaaaatatcaatggtttatatgttctacaaggatacattattccagctagagaggaaagtttggtgaaaggaccaaaattggatatagctatggcatcacagactagagcatatcagtgaacaaggcgtcaaagaacttcactaacaaggtataattga

SEQ ID NO: 12188 - DNA, 681 bp, Cannabis sativa
acaataaaaagttagaaaatcctaactccttcactaaaaaccaataagttgttaatagtaaatcatcaaaaaagtgcgaaaaatattagatttcttactcaaataaacatgtactaaattacatctattaatgattatcaactaaaattctcccaataaaaattggataaataaccttactcatattagaataaaaaagaaataacaaaacgactaactatatttctgattatgctgataaaaagaatgatccaaaaacttagagatcaataaaaatttgaagatcccctaaattcaaataggaagagggacaaccataccacaaaagtatattgagtcatttgagaacacagtactagtgacctaaacagggacaaaacttacccctcataatcataattcataacaatcctattacaataacattagtaaagtgatagtagagtagggcgaacctaagtattagatagtttggactattacataagacctcctttattaaaagactcattttttttttcatcttccctttatataaatctatataatataataaatatatatttttttttttgtatattacaaaaaaaaagaaaattgataaaatgtgtagtcccaatacacattattttcaaaatcttgtctattctatttttcttttctttaaaaactaagtatatt

SEQ ID NO: 12189 - DNA, 536 bp, Cannabis sativa
aaagtcctcatagatgcctgatccctaacaacacaatggaaggggtgaaattcaaaaaacacaccattatcttgacaaaactgagacacacttagaaggtttttagttatagaaggcacatgtaaaagattgttcaaaacaagatgttgtgaatgataaggagagataaatgaagaagtgcccatgttaagaatgtttaaacctgttccattgcccatgtgcacttgtagttcacctagatagctgctgctggtgttgagattttgctcatttggtgtaaggtgatttgtagcacctgagtccagataccaatcaggatcattaaccacttcaggagaggcataataggcctgaacttctgcaatattagtgctattactgccttgaagagcttgaaaggactcggggacagtaaagcttttatcaaagcgataaaagcattgctgcactgtatggccgagtttgtgacacaattgacactgtggtttttacccccaaatggtgttaatgttgcggccacgagagagtcctcctct

SEQ ID NO: 12190 - DNA, 588 bp, Cannabis sativa
tagatctagaagagagtttttccttttttgtacgtcttttattgatacgggcatttctttatgtagccttttagtttgtttaccggtttttcctccgccaagtgagggtattaatactttaagaataattagcaaatttgttccctgaacttatgtcactaccgacttgtggcccttaaaatatacgggttgttaaaaaatcttccttatatattaccactatattaatgtcccccttttgttaggtttttttaacagacaccaacttatttgctgatgtgatatagagtgaaggttaaaattgtaattgacaatagcttggagggaaaaataaaccttttttttcttcaatttatttatttatttttgaaataacaaaaaagaaacaaattaaaataaaatgccctttattgaataaaaaccaaatataagaagaattttatcgtaagtttttaaattcaataagaatagaacaaacacctatagatttatattgaactttgttcttccaaaaaaaaaacctatagatttattaagataaagaaaaaagacaaaggaaagctgaaaattgtggtgtgataatcaaga

SEQ ID NO: 12191 - DNA, 678 bp, Cannabis sativa
ggacacaccaaatgcaatgtaaaaaatttaagcaaaatatccccatgaaaatcacatgcagaaatgaaaatgaaaggactccatatagaaaagattaaaaccacacaaacactatagattttttaatttattgggacatggaatggccacaaacaacccattatgcacattactgacccacactagaggtcccatcatagcacatggagcatgaaccctcccacagcgatgggggctcgccacatctctaatcacattggctataaatcgtaccaccaacaatggtggagccttaataaaacatacatattactaaaaaaaaattactattttcttagaacagattcaaacagcttaggacaacaacaccattcacccgtattcaatatcaaagtaaacacaaccaatcgtcctaccaacactaaaattgccttcaaatacttcgtagcttagcttagaaagaatgaacttgctcaaattttggtaccaaattaacttatttagcttggtttgagatcataaaagaatataaatagaacccattttcaatcgtgaatcatacccttatcaaccacagaacagagcaaagcatataacagaaaggacctattttcttttttttatttaagatagctcatttcaactggtaataaaagtctcagaaccaccagacccaga

SEQ ID NO: 12192 - DNA, 1096 bp, Cannabis sativa
cgatagggaaactttttgccaaccatgattgaggattccatggactatgtcaaaaaatgtgacaagttctaaagattcttaaagatcctaagagctccacccaacaagttcatatgatgtcgtcttcttggccatttgccaaatggggaatagacctaattggtcaactcccaaagggaaaatgaggggtgtagtatatcgtagttgttgtggactactttaccaagtgggtagaaattaaacccctagaaacaataactttcaagaatgtcctcgactttattgttaataacaccatatgttagttttgactaccacaaaatattttgtcaaacaattagaagtagtttgacagttacatgttcactaatttctacaataaacatggcattattaaaagcttctccatcgttgctcatcctcaaactaatgggtaggtcaaagctgcgaacaagacactcaaggacactttgaaaaagtatctagaagaggcaaaatgcagtatgctagattttctcctagaggtactctagtcgcacaagaccactgagaaaactccatttgctttaacttatggatatgaagcaaagttgcccgtagagttggtgtcgccatctcatagcaggataacctatcattaagaggtaaacaacaccttggtactggagtcccttgaggaggtaaaagaaagaagagaccaagcctaccagtaaaaggctataaggcacttcaataaataagacaaggaaaggaaattattcataagaggcttattgatccaaacagtgttcctaaataccaaagaccccacaggaagagtgtttggccctaactaggaaggcccttaccaagttattgagataacaagtaagggagcttaccagcttgccaggtacaataagagcatggaggttgttctcctacgaagatatttgaatgaggagcaccttcaaaaatactaccaattaccatcatgtatgaaagatactcttcagttgtagtttttttaactcattaatttgagttagtttagaaagagctaagtccccatcactgttaatcgattgcctctccatcgctcttcaacgatggcctc

SEQ ID NO: 12193 - DNA, 581 bp, Cannabis sativa
tgcaataccatctacaaagttatatcaaagactattgcaaatcggctgaagctcgttctcaacagcttgatctctcccaaccaaagcgctttcctccctgatagactcatttcggacaacattattattgctcaggaggtagcgcattccataaaactcaagactaggggcaaaaaaggttggatggcggtcaaacttgatatggccaaagcttttgacagagtggaatggacttttattgatgctatccttcgaaaattccaattccctgcccactttgcccatttggtgctctcctgcatctccacggctactttcaaattcaatcttaatggtaggattttaggtagtgtttccccgtccagaggtattcgtcagggcgatcctctctctccttatctctttctcctctgtgcagaaggtttctcctctcttctgcgccagaaagaaagagataagtccctccctggcattaaagtcgccaggagggccccggccatttctcacttgctctttgcggatgacagtttcctcttctgtcaagcttccatcaatttttgcaacgccatcaaagaggtcct

SEQ ID NO: 12194 - DNA, 523 bp, Cannabis sativa
aagtgcttaaggaagaagtagattgcttactagcgcacgacttcataaaggagtcatttatccaaactggttagctaatcatgttctcgtaccgaagccaaatggatcatggcatgcgtgcgtcaattttacaaatttaaataaagcttgtcccaaggacatctttgctttacctagcattgaccaacttgttgatgccattgcaggtcatgaactccttacctttatggacacgtacttgggatataatcaaatctcaatgtatgagccaaaccaggagcatacctccttcatcatagattgaggtttgtactgctataaagtaatgccttttggattgataaatgcaggtgcgacgtaccaaagattagttaacatgatgtttgtagaatttccagggaagacatggaagcatatgttgatgatatgctcataaaatctcaacatgcaaaacaccatgtcgttcatttagattccatgtttagaatcttgcgtcataacaaaatgcaacttaatccgttaa

SEQ ID NO: 12195 - DNA, 535 bp, Cannabis sativa
ttaaagttggatcattcattaacattataattcagctattacaatattctttaaatctgttggagcattcagctcattaaacgtacaacttgacataaaacaggattttctagctacacaatgagcgatcctattttgcaatttgttttacaaaaacaaataaaaaaattattgaaagtagataaaacagaacggaaatcctccaccaataaaccaaattgaaatgacatttgaattgaactattaattgcttgaactacaactaatgcatccgattcaacaatcacatcatcccaacctttaaactttatcaaactcaaagcctctttgatgccaattacttcagctattttgggttggacaatcccacatctactaccagaaatagcctccagtaatctctcgttagtaccgcaagccacattcaaaaccaaatctttgttgagcttcaaagataacacaatcgacattcaccttgaccttaaaactttatggtttacaccattggtcgctgccattagttacatcagtaaca

SEQ ID NO: 12196 - DNA, 584 bp, Cannabis sativa
atatatatatatatatacctgtaaacgatagtggacagtgcgatagaactgccgatgtgggacgatgtgacaaggtaggtgggtggggttaattgattaattctccaatattaaataataattgataattctaatatttctcttatttaattttaaattatataaatattatttttctaataaacaatatcttatgtctcataatattatttgactaattatataatattatatataactaatacataattttaaacaaaattgaataaataatttaatcgagttaattatttaatttataattagtggtattcgagagtaattaaagaaaacccctctcctaaacaacaactcttaatttaaatttgcacaagcttctttttctatcgctcctacaatactatttaaatacactacacaaagtgtgttacacttgtacaaaattacctatcttataaatatatgtaatggacatgtttcacatgtgtaatcacatgatatacctacacaatatacacaagtatgttactttggtaaattacttcttaaaataacgactaatcctgcaaatcaatacaagtatt

SEQ ID NO: 12197 - DNA, 551 bp, Cannabis sativa
gaacccatctataccgacgacattgtccacagtacagagtcttttatcgagaacaattttttttttataaaccacattttttttattcattattaattttcatgttaaatatatcatattttttttttattttcacagtaatattgctcaaataataataaacaaaattcattaatataaataccataaatttacttttttatattttaaagttataagtttaattacctaacatgctaataaaatggttggtgaaagaaataaacactatatataaacacaactactaactcattcatccatcatcagaatgatcagattgttgaggtagattccgcgttctcggagtgtcaatttttcctaactaattcctccaactgtctaatccgctcttgcatatcacctataacatcatctccaacatatgcatcagattatatatttttgctattttttaaaattggagatttatttatattaaaatattttgaagacttactgcaattttaattttcatgtcacctttcgttttaagtgtaacacgtgtacaa

SEQ ID NO: 12198 - DNA, 773 bp, Cannabis sativa
ccatgtctttcctaggcttcaaagtgtatggcaacttcatgagctaggaaaacatggttttattttctcagggaaagccgtatagtagctcacttaatggtcgcacccaaaccaaagtctcaatcttcgttgatgtttgtttgtgcttgcttgagtatgttgtttaattattgttgtataattatcccaagatttttttatgttgcagaaatgccagagtccaaaatattgaattaggtagtagactccatcaaccatactgtatcccagactaccggaggcaaagggaaaggtaagaccaagagcagggaaaagagggtttgtaagccgaggcctcctagctctcactcatcctctagcacccaaggaactcctcgggctaagtaaactcaattcagatggcaaaggcctccagggaggcttctcaaagccatgcaatttctagcggatgagtggtcatagaggctcagcctttgcaacaatctgatttgaaataggagtaggttccttccaggaccaccatccgaatgacttcctctaggaagctttgtatcctgtttggttggctaatctgattttagtcccaaagcccaatgacatgtggaggatgtgcattaacttcatggacctcaataaggcttgtccaaaagactgctttccctcttctgtgaatagatcagatggtggatgccacctccaggtaccaatcgcttaggtttatggatgcttattcctagtacaatctgattaaaatgtgcatagccgatgaggaa

SEQ ID NO: 12199 - DNA, 690 bp, Cannabis sativa
taaactgatttaacaacactaactcgaaattcaatatcttgacgaatcacagttagataatttaactttccaaccaatctgtgatatttctcaagatcttaaaatggttcctcatcatgtgttagatgcacaactggattcattggagcattacaaggttttgcttccaatttttttgtctcaattaacaaatcaagtacatacactttgagacagaaaaataccttatttactttgagtaacttcaacatccaagaaatactttagtacccctaaatctttcatgtaaactgggtatgaatgaaagacttatggaatgagatgcctttagtattatttttagtaataacgatgtcatcaacatacaccactaacaaaaagatacccacaatttatcttttataaaatacagaatgatctaatttacttttcaacaaaccaaatttctcgaaagcttgactaaatttaccataccaagcatgaggattttgtttcaatccatataaggattttgtggtcaggttgagcccccaggcatgcacatgatatatctttcgtattttgattgttgggtccatcccttaatttgttgggcttggaccaataagggctaaatgcccatttacaattaaaaggaaacaaaaagaaaaaaatgaaaaaaaaagttgatggtggtgtcgtgtgaaacca

SEQ ID NO: 12200 - DNA, 559 bp, Cannabis sativa
tatggatgtgtctattttttttttgtaatcggagaaattataaattacttttttatatgattgtgtatatggtcgttttaaatattttgaggccctattccaatttaaaaaattgggcttctaacaaaaaagaaaagtataatttataaataatatttttaaatattttatactattatttatcttacaaaacactaaaaaaattagaactattatattaaattattattgattctaatacaacctaaaaagaaaatgatagaaaaaaaaaagaaattgaaaagtttgaataaaaaaacaataaatagcagtaatggacataatttttttttttgtttttttgcatgatagttactgttagcccctcagaaagttgggttcatacaaaaaaaaaaaaaatctaaaaggcattaataaaaaaaatatattaggccctttatttttgggggccctatgcagtagcccatcttgcacacctatagggtcaagcctgattgtgtatgttaaagcaagtattcgacaaatatatttatttatttttaataatatttggttccaa

SEQ ID NO: 12201 - DNA, 548 bp, Cannabis sativa
ctacttcggctcaggatttttcaagtgagcgttgtaattattttgagattttagctcagcaagaactttactggaaacaacaatcaaaacaattctggctacactcgggggacaagaatagcaagtttttccatgccaccgctagtgcacgcaagcgccataattagattgttcaactgcaaaactccgatggtgaatggaaagactggaattcaggtcttgatcaggtaatcactgattactttaactctctttatgctactggttgtgcggtatgtggtctagtagttaatggcatccgacgctctgttactgttgaacaaaatgatgctttactgctgctagtaacacctaaagaaattaaacaagcacttttccaaattcacccggataaagctccggggcctggcggaatgggacctggtttttatcaacaacattgggaaacggttggacccgatattatgtaacttatcactaattttttgactccgaatgcttaccacccggtctaaacgacacagatctagttctaattccgaaaaaga

SEQ ID NO: 12202 - DNA, 660 bp, Cannabis sativa
gctccccaagagatttggacagaaagaaaacagtcctatgaacacttgaaagtgtttggatgtactgcctatgcccatattaggcaagacaaattggagccaagagccatcaaattcatgttaccctactagtgtcaaaggctataagctatgttgcctagaatttggtttcaaaagattcataatcagaagggatgttctctttacagaagaagaaatgccaatgagaataacccctataactcaacatgtcaccactgatcatgttgcacagattcagatagtaagatggaacaaaggggaggaatgatcaatctggtgtaatccctgaaccaacgctacaaaaaaatgaaggtgaaatttttgaagccatagatgagactagaaatcttaagagttattaactagctagagatagggaaagaagagaaatcaaagcaccaaaaagacttggatatactgattttatagcgtatgcccaaattgttacaaaagaagaaattacgatatagaccccaaaaggcaagaagctagtcagttgcaaaaggattttgaaatggaaagagggaatccttgggtagagaaggacaagtacaaggccaggcttatagcaaatggattcactcaaaaagagaacatagactacactaaaatcttctc

SEQ ID NO: 12203 - DNA, 508 bp, Cannabis sativa
ggcggtgggccaggacgagctggacgaagagttcgacgggtttccttcgagtcggtcgccagacataattcgggtcaggtacgataggttacgggccttggcgggccgggcccaaacgttgttgggtgacgtggcggcccaaggggagagattggaagctctgtgcaattggagggatcctcgggcaacagggatatttgtggtattttgcttggtggcatctttggtgttctatgcggtgccgtttaaggtgttcatgttgggatggggattttattacttacgtcatcctagatttcgtggagatatgccctctctacccatgaactttttccggcgattaccatcactttccgaccaaataatgtaagacttggttcgaatgttttatgttatgttcatgttgttgtaattttatttattatttaattgattaattgaatttatttttaaaagaatggaatatttgttttgttacatttgtttatattgaatattgatgattggc

SEQ ID NO: 12204 - DNA, 819 bp, Cannabis sativa
aaaaaaaaaaaaaaaaagcttaatggtgatatgatgaattggaagaataaatttttctatgttcaaccgaaatcaaatgaaggggaaacataatgagattttagggcttttggctgagactatactcggagttaaatttacaatagattttattatttgagttgataaatatctatatatatagatttgttaatttatgttaaatgtaaatatttttttaagaaaattattgagatatttttttaaaaaaaataaataatagataaatttaaatgtttaaattgatttataaaaaaaaaaaattaaaaattaaaaaataagtgaattgaggagataaaaaatttataaaaggaattaaaatattgatacacgtattttccttattgatatgcacacgtatttaatataattttggcatagatatttttttaaaaaaaataaaaaaaataaataatagatagatttataggtttaaaaatataactaaaaataaatattttttaatttatattttgataaaatatttacaaacttaataaaaaattagaataatgagagaattgaggagagaacatgtatttagagtaattttagatgtattaccgaattcgtgaataaaaaattttgctctatttcatttaagaaaaaaattttaaaaaatataatgttcaattaattctaaaaaaattaatataaattatttaaaaatttaataaaattattaaatattaagtttagttaagaaaacttaaattattttaaaaatttattttatttataaattgttaaaaaatcaaataaaaatcaaataaaaaataa

SEQ ID NO: 12205 - DNA, 582 bp, Cannabis sativa
ctttgtgtcatgtactacaggaaacaaatcaatctattggttagtcttaatcctcatagttgacgcattaattattctaagctttctttccaattaacaattaataaaaaaaaacaccatttgttataatgagcaaaaacttttttaaggtttttaatactaatctcactttattaatttatttattttttcttaaaagaaaaaaatgatactaaaaattaccaccaagaccaagaaagatttttcagttttttattaataaagctcataataaatttggtaaaattggggtggaagagagaagaacatatgatttggaaggtggtcaactgtgaaactaagaaatggacaaaaatgttgtgatatttgtatagtgctctgaaatttaaaataaaacattcagacttgttgaattgttattttgtccaatcaaattcagtgcaccctcatgttttttgtcctgccttcacttacttaatgcaactgtcttttatatttattgtatataatatacgtttcagatttattatctcttttcttcttcataataaatttaatgcaagtacataacaatttagtgag

SEQ ID NO: 12206 - DNA, 1022 bp, Cannabis sativa
ttttacatgtttgcatgtgtttggtctttcgttctagctctaagacaattatatacaaagttaatacatgataagtaattttaattaatttttatttaagatgagtctttatttattaaagagtattgttatgggacactaaaatatctagcatcattatgagatggtgctttataattcgttagcgattctctagaatctttattaaagtaaaatatataaaactcgatattaaattataccaattagacactattagttgtgcaactaaaattttacattagttagaaataaaaaacattatatataagaatgtttactatgaggtcttttaagaaagtgacgaaaaataaaatcacgagaccttaaagtttgatttatataaggtaaatattaatttggactttgtattttgtaaaagttacgttaaataacaaaatagaccttaatttttgacaattttttttaatatgaccaacttcaaaacaattcttaacatgaacagatacagaaaatataaacagttttgtcataacacttttagatcgcattattattaaattttattttgacaaaaaatcaatttagggtcctatttgtactattttggaaaatacagaatctattttgtcatttaataaaacagagagtccaattaataatttttgcaaaatataaagtccaaaatagtatttatctatttatatatgtatatattattacttaagtaaatagcggcctaaatatccaaagttttatgtttgtaagcgatataaatccaatatttatttttagcggcataagtatccaatatttgtaaaactgtaatttttctctaattttatcagtacaaactatgttattgtcttaaacaggacacatataaaacctaaattcttgattattaagtcaagatagaaatatatagtatcagttacttccaaatattcttttaacaaattcaaaacagagtcagaaaactgagagaaaattacaaccctattacttatttattaatcgtt

SEQ ID NO: 12207 - DNA, 580 bp, Cannabis sativa
ttcttattcagttacctttttgtttactgctatattatatttaggatgagaacaacgtcaattacaaactaacttctattttttggataataatatattggatgatgatatttgattcatggtaagaaagaaaaacaaattaatggacgtcacttaaacaatagttttacaaaaacaggggaattaagaagatgtggtcctatcttatcaagcatacaacttttagtgtaagtgagaaactttcaccctctgcaaggataaggaaaacagtggccattaaacatatttggcaacaatgaaatacttctcactgaaacacaaataaaaggtgtatctgtataatgtataaattaactagttagctgtgttgcacattcccggatttctaacacaccaaagtggttgaataggttcagctccaactcctctgcttaccattctgcttctccactcattcaaccgatcagtggcttctgcagatctcttaattccagttttctcgtcacggtttccagaccacaacacctcggctaacgcagaagcacgcggccagatttgagagtcgagtaccgtctgatca

SEQ ID NO: 12208 - DNA, 589 bp, Cannabis sativa
tttttacaaaaatattaaattttataattttattcttacacgaaattttttataaatatactatatttttataaaacaatcgtaaaataataaaatagaacaattaaaacaatagtgaaacaactaaaaaataattgtggaataacagtgaaaacttatcatagtacatagtataaaacttacacaatatttaaaaaaacacacagtatttttgaaaaaaattgatcacacaataaaaaggaaaaaaaatagaattttctgtatgtagtgtaaaaatcctaaaaaaatagtgttaagaacatcgaacgtgatctcagctgcagtgttgtcgaccgtcgatggaggagcgtcatcttgggaacgagtattgggtcttgccatggaagctgtgggcaaggtttcgtctgataccataagataaaacaaagcaaaaatgcttttgattttattgatctgtaaaactgagttgaatacaatgtgcaaagagtttatataggcaataagagtcggttacaagagataaccgaaaagaccaacctgattaaagaataatcctaaacaaacctaactaacttaattaacacatgtg

SEQ ID NO: 12209 - DNA, 605 bp, Cannabis sativa
ttttatccaggaatctcacaagacttccaagattgggattgctaaaaggcttcgcaacttatacttgctgccccatacccaacaaaaggcttctattttttctttcaatcattgtaataatctttggcataaccgccttggacatcctgcaatgcaaattacaacaaatatgaataaagatgtttctttttctaataataaacatcattcttctttttgtccaatctgtccgttcgccaaacaaaaacgtctatcttttcactcatcaaatctactcattgttttgatctaatccatcttgatatttggggtccttttcacattattagcactgaaggttaccgttatttcctcaccattgttgatgactcaacatgacacacatggatttacttccttaaaaataaatcagatgttaccaacatcataccagattttttttctcacgttgccactcaatgcaacactgccattaaagcagtccattgtgataacgctaaagagctcaatatgacctctttctatgcaacaaaaggcatcactaaatacaattcttgtgttagtagacctgaacaaaatgtcgtcgttgaacgtaaacaccaaca

SEQ ID NO: 12210 - DNA, 634 bp, Cannabis sativa
taaaaggtaataggtgtgtatgataatatgtacctatacactttgctaaaaaggcatgtggatatgtggaagatatgaattttgaagtttaacatttggtcaatggactggaaggtgaagttcctttggtccataaaaacaaaaacaaatacaaaaaaaaaaaaattgcattttaaagcttcaagcaaattgtatagtctcttttcagcttttattttattttataacctattcatttgtttaagtttcgccatattggtgaaaccaggtcagtgatctgattttcacgtgatatgagatgagagagaccagtgatctgattttcaacaataaagattattacatgggtccaaataattctgacaaatttctatgtgtttaatcactaagcatcacccattcacagcattcattttaataactaacagaggtcatatttctgagtaaaggtgcagacattccacttttatatagaaaagaaaagaggatttgacaatttacattatatgataagctagctagtcatcaataaagaaaaccactccattttccttgaagtgatgcgttgtgtgatcaaccaactgcagaatcataagaagctatcaaaaaaattgatttcgattgagaacagaaa

SEQ ID NO: 12211 - DNA, 646 bp, Cannabis sativa
acgtaaactatagtaggataaatctcataattaatctcattaattactactttttctctaaatctcaaaaccatggcatcaccagctctcacaatcatctctttccttctaaccctaaccctagctttcgcccttggaaaagccgaagatggtttcgtcaaagccatggataggaagcttctagggctaaaaaaccaaaagttaagccacttccgattctactggcacgacatatacagcggaaaaaaccctagcgcgatggcaatagtcagaccaccgaaaaacacatcgaaaaatgggttcgggtttattagcatgatagacaatgcattgacagaagggccagaactaagctcaaagttgcttggaaaagctcaagggttttatgggttagcttcacaaactgatggtgccctagttatggctatgaattttcatataattcaagggaaatacaatgggagcactctcaccattcttggtagaaaccaagtgtctgataaggttagagaaatgcctgtgattggaggaagtggtctttttaggtttgcaaatggctatgctcatgctagtacttactcatttgacacttctactggagatgctgtagttcaatataatgtttatgctcttcattactagctat

SEQ ID NO: 12212 - DNA, 988 bp, Cannabis sativa
aataattccttattccaagcaacaccgaatgaatcatttgagcacgaccagcaaaagaaaggtttctactagcccagcagttcaggctcttattcagtttgtccaaaataactccacaatttgctgccttccatttggtaggtctatgattgacccctaggtactttagggggaagcttccctcttcaatttgaaccatatcaagaatcttggatttaacctcttcacttacccctccaaagtatatgtgagactttgaattgttagcagaaagacccgtgtcattgcagaacttagtaaaagcttcactaataagcctcaccgaattaatattacctttacaaaagataacaagatcatttgcaaaacacaagttagtcaagcgaaggtgcttacataaaggatgaaattcaaacccctttttactagaatagtaactcaacaacctagtgaggtagtccataatcaaaataaagagaagaggggacatcggatcaccttgacggagaccttttttcccgttgaagctaccttgaattctaccattaagaagtagatgatagctagtacccttaagacaagtcatgatccacctgatgaaccaaaagaaaagtaacctgagtaaatcttccacaaagtcccagtctaccgtgtcctaggccttactgaggtcaattttcatgatgcacctagcagaaacattcttcctagtataacccttcaagaggtcttgaaaaatcataatattatgagccaagagtctatttttaataaacgcaccttgattacagttgacaatagagggcagaacttctgagagtctagaacatatcattttcgagatgcatttatagacaatattacaacaagcaataggtatataatccttggctgatgagggattatccaccttaggaattaaagaaatgacaatctcatttaaggtgttgggcaaacatccggtagaaaaaaattttagaaccgcaaa

SEQ ID NO: 12213 - DNA, 510 bp, Cannabis sativa
atcctaatgataatattccggaacaatcagtcaatgaaattcagcagctttttttgacagcaaaagatagaatgactcagtttcttagacaacaaagcaagatcaggtggatcaagtttgatgacacaaattccaattactttcatgctgtattgaggaaaagaagattggaaaaatgaataaccacttacacaaaggggaacacaattgtagacgactttgaggaggtggttaaacacttggtgaagcacttcgaaaacttcacgggcagcaagagttcaacagtaagtactattgatgagactggtattaagcagggtaattgtatgagtttggagcaacaagttagcttaattcgtcccttcagtaaaggggataataagaaaactctctttagaattcactcctctaaaagccctggattagacgggtttagatcaggtttttacaaggatttgtggaataaaattggtgatgatgtttcttttgcggttctaaaatttttttcta

SEQ ID NO: 12214 - DNA, 577 bp, Cannabis sativa
ggttgatgagttgggcaagcagaatttgatacctatagtagagaaggaatcggaggtgtcgacggtagcttcagatttgggtgggccgattgtagtggagagtgtgctacctacgggtgtgcatgggttgcatgagccgaatggtgaagggtcaaagggtgaggatattgagttatcacgtgtgagtaaggatgtggttgccgaaggagtgttagttgaccgtagtaaacaaaaattgacaaaagaacaaaaaggcaaagggatcatcgctcattcatcgaaagaagagatttcttttagccatgcccttcaacaaacatttgaccctcttattaaagcgcataaagctaaaacttggaagaggctaaattcttcttctggtcgtggctctaaaggggtgggtaagtcgtcttcttttcccattagtcctaagttatcacatgttatggtagctaatgctaaatacaaattgagtcctaaaattggtggcggtgggaagcgaaaaatggaagtggagggagatattggttgtgtgaagaagggacggttggaagagcaatctgacatggctcccgaa

SEQ ID NO: 12215 - DNA, 506 bp, Cannabis sativa
  modified_base (67)..(71): a, c, t, g, unknown or other
ttatgtttttaaagttttgtttctaaaaaataaaaatgtgtttttaaccacttttattttttaattnnnnnaacagaaaataaaagtgtgttctataagattcatttttatttttattttttaattttatttaagtcgagtcttggttcgggtctggggctggggttgtggtctgagtgtgggactggggccaagactagagtctgtgtcccagagtccaggttggagtcgaagtccaacatattgattaagaaaaaaaaaatctatttaaaacaattttaaaattaatttttttttgttttcaaaatttttaaaattttgattctcaattaaaaatttagaaagcaaaaatagttttatagaacatatttttagaaaatattttcacctttttaattaaaaaaatagaaaactaattaaaaagtgttctaaacgcacccttagtacatatcaaaatttagggagtaaaaatactaatttgtcttgtttttttgtataatattttt

SEQ ID NO: 12216 - DNA, 640 bp, Cannabis sativa
ggtaaaataattccaacaaagattcccatgcaatagatcctatgcgcccactgccatatggagatggctttactctcctatttttggagaacactgccacaaggagatggcaatggtcgccacttataaagcaccaaaggggacttgtcaaaatgtgttccctcaacacaaaggagtgcaacacaagtgaaagaaaccatttctcaccaaaatgcaacttagccgaccattgccatctttgtggaaaaagttttggtagtggtcgcccataagaaatggggatgaaatattttgccaaaagtacatttttatcaataacatgtcaaaaccaagtgagagaagccaccaagtggtgtggaaaccacttgtccgaccactatcacatttttagcacaagtggtagcagcggttgaccgccacatagaaggggcagtttctttggcgaaattgtatttttaacatccatgtatcaaatacaagggagaaaagtcacccaaggcttcatagccctctcatgcgaccactgccactttttagcgaaaattgtggcagtgctctcttaagatattggccaagaaataatgtgaccgaagtggttttctagcatccataagactgaaatgatcaagaaataccatcc

SEQ ID NO: 12217 - DNA, 508 bp, Cannabis sativa
atatatatatatatatccataattttattaagttgttcaagctctatcaccaccaatctctactacatggagttccaaccaatagtaccctctttccaagtccttcccttttcactttctatgtttgttgtggtattctctttagtttttgtgtttatgatagtaaatatactattgaaaagagccctaaccaacgacgcaacttcaaagctaccaccaggaccatggagattacctttggtaggaaacatgcaccaattaataatctcattattaggctcaaaatcattattaccccatcaaacacttacaaacttagccaaaaaacatggccccctcatgtacatcgaaattggacaaattccaactctaatagtttcatcagcagagtatgctaaagagatcatgagaacccatgatgttgtttttgcatctaggcctcaaactcttgcagccaaaatcatggcaagtgattgtaccgacattgcatttgctccatatggtgagt

SEQ ID NO: 12218 - DNA, 738 bp, Cannabis sativa
taagatgaatactaatcttacattgggccaatttggcacagctgtgatgtgaggaaaaacagttgtgatgtagggaaatcagctgtagcagaactatagaaaaaagctgagctaagtgtttggtaaattaaaaattttaaaatgctgcgagttgttaagattctattataatagtactattttaatctgtttcattaaaatcacaaatatatatataaaaaatatgttatataaaatttttattttctatatatttttaattaattctttttttatggtatagatttatatgcattcgacaaaaataatttttaatatgattaaattatatttttatcaattgtaaaaaaattgtaatttaaaagaaacttaggttgatattgtttgttaataatataaatataaatataaaatatctcttaaaacaaaataaaaaattagaaatttaaatattatttattttaaatattttttccttcaaaaaaaaatatttttatattttttgtaatatataataaataattaaataattattattaaaaaataacttattatagtcttttaatcaaaacagttttttctaaaagttgggttgtatcaactttaatttttagttgtaatttttccataaatttttcaataagctgctttttaactacttaccaaacaccttttgtcacaatttttttgagaagcagcttttaatttttcaaaaaattgtgccaaactaacccaaca

SEQ ID NO: 12219 - DNA, 570 bp, Cannabis sativa
tcctccaggaaatcgcttgacattgctcctaaccctttacctcactagtgctaggtgaattttcttgagcttgttttgccactcaagtagccagctgtcccatctgagtttctaagtttttaatagaagctatagtctccatcatgaattggagcgataaatcaattacttggatatttgagtctccactagaacttggttgttaggagggttgttgagtttgttggggttgatttctttgttggtggaaaccttgttactgttgattcgatgactgcccttgatagttttggcgaccccttcattggttatacccatagttattgttctgtgaatagttttcaatggctttagcttgatcattggcaaactgttaacatctaccgggcagttgtcatatgtgtgaggccccccacatagctcacaagtaacttgagcctgttttacctgagtagtcatcaacttactcagggcctccacttaggctgtcaacttagttatggaatcaacttcatggattctcgcaactttcttcgattggcttctctcgattggccattattggttatt

SEQ ID NO: 12220 - DNA, 586 bp, Cannabis sativa
gcatagtccatgaagtcaaatattgttttcccttcttccaccgttgtgtcttgcattgtttgttgttgagttgttaattcttctcttggtggtgcgttgtctaccatttttgttattgcatatttttctgtaactaatgagttgctcattttcaagaatgttggattgtgggttgttgttgttgtgttgctgactacgttcacacacaatggatacgttgtgaagtcgagttcttttaattttagctgtacataggagtatatgctttgatcttcccttattctcaacgattagtatcattcttttacttggtattttagttacaggtcagtattttctttgttgcattctaacagttcttttagcttatgtatgagttcatcatatttacaatcaattggtatgaattttccactagcttcgtaatttgtataatttattccatcatcaaactgtccgttgcaaaagacgaggaatagaatttcctctttttcttgagggtataaaagttttattattgtaagtcaacttgtgaaaaactgtaataaagttgaaatgcaattattatatatgttgcgagtcaatt

SEQ ID NO: 12221 - DNA, 709 bp, Cannabis sativa
atgattatatgtgtagaaaatacgtccaaaaccctaataatattctctccttttattatttctccaattgcacttttggtctatatacaattacaatgtatacgtatatatatttgggattattatcgacagaaaaatattgagactttttgggaagaacaaaaattatgatatataatttttttattttttttttgtaaggttatgatataaaaattagaaagcatggataaaatataaaaatatttttaacttattaataatagaattaataaaaaaaaaaaattaagactttgctttactcattttttcaaaaaagaaatatattggtattaattaaaagtgatcaaaagaaaatatttaaatcaaaaggggctgtttaaatttgacactagttttaatgatatttaacaccccctccttcataaaaaaaaaaaaaagttttaatgatatttaagagccaaaaatgagaataattaaatgaaaaataatttaataatacctgtaggtataataatttatatatagtattttcaataaatagataaattatatatttattttacataacgatatgcataatgtaatctgaatcttacaaattttcaaaaagctcttcataatttaagatcacatatatagcaataatttgtcgatagagtttgtaaaattcgaacacaaaaagctcaaaaaatactctgattttctc

SEQ ID NO: 12222 - DNA, 582 bp, Cannabis sativa
accctaatatatcatattaacacttaggtagtgttttgttggaggtaatgaaatacaatagaataagaaaataacttttattttattcttttgtttggttacattttaaagtattggaatgtcattctaatggaatgcccttttactatttttgtggaatgactatttcattttgaaatggaaggaaagaccattccaatgtaacatgagagaaaatttaataatttttttaccaatttttttatacagttttaattttatttcattctattcttattcctatttttatttccattcttatttattccaaccaaacgccaccttattgaaggcatcgtagcaattatggggtgtgtgatgtgaattacaaagtgactcttaaatgctatcaatagttgcttaaagttctcttgtttgacaccattttttttatcatctaatcacttactaaaaacactaccaaaagagttgattatttatttctttccttagtgcttagagaaaggaaaaataagatttttagataaaagggttcaaccttgttaaattttggtgattatttccacttaagattgtgtttgt

SEQ ID NO: 12223 - DNA, 687 bp, Cannabis sativa
agcctcttttgtataaccttccctttaatagtgtgaaccttgggaacttgtataataattttcttactttattcttgtcattaaggagggtcccactacttaagtactcaatgatgggtgttatccaagactttgttgggtaccaattatttcaatatcttattcacttggggtgatacttctttcggctaaatgttctattgggaccatattgagagtgttggcttcttttgtggtggcaggttgtgcgagagcattagcattggaatttttctcccttgggatttactcaattatattcaaattgttggaacaggctttgtgccttttccaagtaagaggccatgttggctcctcttgcttggtattctccaagaacttggtttactactaattatgagtcgttgaaacatcttttggatttggcttgtaaacctcgtgcgagtcttaggccagcaagcaaggcttcatatttagcctcgttatttgacgctttgaacccaaattgcaaggttgtattgatttggtagccatcaggcttgactagtattattcctgcccttgagccatttttgttggatgacccatcgacaaataactgccatgtatgccgaggtgacttttgaatttcttctccttctggaaacccgatacgcttagctatgaaatcggtgagatcttgagctt

SEQ ID NO: 12224 - DNA, 769 bp, Cannabis sativa
cgtaaaagtgaatttcaatagtaacatataaagtgctctaaatttaaaatttaatacaaaatataatatgttaaattttatgttacaataacatttcatttatacactgaataaaaaattaattttactgttaggatattactattaaatttgtattaaaatataatatttaatgttttttaattcaaatttaaattgaatatatcaacaaagaaaaagaagaaagtaagcatttttttttcgaaccggaaaagaaagtaagcatttacttcatcaaacatagtgtaataacaatttagttgcactgatttcgtagcttataggaaaattgggcaatattataagtcctttgatatgaaagtaaagtgggtgaggggtgaggcctacagcacgtgggaaaggaccccacatgtgaggagtaagagatgtgtttgttattccatagggactgctttttatttttaatataattaaaaaaaagtataatttgtctggttttatatgggagttaatgtgatggtgaaatatgagcatgcatgaatgaaggatggtcctacaaacaacagtaccaaaccacaatcaacttttcggtttgaaagcttgtaggtaggttgtaggaccaggctcaacccccatctccccagtacccatggcttttcgattcagcaacttgacaaaatttccaaagttgtggggtcccttttcttttatttatttctttacattttgccgttatcttctcatgttgtctctcccaaaccaagttggg

SEQ ID NO: 12225 - DNA, 969 bp, Cannabis sativa
ccttcacgagctccagtttgcacagccaaccgaggcgctcaccaccgaaatccgttcaccacgcatcaccatcaagctgtaactttctccgcaccacaagccgtgcatcatcttcagcagcaagaaatcgagcagctgcacaacagcccctgtacgcagtcaaagccaagacaacgaatcggagcccgcacatttcagccaaggagaagtaattccgggtttgtgaatttaaattgaaaatatttttgcttggaaggtttatttggtgaacattgtggtctgtgctatctgaatatttttatggtagattagtgttggatttgcctcaatctttgagtcgtgttggtgtgagtttggactgttgttgtgaagattattgtggctgaatatatttgaacagaaaagaatgccgagaaccaagcaaatggcttataagaagctgctggagctagatgaagacaaacgctttacgactcccgaagccgaaaccaagtacaaccaatttatacagaacaaagagttctacattgaacatgggttgataactaaaatggatgagttggggcacttgcttgcttggctagcggagaccatcaaagcgagaaagtgggaactttttgtatggactccagaactagcccgaagagagcttgtcaaagaattttatgccaactttttaaatcatcaatagccaacaacaattattgttcgaggggtgaaagttccgtttaatgcgaaggtcataaacaagtattgtggccttaaaagggttgagtgccaatatttgaagagtagcaagaacatcactgatgagcttatccgagacattcttcctgagttagccaaaccaggggctgagtgggagattgatgagaatggcaatttttagtttcgaagaactgacctccaacatgagttgaaattcttgtacagctttgtccaaaaaagtattctccaaacctcacatga

SEQ ID NO: 12226 - DNA, 795 bp, Cannabis sativa
ggttgagggtcaaccaaaacaaaccctggacacactgtattaaaacaagataattcaccagcctacaaaaatattgatacaagagttacacataactacacagaatatgaagaaatcttaaataataacataaaattagggtaacctggaaatgtatgaagatccgagttttattatccccatatacacttggatttacctaagaaatgataccaaaataacaagtgaacaaaatattctaaaaacttatagtttatctaaaaatatttagtttaattatctttaacaacaaagaatctaatagaaagattattcaagaaaaataaaacttactccccaaccagcttgaatgatatcaagtccattttgtaattttattcgaccgaaagtgtattgtgagccagtgacatcatatagtgtgtaaaaacttacaattgtgccacctccattgtatttcttggttggatcagatgtgtaaacaagtgcatgctattatattcaaattcaaattgtaattatatttgaataatgaaatatgatatttaatttgtcaaaacaaaatgaaaatgtaaaatatgcttacatgaaaagtaggaggagaattaattcttgaggcataagactttgtaaacagtttggctctgataagagtttccttggtagttcttcttatgggaacaaacccagttggacatttttcaccctttaacccattaattttcgatacttgtctcacatttttcggaggcttatcttccctaaccagcgagtccatatgagaagaaggtttcatct

SEQ ID NO: 12227 - DNA, 576 bp, Cannabis sativa
tgaccatgtcgatttaatactttaatatttgtaattatgaatatcttttgttgatttaaaaatgttatcactgtcatagttaaatataaaaagttaaattggactaatgtgttgagattgtaccaaggaactatcatttttgaagtggctataaatatttttctattgttcaaaccatgagtcgtttttaaacaaaactattttgatatataacatatattaaaattaatatagctcaaatgagaggtattataattttttttgagtttacattaacttttattgattttattaaaatttaggttgattggatagttctttgttgtgttagctaatattgttactgatcaatagttattgagcttagcataagtatgtgtaaagtctagttgaagtagaagtgtgcatttttcttattaactgatgatttcgatgaacaaactcaatccaactaaggttatgtagctaaattctttttgtaactctataaatacatattgtttgatcacaattgcacacttttaataatcagataaaataaaaattgtttctaatttaaatacaaaaaaaaaaaaa

SEQ ID NO: 12228 - DNA, 558 bp, Cannabis sativa
atatacactcaaaatatttaaaatgagagagggtgtaattatttttttttaagtaaggacaaaaataatatttattttatatgtaattgaatttaactattatattaaagttaatattatatataaatattatttttattattataaatatatatattgtaactaattaaaatatacaatatataaggctgattctaggtataggcgggctaagtacgtgcctagggcccacaacacctttttggggtctaaaattaaaaaataaaaaaatttattaaacttttatttaagtaaaatttaagtgtataataagcaacaaatatcgataacttagtttgttgaggtggatggcataatattaaaggtcataagttcaaattccataactctctttttttttatatttttttatatacatttttaagatcccaaaatttaattcgtcttaagctcatatatttttagacccggccctcacaatatatgtatttttattttaactgactaccctacttcgcttatatgtaattcccatatctagttaggacatttgttgta

SEQ ID NO: 12229 - DNA, 950 bp, Cannabis sativa
caaacgacatatcgagcttgcgctgtgtcatttagcacaaaacagtaagctgtgttagaactgagagtagatagctccacatgaatagtagaaggctttgagcctgtttggctgtgttttcagtttttagtttttaaaagtgagaatagaaaataattttttgtcattttaaaaatttaatggtgtttgacacaagttttttaaaattattttttagattttttccttattaaaaaaaattaatattttaataccgtagctccgggttcgggtctaagatccgaatatgtgagtaaaaatgtaaaatataatatgttagacaaaataaaattgtttttgccaaacgactcctattaatttttaaaaactgttttctattttttaaaactgaaaacagtttttaagttgtgaagccaaacaacctctttatttttctttcttttaactcggttctaccatagtgaaaaaggtgggataggaagtgagattactatatgcattttccatttgacagtttgtaagatacttgtttttccttgtgaaaatagatattggactagacatgtaatgactaatatttatttgtgaagttagtttatatattataatttcttttttctttgtaaagagaagttaatgaccattttgctctgcagatgacaatactagggagttcatatccagtggaggggtgaacgagctagttcgaatatcaatggagtctagcaaagaagacatcaggaacctagccaagaagatgttaagaatgaacacagcatttcaagctgagatgcaaacgaaaaagtaatagggtgtacagacatacttacggtcttacaagctttctagtcatctgtaataatattagaaacaaaacaatatttttgttcaaggtaaatgagtccacctcacctggtgataatttaagctgtaaaatagaaccaaccaac

SEQ ID NO: 12230 - DNA, 514 bp, Cannabis sativa
aatacaatagccatcaggggaggaagcatttcctccaatcaagagcaaatagagtccaccgaaagagcatattttgcttaaacatgaacagtagtatttgtagatctattaacatgagagatttgcactccaaggaaattagacgccaagtgagaaatatttcaacccttttaccactagtagagaaatgatttcaatataatgtacttgtacgtgatgatctttaagccattgtagaccatatattaaagccaaagtttctataacttccggtttaaaacagccaggtagaggcctggatattgtagcaacaacgtcaccattgttatcatgtagtatcgcaccaaagcagaaagtttgatttagtttgttaacaactgcatttgtgtttaatttcattctgcccgatgaatgattcagccatggttgattttttggggtagtagctgagcgttggatagctgttgcaacagacggtttagcaacagcctgtgccaagtgatattcctccaag

SEQ ID NO: 12231 - DNA, 534 bp, Cannabis sativa
tttattgtagttagttgttaaatgtataattacacatctattcatagatgatcaacgactacaatttcttttctttttttggtttgagagaggcaacgatgattctcttgagcaaagaaaactttaggcaagaagttactaaatataaatataaagtttaatttttagcaataataataattttgaattgtaggtacctagtaattattaagtgttaagtaaattttttagttcaagtcattcaatttttattttttaaaaaagttaatttaaatataccaataaaaaaatgatacgtgaataataacttaatatttatttaacagtcaatactatagaattataaaaatataatttaagtattatatattattttcaaaaattaaattaaatatttatttacaactaataaataattaagtatttataccgtgtattattttttttcatatttgggaatacactttttaaggagattgcattagagggatgttcataacaatccaatccataatgcatggactatattgaatt

SEQ ID NO: 12232 - DNA, 708 bp, Cannabis sativa
tcaatttctttggaatctaaagtctagaggagtcgatgttgagagattatttctttacacctcaattgtggttgatacgatctggcgagcccgtaatgacaaggtacacaataattctctgagtaacattacacattatattgattctatttctacttgttatgcagattatggatcttgtttggttacctcgacgaaggcggttgtgtcccccaattggtctccacccccggaagattagatcaaagtcaactgtgatgttaaagttggtgaaggttcaatgtgtgcgatggccctagctcgggatcactttgggacggttttgtgggtggcgtcaaacatgctcaaattcgctgatcccctaattggagaagttgtggcatgtctaagctttgaaaacagatatttcgttgaagcaccattttgtagtaataaagaggatttcgaaaacggttatcaagacgcttctacttggggtattgataactatgtgcatcaatgtaaaatactctctaaccttttgataagttataatttttcttttgttttgagaacttgtaattttgctgctcataatgtagcaaagtaggcatttgtcaaaggtgtgtatggcttaattaatctgtcttttattccaggcaacatcgtttgtaatgatcatgagatctaactcgtatgttttggtttcttcgatctataaacgtctta

SEQ ID NO: 12233 - DNA, 506 bp, Cannabis sativa
tgttaattgtagataaatttatttttaaatatttgaaactgagtgccaaaactgatattaaaaaaaaaaaaactgaaggacccttgtataatgtatcttacaagtatcatctgtggaggattgaaaaaaaatgtagataagcttaaagattttcattagttggtgcctaaaatggcatcaaagtttcttaattagattttattacctgacattcatgtaaagtcatgtccttatatttccaagttggatgataataaaattccttaactatctataaggatcaataccaccattttctcccccacaaaacccaaattctgtcttttgaaaaacctttatgaagaatctcattctgatttaaaatcagataaaaacaatgtccccttccctggtttaataatagacctactcaaagtagtaaagcagtctctttaaccaacagtttagagatacccaccaaacacttttatgaagttaggacactccttatcttttttttttttttt

SEQ ID NO: 12234 - DNA, 543 bp, Cannabis sativa
tagagagaaaaagtagtccctcaagacatgtttgaatggtatattgtattgagttgtatagtattaaaatattataaaaaattacaaatagaaataatattttcaagtcatatatcaaacgccatataaaccccgaacttcatttcaatcccactgtcaccccaacacatactcattctcattctgaccccaaccaatttctaaaatatctagcacattgttagaaaaattacaaagttcatgtaatcgaaaaaaacacctgatatactatcattgttactaatcgttaaaatactagacaattgatgagaaccaaataaccaaactcaagaaaaccaattaaccagtagcaaaacaggaatataggaaagccaattacattctcaagggagcccttaggctcctttaatgcaaagagagaattactcaatacattccataccttctctattctcctactcacctatacatagtaatttctcactcaaaactactctcccaaacaaggactcaaatagtctttttatttactatatgctagca

SEQ ID NO: 12235 - DNA, 522 bp, Cannabis sativa
atctaggatgataaaagaaagactaatttcacaaaacataaaatcaaattaaaaaattatatatacatatatatatatacggaaatatacatacctataaaacatatatatatatacactcacgaacacatatatatacacacttgaatatacgtataaatattcatacatatatatatttacatatatacataataaatacacatatatattatgtatatatgtaaatatttatatacatacatatatatatgtacatatttatacatatacacatatatatagatttaaaataaaaaataataaaaattaaaatttaataaatatatatatacatatttatacacatatcaacaaaattatactcacattttttttaaaaaaaatacaaatatataattttaaaaaactaaaaatttaaagtaccttctaagagggaggttgctcagacggtggtggtgtagtggtggaaaggggttgctctgatggtggtggcgacgggaagagagagagagagagaga

SEQ ID NO: 12236 - DNA, 625 bp, Cannabis sativa
atacataggattttagcacaccaaatttgcagagaaaatagtaatggatttcctttacaacaatgcattccaatctctacataaatctaagaaagacaggtcctcgaacaacttggttttaaaaacccaagtaactgtccaaaatttaactttctcccacatgtcctctactgaacacccggtcccttcaaagattctagcattcctttccagccacacagcccaaattattgctagtattgtcgttctccaaatctttgttttgcgcttgcaaccatttaacttgctaactatcaattgtggtacacatcttggcataacccacgacagattaaattcctttatcaacttgattcataattgactgatgaaactacagcctaagaacaaatgccccacgtcttccccgctaactttgcagcaaacacaccaaccaggtgatatggatatataaggcatcctcttttgcaccttgtcatgaacgttcactttatctaaagacaagagccaaccaaagactttgactcttgacggaacacaacttttccataagggccttgcccaatagactccactgccattcgggttcgatgtaaaccaagagaaggttgacttacaagaaaaa

SEQ ID NO: 12237 - DNA, 745 bp, Cannabis sativa
aaaaaaggatagcatatttgaacaagattcaagacttatcaagtcagctcaaaggttatactacaaggcacgttcccagagaagagaatgcaacagccgacgcacttgctcgaatagctagcaacaccttgacagacaaggaaaacttggtgcccatttagttcttaaaagaaccaagcatcattattcagaaaaaaacagcccaacgtggatgaaactcataacagcatacctccaaacaagaatcttgccagaaaacaaaaatgaagcaagaaaaatgaggagaaaagttactcggtatctaatcctggacggggttatgtacatacatggtttctcaatgccacttctaagatgtgccactaagtaagtttagactattcattggtctaaacttactttattagttttaaattattttttatgtgttggtatgtatataaatatcaatattataaatttaaatgattataatatattaaaaaatagaatataataaataaaaaaatagaaaaattgatagatggtgtaataaaaaagtttgttgtgacataaataaaataagattttgataatgtattttaaaagataaaaaaaagaagttgttgaaagtgttcttagtaatattttataattgttattaaatttaattatgtaaaatttgatacttaattacttcaataataatataataatactggtgttttttttaacatttttcctaaaacatcaaaaaaaaaaaaaa

SEQ ID NO: 12238 - DNA, 789 bp, Cannabis sativa
ccaatccaattacaactgaccgattcaatcctaatcgatccaatgcaatcggatatccaaacataattagatcggatcagatgtaaattttaaaaatccaatcggatcaggtcggttgttggttcggacatccgatccaatggataaccgaccaaaccgatctaattatcatccaatagtcatccaattatatttatatatttttaaaatatatttataattttacatatttaatatattttatatagaaatatatattaattaatttaatatacatttaacacatgagattaaagaaaaaaaatttatatttaaaatattaattctcatattcctaaacgctaataaaattgtcaatacatattgaataaattttattttttaacagttttattatgagattatgagaattagattggactaaactaatgtttattatatatgttagattattaagttttaaattatattttttcatatatatttttctttttaataaaattaaattaaatggtagctaaaatggattggatcaataaatccaatccaatccagtaaaaaatcagtcaatgcatccaatggttgaaccgattcaattcaatacatccattggatcagatcgtatcagataactcaattcaattggattagattggatgacaaaatttaatatccaataaataattggattggatcagttatgtctaaatctattggatgtgatccaataaacacccctaattactaattaataaaatagagttccagtctttccataattggagggat

SEQ ID NO: 12239 - DNA, 648 bp, Cannabis sativa
ctggaaagagaccccctccggatgattgtcgaaaataagaatcctaaggattccctttgacaagcatcaggtgcaaaactccaaaaagcagctaaagcaaaaagatagagagggaaagaagagaaacacagaggacgaaaacaagaatcaccctatgccctaaaagcattatctcgacgaatgagacaactctaaaaaagcaataaaggaaaacagcaagggcacaaataaaagagatcctacgcattactcagcaaactcagtcgagactatttcccaaaaattcaactcaacccagatattctaaacatgctatgcaaacagtaagacgagtataaagtatcctaaaaacttacatgaagtttgagagctgagggctggtgttgatcgttggtacagtgaggactggcaacgacgaaggaaaagtatcaaataatctatggtgtttggaattttttctctgtgaaagctctaagaaaatttggcaaactggcgaaagtaaccaaatgaaatgagaaggctggcttttataggcctgaacgagtgtgaagcaggtgtgatccagcatcatcgtacggtgagaatagcaaccgattcgcattctacagatctaacggttgggggaagcgttcatcaaggcggttggaa

SEQ ID NO: 12240 - DNA, 957 bp, Cannabis sativa
ggggtgagttcgagaaataaagagggtattggtgactccaatcctgaaatgatggatcccaatgctagtcgtaatcaaaatccaccatatcatttaataaatttattatatcatggcctctccttaacaaaggctctccagttacctctgttcaataatcaacctagcttcttttttaatcatcaagttcgttataaaagaaccaagtaaaatacccacttgagaaattgggatagcatctctctcttcccccaagtagaatacatattgtgttgttgggcaaaattcacaaggtatagcattttaatttatcttgcaggttaaacacattcagtaaaacattagtaaaattaaataaaaagaaactaaattagattagaattcaactatattgatattaactaaaactgtaatataccaacaagcctaatggtaaataattagtgtttataattatattatgggttaattaagtaataagtgggattatgatcctactaatctagtttaacataaattttaaattttgatataagtggataaataagcgtaatttataaattacggtgatttatatggtatagtgaatgtaatatgagttactagtgtaataaaaatattttcaagtttgacaaccttggagactcgatcgggggctagaaatatcataacgggtttaattgatagaactggtgggaatatcgtgataagttgataatataagtatttgggtaatttagagtatgtgggatttgacttaacgccataaaagtatagattttttagtgactaagaaataataagataattataaataataaagtttttattaatattattatattattataaatataatattattatattcttatattattgttattattattatataaacgttttaagtatatttataatatacatttttatcagtaaacaaaaaaaaaaaaaaaa

SEQ ID NO: 12241 - DNA, 707 bp, Cannabis sativa
tacctagataattagaccatctccaatagatagtgtaggagtaggtaacatccaatttaattcaattgaaccgaattaatctaattcaatccaattacaaaaaaattgatatccaattacaattggattggatttgatgctaacattggattctaattagattggattggttattaaatgtcaatttcaaaatataattaaaaatcgatccaatccaattacatttatatatgttaaaaaatattaaaaaaatataatattaattataattttattggattttcttttgtgtagaatttgtaacacttgattgttttgtgtatttatttttataatattttgttctcttttattacttagaaatgttgttgttttaattatttgaaacttttagttgcattacattgtaacgatgatatgtttatggagtattaaacttatataaagggtgatattttatttttacgtatttttttcttcatatttttatgttaatattaaaacttaagtgcgtaattagatatccaattaaaaaacggatccaatccaattagtaattggattagattggattggattttgaggtctaattggattggatcggatgaggagaaaaaagttagattggattggatgcccacccttgggatggtgtatattctaggttaaatttaactcaatacataccacaaaactatatttggcca

SEQ ID NO: 12242 - DNA, 536 bp, Cannabis sativa
  modified_base (433)..(437): a, c, t, g, unknown or other
ataactaccaccacactagatcaggaaatactataaccactaaattctatcgagaacctgtcgagaacccatcgataatcagtatacactcatcaaacatgacaactaaaagactaattactactatcgagaacctatcgagaatccatcgacaatatgtcgataatcaaacttacataattaaaagtaattatcatcaaaatgaaatgtatttcaacacataatatataatcaatctaactaaaaaaaaacaaaaacatactttttacatcttgtcgataacctatcgagaattggttgataaataattgagaacatacataaccaccaccaccacactagatcggaaaacgtcataactaccatataaaattgaccataaattaagaaaaaatcatcaaaataaaatgtatttcaacacaaataatatatnnnnnctctaaattaaccacataaaaaaataaaaacaaaaaaaaacaaactttttttaacagcatcttgtccataacctattgagaatctgtcgataaataatc

SEQ ID NO: 12243 - DNA, 601 bp, Cannabis sativa
ggacaataagtttaattagtattattttgaacagctaactaacaactcatgtataaaataaatacataaatcgaaagacataccagaccatagcagagtacgtcctcttctatatgatcatcattaactctaacattccctaatatcagcagcactacttctaattttagtgttatcagaatccccaatcccagcttcatattctacattcacaattaaaaaagcagttggaacaaaaagttcaccttatttcgtagtcgcctctgccttcttcatcacacaaagccattacgagagagtctcgttcaatcttggcgagagtgtcgttccattgtcattcttcactgcatcctcatcaatcttctcttcctcagaatcaaaaaattctaccatatcaatctccaatattgccaccatagacctcgtctttctcaccaaaatagagttagaagttgtgggaaactttcatcactacttaaatctttctcagaactcactttactatttttaacaggcactatttctttaacatttgtagagtgattcaagatgaagacacttatagataccattaaaagtgaatattaccatgcttttggag

SEQ ID NO: 12244 - DNA, 987 bp, Cannabis sativa
taaattcttaatatcatatttataaaatagttagtaattacactgaataataatatttttcaatagctaatgtttaaaatagaagtttttagtaattacactcaatttgtcatgagatttggagaatgtaattacaacctctcaattaactcaaattatacagttatagtgtaattgcatgttacacaaatattataaattgtgtaattacctctatttacacacaaatctaattatatcgtgatttggaagcatccctaagagtgtgttttgaagtaattttataattacacagactaatactaatactgtagtttaaaatacaaggtgtatttagatataaagtggtaattagtgattacatatgaatttttaacatttttttttacaaaataattagtaattacatgggaaaataatattttttattagttaatgtttacaattaaaagtttttagtaattatactcaattttgtagggagccaagagaattggacactgtaattagattcccctcaattactctcaatttacactcatatccaattacatcatgaatttccaaacacgtactaattgtgctcgaatatattaagggtaaaataaaagggaaattataatattatccatacagtatcaaatatcattaattcttgttattggtacaattaaatatcagtatttatcttctttttttttaaagcaatgaacaaatttattaaaaatataataacgtaatacaagactaaaactagctatagatattatatatcttatgttgatcaaataaatattatatgtcccatagctatagatattatatatcttatgttcatcaaacttacaaacaaattaaggacactcttaaaaatttgaacaaacttacaaacacttcaaataataattttaaaatcattagagtgcgaaactctaatagtaaaatcagatctcaaatatatcttacaataataattttgtcttttaa

SEQ ID NO: 12245 - DNA, 594 bp, Cannabis sativa
aaagcgacatcctaactgtcaaagacaagtgctctaagaaacaaaatcccatagagcccacgatctccttcactgaagaagatgttgcttagttcagtttcctgcacaatgacccctagtcattactgtacaaatctagaacatgaccgtggaaagatgtatggttgacggcggagcctcctccgacattcttttcaaataaccatatgaaaagatggggatccaactcactgacctggtgctttataaccaagtgatgtatggcttctttatccaaggcattgcatatattgggtatatcagattacccctcacagttggagaaaatccaactaccataacattaatgacgtagtttgtcaggaataacgttccctcaactttcaacgccatgacaggccaaccgaccctcaacaacctaaaggcgataacatctacctaccacctatgcctcaaatttccatttaggcatggggtggaatgcgtgaggatagtccaacaatctacccatcactgctacaacctggccctgtccatggcaaaaaaagagaagatgcccaccaaaagcccaaaaaatgagcctagcaaggggaa

SEQ ID NO: 12246 - DNA, 703 bp, Cannabis sativa
atgagctagaccgacgagtaagctgataatgaacaaaataagaatctcaaataatacaattagcttaaagcttaatcatctcaagattgaaatcatttgatctaagattaactaagtgatattaaattagaaaatatatagcggtaattttacgatatatttttccagtattaacagtctgatgtaaaacctaaacatccgatccaagtttactttactaattcttgaaaaagacattctacttatccaagtgtaagtaaaccatatcgttgattatcacgttagtttaaatctaacgcactgataaatcatgagacttaaatagtttgaagcatataatcataattattttaatgtgatgacaacactataattgtgaatatctatatgtttgggatttaagataatttatacattaaaaaattaatcatgaaataaatatgtgaaccaaacaataaacaatagtaaaaaataatctctgatcttttattggtagataaataagattacattgaaataagattttatttaaggaataaaacctaacacaaaaacctttcgtgtacttcatgcataaccatattgatttcagtctgactatacatcttagatatggtatggacaaatcccttcggtaaatcttaccatccatcaagacgtaccttagaacttggtactggagtttcccgacaacatttctttt

SEQ ID NO: 12247 - DNA, 592 bp, Cannabis sativa
taaattcttttaagatcgtaaaagttctaaattgcatgtcaactactgtagtcctagcccttgtcctgacccagaccccgaaccctacctcgagcccgaaccccaacttgaatcctagccccaacccaaaaattagcctcggctcttggtctcaacttttaacctggacaccgacctggacacggcccccgaacccctgcaaacccaaaccacggttgtacaagcataccattattgaatgagtaatatatgagaatacatatacattttttctttgggggaaagactttggagtcaatggagcttgtcttatgttatgagaatagtcaactaatattgtttcaaaggtctaaggatatgacttgcttatacttatgtaaatttcaagaaagtactcagtgtcacgcgtaatgcctaaactttttttttttgttttgttttgttatgttttgtgttttttttttcaattacattgtctggcgtacatacattaaatttacacaatatggtgaattcaaggataagttgaaatccattggccaaacacatcacaagaatcttgtttgcttacttggatattgtgatgatggga

SEQ ID NO: 12248 - DNA, 515 bp, Cannabis sativa
ataaaattagagagaaagaaattatggaagaaattaaaagaaaaaaaaattgtagaattattaggctagggtttttgtttggcatatactgaattgtattctctaaatttttcagactgttagaaatttctcttaaactattaagattgttagattcaaaaacttttgtttaactcctccattttttgattgtctatatgctaaatcgtactctcaatttttaatatgtaccaaatcgtgcctccaaactttaaaaagtaccaaattatgtcctccaaacatccattcgtgacaggcgttcgtgaataaaattgaaaaaaaatttttggattcaacaatctcaatagtttagtaaaaagttttaacggcttaaaaagttcgaaaacataatttgatatatatcaagttcggaggtcaaaaatcttaatttgtcaaattattatattatctttaaattacaaatatatataataaaatgatgacttgtgttttgtttttaaaactttactaacaaa

SEQ ID NO: 12249 - DNA, 580 bp, Cannabis sativa
atatatatatatatatattctccattgaatcataaaataagatgtgagaacatataagaataccataaaaaaaacagagcaataacaataaaagaaaaagaaccaaactaacctttacaacttaaatttttggcaatatacacagtcttgacttctcagtttggctcttcggttgtcttcggaggtcgtcttctccgtcaaaggtaatggttgtgcttctttagcgtgtataagacgaaacaagagaaactgttcgtttccctcagctagtaatatcattgttttatgtgtaaaatgatttttcataattaaaacaaataatgtttaaaatcatttaaaaattaataagtattaaaattagggacaatttaatcatactaaaaatttgaattcaataaattaagaaagagggtaccacatgtgtagaatttgtaaataaaaggtactagttgatcattattaaaaacataaggtaccaagtttgtattttcacaaaatataaggtaccaaataagtatttactctttttactgcaagcatacaatgttgttataataaagttttgatactaaaaaggttg

SEQ ID NO: 12250 - DNA, 774 bp, Cannabis sativa
ggattattttattgatgagacttactagtaatccagtatttattagagctttaaaatataggttcatggtccccagatcacctctatacaatattgtacaaggaaagatataatttgtaagatgaattgagaaataattcatttttaagagaagtaattcttgaaggcaatatagtaattttgtaaaaattattattttgtataattatttcaattatgagttgaataattaaaatagaatttaactacttaattttatttgataaaactatattaattagttacatataatattattgctaaatagtattataagagtgaagcttattattttagtagaaaatagtaattatttaatccaagttaaataagaaattaatgagaattaattaattattatttattgtaaataataaatcttattcaaaaaaacaaaattgagaaattaattatgggctctaaaatatggcccacacatgtggggctatagacccacacttgtaggtaaaagataaggcctaatgaattttattttgattattttattaattaaataaattaaaataaaataaagattatcttttaattatttaaattaaatattttattagataagatattaagaattaaagataatataaataaaaagttaactgaatttagttattcgttactgatattatatttgaacttaaattttaaattaaatataatatattctttttattttaaagatttaaaatataaaattatgaattacatatatatatatat

SEQ ID NO: 12251 - DNA, 559 bp, Cannabis sativa
ttgaattgtgcgggaaaaagaggctttgtaaaaatatacggaagttgatctttagaggaaacatggcttgtctaaatcactcattcttgcaccttttgtcaaaccaaatgacaatcaatctctatgtgtttagttctctcatgaaaaatagggttggaagctatgtgttgtgcagccttattgtcatataataaccatgctggacccgtgtgatcaatcttcaattctttgagaactgacaggagccaaaccagctcataagtagtgttggacatagctcgatactcagcctcaacagaagatcgagacacgacatgctgcttcttgcttttccaggatattaaggaatctccaatgaaaatataaaaccctgtagttgaccttctagtgtcaatgcaagccccccaatcagcatcgatatacgctttccactggatttctgaagcagtaggaaagaaaagtccttgtcctgggcaatatttgatgtattgtagaactctttcagcatccttcatgtgtcgagccttaggattaaccaagacctgactcaatttattga

SEQ ID NO: 12252 - DNA, 571 bp, Cannabis sativa
aggaacattttcaagttctgaaatttgcaattttttgaatttgttgagaatcatagggttccatctcaaaactaattggcaatgagtggagtatcccatatttttatatacggatcaattctctaccatttattctatgtgggacaatatccacaatagaatcaaatgatcccttcatgaatcactacaaaagatgatgcgacaacttcatcaacaattacaagaatctcttcaacaaatgttacagtaacattttaagagactttcttggaagtataagaaaaatgaagaattatccaaaaattcaaggaggatgttaatggagatgttggcagcatggaaaaggaggaaagcaaggatccaaaaaaccccatggcgccccaacacaacgcgtcaatgctggaatacaactagcaaccacgagcatcgctcctatggttgaattccacttgaatcagagctcagagtggggattttgttataggagcaagaaggactcacgattctgacatgaaaatgattcaagatgttgagtatgccatgttttgatggcgagaatcctaatgaatgg

SEQ ID NO: 12253 - DNA, 1023 bp, Cannabis sativa
taaagaagattttgtggtgttccataattgaagtagagccataaatcacattaatctattagacttgaactagtatatatcttggagttattttaatcatttctggttttaatactctgttcatccctcttttaatctccgataattgtgtgtgaattattaatcttgttattgtaattgtttgttgattaagttttagttgatttgattctgcacattagctgtaattttcccacaaattagagcttcgtaattgatgaagaatgcagaatcaagattcttttccctacaattcttaaaggaacaattaacgttggaaatgttgagattcgaattggagaagtttgatggaacatgagactttgcactatggagagaaagttgtaaagggatcctagtgcactagaaagtttccaaagtccttggagatgagaagttattggctaagaagaaatcagaacagaaagtagaaatggagaagatgtattattacatgatcatcatgtacctgtccaacagtgtgaggagaaagcttgttgctgaaaagacggctaaagtgatttggaaaaagcttgaagactacatgaagccatcaattgctagcaagattaatttgctagaaaggttatttggttttagaatgatttattctctttctttagatgataatattgacatgtttaatgagattatggtaggattgactaatataaatcaaaaggtttttgaaaaaagccaggccatcatttttttgagatctctcccaattgcatatcaagaagtaaaagctgccaatagcagagatgtgattccattggaggatgttcttgccgcactcaaatcaaaagattttgaattacattttcaaaaagaatccaagaaggaataattgtgttttgcaagagggagatcacccaagaaagtaagttcgaatagtaaacaccatcactctcaatcaagattgaagtccagagagagggaaactcgaaagtgttacttgtttggaaggtccaaacacttgaa

SEQ ID NO: 12254 - DNA, 671 bp, Cannabis sativa
tatacatatgcttattagtgctttaaatggagaagagtggtgggtattgccaccaaaaaaatgtataaacaatttatatagattttttttatgaatccaactaggatatgaatttttggtagttagttagctatatttatctatctatatatttatatcaagctgagtcataagatagtgacgtgatgatatggtgatgacatcaactttaaatgtaatggtgactataagtgagatatgatgatgacagttattttaagattatgtgattagttttctataagtttatggtcttcttttgttttagatcaatattttgtgagtattatttaattttcaagctttcttcactataatatacatttgaagatttttttttgtgtgttttattttgtatataaaaaattgtattttttaaaaaaaaaaaaaattcttgagttctctatatagatttttaaaaaatatatattttaatattatacataaaataaatttaaaattatttgatacaattttattattcaataaatattcacatatataatttaaaatttatataaacagccgcacgcaaagcgtggcctgtttactagttatatatagaatgaaaagtttattttagattatatttttgtgatacatgtataaatatatacattcatatatttttt

SEQ ID NO: 12255 - DNA, 808 bp, Cannabis sativa
agaatgttagattataaaattatagtccaacatacatgttatttaatctagatcctagtaaaatatttctaataggctacccattacatgtgtacgttagaaaatgaaaaggggagcatgaagacaggtcagcttaaaagagtgatgtgacacaagttgttagaagagtaagacaggtcagcttaaaagagtgatgtgacacaagttgtttaaagagtaagagtagtgtgtgagtatggaagagtagtgtgtgagtatggtgtagggtactactatacaccagagtactataataaaaagagtttgtagtgaaggtgtggagagaattgataggaaggaagtttttagtttgcacggattagcaaagcttaaaatatttacttgaacaacacatggtagccacgaagcatcttcattggctgacaaagatccttggttatgattttgacattcaatataggttgaaacaaggtgtctgatgtgttgtctagagtggaccatgaggaatcccatgctgccatatcaacccctatagtacttatcgggattattctcttcagctgggttgtttgaagtttcaagggtgtttagtgcagccctccacctctccttacattccaatgttgctgcaagagtatcacagcaaccatgttggcggccacataggtgtctttaagacattttaatggttggcagatgatatgtattggcccgggatgcgcaaagatgtctagaagtttttggttgaatgtgctacttgccaacaaaacaaatatttagcccaatccccggctgggctgctccaacc

SEQ ID NO: 12256 - DNA, 549 bp, Cannabis sativa
ttgaatgatttgggagaagtgcattatttcttaggggttgaaatctacagagaccatactggtatgtatctcagtcaaagtaaatatatcactgacttactcagtaaggttcaaatggagggagcaaagagttgtccaaatccatctagttctacttcaaaactgagtttacttgatggggaaccatttgacaatatcacactgtacaggagtactttgggagcactccaatatttgagtttaacaagaccagatgtagcatatattactaataaactcagtcaatttctccatgctcccgctgtcaaacactgggaagcttgcaagaaattgcttagatacttaaaaggcaccctacatgaaggattgtggcttaaaccaacagatcatcttcaattacaagggtacaccgatgcagactgggctagctgcatcgatgacaggaggtctacaggaggctatctcatgtattttggcaacaatttggtgtcctggtcagcaaagaagcaacatgttgttgctcgctctagtacggagagtgaatttcga

SEQ ID NO: 12257 - DNA, 515 bp, Cannabis sativa
tagttgaaaaaataactattaattccaactagattgagtaaaaataatgaaatcaatgtcaaataaataatcatgacaaaacaattgtaaaacaacactaaaacaaataaaaaaataaaaggaaaaaaagatttaaaaaaactaacaatcttctgcacagcctcaataccagatgtaatagcagctatatttgtaagcctagtcttgaaaaataagaataaaaaagtactaaacaaaactaaaacaacacaaaaataaatgtaaaacaatgaaacagatataaccacttagaaaaatataaaagaactgcacacctcaaaacccttttgtcagtaaactcgtcaaatgtatttatagaaaaactagaatataaaaaatcacaaaaatagccaaagagaatgaagaaggtatttacagcctcaattttttacacccacgaacagaaccactaaaacaacacgagaacacacagaaaacaaccattaatttttttaagaaagaaataaaaatcctta

SEQ ID NO: 12258 - DNA, 553 bp, Cannabis sativa
agggcataaaacccaacatattgagatataatatgaaatttatttctttgtttcatagatttttaaaaaagtatatataatttattgtaaaacttatgtattgggataaatagtaagtgaagaacaaactaatggagacaatggatctttttttttcatgttcttttttttttctcagatttatatactgaatcttgctattcggctcctcattctcactttcaggtttgtttcttcattttttgtgtatatatatattttgttttctattagtgttatcttgtgtctattatattaagtttttagtatgtgttatgttctttctattttgtattttattatataatatatataatgattgtaattatgtttatgctagaaggagttttttgttgggataaataataaaatttatgtaacatttacatgtataggatgaagattgaagaagatgaagatctcattgagattaaagataaagaagatatagaacttgcaaaagttgctattgatgacactgtgaaagagaagaagaagaaggcattgaagtcca

SEQ ID NO: 12259 - DNA, 526 bp, Cannabis sativa
tatatatataattatttgtatacatgaatcatgatttacataaattattgtttgtacagaggctatcaaaaagttctggagaacataactaaaggtgtaccagacatgcatgaagctattgatgtatgtcatatatattataagaaatttatgtagtagatacttaataggttgttttgatgattctttatctgtttcggtatttagaaaaaaaaattaattctatttttgtatgatcatatatgttgtaattatttaagactacttgtagattctcaaaatattttgaatagtttacagtgttaaaaattaaatttagagtaatttgcagcataaatacttaatttaactctaattataaataaatacttaaatttaatttttggcagtaataatacttagattataattttcagatatttcaagaaacataatgcgtgggatcgaaattttcagtattataaatcttaattttagtattgtaaactactgaaaattttttaaaattttaaaagtggtcttaaat

SEQ ID NO: 12260 - DNA, 604 bp, Cannabis sativa
gttggagataatactgaaatctaaaacctccaagcagcccttggactcatacaaggtcataatagcgctttccaccatgatcaggaggatctccgtggcgctataaaccttgcatttgacgagcggagacgttaatttatagaatggagggatagggaaatggaaactttaaaggctcaacaagcagccattgatgatcgcacaaggcaagccactgtactgataaggagggcctaccaagtcgctaatcaacaaccaactatcacatctagtatccctttttgatagttcggaagggtatgcagctgggcataccgcacaaactcacaatggtcagccgtccgatccacgatcacaggtccaacctgttggccaaacggtagacggccagatcctgcctgaccgtcccttgggtggagttacacacaacaacttcaccccaactgaaatctctggccaacctatcggccaaacaaatcagacgacaataccacctagtacttcagtatttgacaggttgggcgccgcacatgacctcaggactgatttaaacaaaagaagaggcttgccaaacaatacgtcccaccatctgtccagccaggca

SEQ ID NO: 12261 - DNA, 568 bp, Cannabis sativa
taaaacatcattttatttactattaaacattaatgagttgtttaaatacacaatcttaataaaaatgatcattaatgaaagtcatttttttttaaagaaaaattaatgtagtcacattactataagacatcaaagtgcctaacacttttatgtcatgacgttttataattagttagcagttctctataatatgtattaaattaaaataagtgaaattcgattttgaattgcaccaatagtaatattgcgtacatcataagagtactataagttccctttggcatttctctaatttttacaattgaacttccatacacaataaaaagtgggttgttatagaacacaagtgcctatcatctttatgacatgacgttttgtaattgattaacaattctctagagtctttattaaattaaaataagtgagaactaatatttaattgcaccaatagcgatattacacctcataaaggtgctaagcaccataaatgcccttatcatctctcaaattaacaacatttagagtaccctactcactcacatgggctacctcataataagtttttctt

SEQ ID NO: 12262 - DNA, 509 bp, Cannabis sativa
tgtttttggtacctaggaagtgttgtttcttttttgaaaggatctatttccccattttttatgaagataaagaagatacaaaagtcagattattgatctgatacttaaaaggtgcctagattgacaaattgtcaaacttgggccctggggtgctcggggccctgatgctcaaaaataaactagctccaattatgattctaatgccttaaatatgttcgtggtatatctagttgatgtcccaatacaagttttgacccatttgcgctaagacagtcccaaaaactaaaatcctagttgtgaatgtcaacatgggcactaggtgaaaccctaggtgcccaagttggctcccaggttgcaggttcgtgtaatttttgcatgtttgggtttagggttcggatttgggtttagggtccatgttcgggtctagtgtcggtgtttggggtcggggccggtgttcaatgtttagggttcgggtttggggttcgggtctgagttcgagtttaggttcg

SEQ ID NO: 12263 - DNA, 585 bp, Cannabis sativa
tttgtggtataaatacattagttttactttcggttggagatatttatatgtatatttaattatttatatgtatatttaattatttatagtaataatacttaagttatatttttgtaactttcgtagatacatgaccatttagtatcaagtgaatgaccatgtagtaatccttgattggttgatgtcattcaatttttattttttatttgaaaattaatataaatatactaattataagaaataaaggacgccgatagattgacacttaataattaggtatttataaaagttctatatatataatttaattattattaccgtcaaaaattaaatttaaatatttattcacaattaaaaattaaaataaataattttttgttattcccaatataagttatgtgaggagagtcacatgactcagcttaaatatttttaaaaaattaaaattttgtatctaaaattttaaatattttacttttgtcccaaaaaattagattacttaattattattatttttttttaaggcaattacttaattatttttatcatcgcatatttttatatttttgtccttacaaaatttat

SEQ ID NO: 12264 - DNA, 521 bp, Cannabis sativa
tgattatgtgtaattacagtacttcaagtaatgtgaattaatggtaattaattatttcttttatatttgtttacttatattattaaaattaagaaatatagaatttgattaaataagagataaaagcaaaggaatgttttttccactaattttataagaaatgtcattaagggtaatgaattttatttatttttaatttattttttaatattaaatacataatgacatttttttttctttaaaatatgccttacaaaataattaccatgtactatagtttaactcaaaagggcaatttagtcaatttaagttttttgattgcgttttctaataaagtaaataagataaatcgctattattctatttctaaaaaaatttaataaacaacatattataaatattgattctgattatttttcatttatttaattacatttctccattaatttattctaattctgaatactgtatagtaaacgtgtcattatatcaaaaatctgtttgtaaaaaagaaataaatt

SEQ ID NO: 12265 - DNA, 603 bp, Cannabis sativa
agatgtcaatgttgaaagtaaattattacctcccattctctgaaataggttggttgtctgcaattgtcttcagaccatcatgctttccgaattcagaagcatcaataaatccctataaaccaataaggcaagcacaacaggaatcttacaatttgtacaaaaagaaaaaagaatagtccacagaaattattaagctacatctttagggaaaaaaaatagttataactaggaagtaataaaatacgaaacagaagataaagatagttctgtgtaaatctgtaaattttgaaaagaactgaaattttcttacaccagattcatctggcatccacccaggaattttttctgaaagaagtgagatataacgctccatagccgtctctggagtcatttcagcaagctgttgccaagcgttccttgcaaaatttgaccaatttcgtcaatcacttaatcaggcaaaggcccccataacttctctcattaaaaagtactaaagctgttatgtaaaactagaaggacaatgcatttgtgatttgagactgaacagcataatttaatcttatagcacttcaagaatccgttccttaaatccttcatagcata

SEQ ID NO: 12266 - DNA, 1469 bp, Cannabis sativa
actttggtgcttgtggatggtcccaaactgtttagactgcaagacaagaaacgaaacatcaactccttgaataattaaaatagaaagaaggtggtgagttaatctcccacttaagagtttttatcataatcatcagacgaggaagaagagctataatagttgctaaatttcctagaaccagtattcatgaaaaggtcgaaagaatgaagtggagacaagtcccaatctgaacatccgaccctatcaaaattagtgtcgtattgactagcaatcccaaaataagaattgttacagcttaacagaacgtggtgttcaggttaccaactatcaaacctatgagaagtgaggtctacacagttcaagatatagaagttatattggttatctctagattgaactaatgatgtttgctcagccctaataggggtgttcattggatcacatctaatgaatttggacccaatcgatccaatccaactacttattagatattagattttgtcattcgatccaatccaattgaattgagtcatttgatctgatctgatctaatggatgtattggattggatcggttcaaaccattagatgcattaactagttttctattggatcagaatggatccatccaatcaattttaactaccagttaagttgatttcattaaaatatatatatatatatataatataatttaaaacctaataatccaacatacataataaatactagtttagtccaaactaattcgcatgatcccataataaaactaccaaaaaataaaacttattcaatatgcattgataattttattagcgtttaggaagatgagaattaatattttagatctaaggttttttttatttaatctcatgtgttaaatatatattaaatcaattaatatattttttaaataagaattattaaatatataaaattataaatgtattttaaaaatttataaatataattggatgaccattggatgataattggatcagtttagtttgattatccattggatcagatgtcccatccaacaactaatacgatctgattggattttgaaatttacacctgatcctatccaattatgattggatatctgattctattagatcggttgggattggatcggtcggttttaattggattgaatggctttctacacacccttacttgtagatatggactttgaaaatcttttatccagcccttcaagttccaacaagaaaagcaaaaaatgacctgctgcgtcggaggctgcctctgggtcgaacccaaaacccttgaaaagagtaaaaaagtttgccaacaagaaacctgcctcgacccaacttacaattgagcaagagaagacccatgtgtcttcctcagcacctgctgctgcgagcactggtgaataggttttagggtttgttcatcaggtcaaattctcgggatctcaacccgagatggtgctcttagatc

SEQ ID NO: 12267 - DNA, 672 bp, Cannabis sativa
tcttcaattaatttaacaaatgtgactttagtaccacttgttaagatttataaaactcaagaaatatatatcacagatctaaacatatccgtaaaagtgttttaatatagaaaaccctaaatcataaattgatagaacctttgctaaattaaagaagatgatgatgataaaagatgagcgaaagcactaacctgaagccattgttagagattgcacagaaggttatgatccttcaagaatacactatttcttaaagtattttctctggtggggaaggagagaatacaaaaaatctagtgtttcttaggaatcactaccaaggctcattatataatgagtttcgagtatttataatttgacccctcaacaaattattaattaattaatggtatctatctacacatatattttcaaatttaatacacttttgatacccataatataatttggcacttaattttgtatcacactttatagtagcatatacattatacatacatatgtaccacaatagaatttgaatccaacaatagattcattttcaaatggaatcaaaaaaacccaatgtgaaaagtaatttgtaaggatttttattgttatttaacaaaatataaagttcgatatcagtaacttttacatagcaagaaaacctaaaatagtattgggatattt

SEQ ID NO: 12268 - DNA, 542 bp, Cannabis sativa
tcataacttttgggaacccctttttaaaatttaaaactgtaatcaaaagaaattttatcaaaagtgatgcccatcgtctatataatagaagcccatgtcgtcatgagaccgaacactctatgcctaaccatcagcatatgtacaatcatcctcaagctctggactcactgattcttaacctttgactttcgtttacctacacatgcatacatatctatgagtcgacactcagtaagaaaagcacaaaatatacaaaacatactatcgactggcatctaggcgcccatacacctatatacaagtattaacatatgatcaagaatattcttaatgaaagtatgacctctataccacatgcactaagtactcatcttgtactagtgctgttaggactgaatcgcacctccagtaaaactcagtcttgtaacacaggcgctttgtactcatccagtactgctattagtaacgatgtatcatccccttaacaatatatattgtaccaatgtgttccgtaccataactgtactagtgattatagtatc

SEQ ID NO: 12269 - DNA, 1011 bp, Cannabis sativa
caggtagtggggcttccgtgatccatctgacacacgaaactgggtccttatcctccgaacctgagaggaccccactttgcttccgaacgagctttgtcaaagcaaagattttttcttctaacatttttgtgtcactatctcgaaagttgcatctgcgagccttaccgtttaagtggttccttaggtcgtttttatgtggcctcaccttctctcctttagccttttcatatttggcgtcaatgcgccttcaaaggtttacagtggaccaactgttgttaacgcagatttttgttaactaaatatataaaccttttatgtaataaatatactacatagttaataataagaataaatgaacaccagatattttacatgatgttgtagttaaaatctacatactccacgagtccatcttactatgaatgattaatcttgatacaaagtataagttctctctttcaatctaatagataattttttctctcaaatttgtcgtcccttttatcttggattctgtcccaatttataggtgtatagggtgacagttattttttcttgggatctaatcatttataactgctcatgaaacgtggacattctccacgttttattttcatgcacataagataatatttaataaccaccaaccactctcttgtctttatccttgaacggttatgctgactatgaaggttgtttctcgctgtttgagttgtccttatttaccgtctttatatgaaaagggctaagtattggtatactgctccttgtagtcttcttttgccatgatggtattagtgaggtagttacttcaacatatagagggtgagctagatgaatttagttattctctccatgcgcaaatatgtggattaataagttacaagctcttactcccaagtatgtgggtcaataagttgcaagctctttgttatcttgtcttgaccgcttctattatatactttgtctatcccaagatggacatattatctcgtcagttgtacctgttaa

SEQ ID NO: 12270 - DNA, 745 bp, Cannabis sativa
atcagggtaaccatcttttaactcatacatatttttttagctttattgacaatgttattgatcctatgccaaaggataaattgaattagttatggtcattttgtggtgtatatggttcaagagaaataaaatagtgcataatagcatttatttgcctcttgacttagtggtgaaattgactcgtgaatttctttggaacttccaacataggactgggccttttctctctctgggataggcagtctctttgccttttgatgagattatttcgaaatggtctccttcggttggctagttctatcaaggtcaatagagatgttgctattaataaaattggtgcttgtagtggccttgccttggtatggtggtgtatgattatttgagtatcgttcttgtttatgctatttggcgcgtgaaaggttgccttgatattaatggttttaaagatgtttattttttacattgtcttagagattttaatacttgcctacactttagttaaagtcgctcttacggtgttctctaacactgtttggtggtcgagttctctaagttattttaagaacttattaggatgctactcaataatgcattttcgtctcctctttcgttattatttttgatgtgatggttgagatttttaagaaaaaaataaaaaatagaagaataaattataagtgtttatataattaatttatgatgatataagtagatgaataaatatacatttatattatacatatac

SEQ ID NO: 12271 - DNA, 581 bp, Cannabis sativa
tggacgtgctgagagaaagcacatacatatagtagaaatgggactaactctcttagctcaagcaagtttacctctcaagtattaggtggatgcctttcaaaatgttgtctatctcattaatagactgcctacacctattttgagtggcaaaacaccttttgagattgttcattctaaaaaaccagattacaaattcttaaaagtttttggggtagcatgctttccatgtcttaggccatatcagaatcataagttctaatttcactctaccaagtgtgtcaaccttggctataatgagtgttacaaaggctataagtgcctaagttcaacagggagactatatatctcaagggatgttatctttaatgacgaagagttctcatgcaaaactggtttcttaaacactcaccaaaaagagtcaacaattgaagttcaaaccccttatacctggacttatctacatgttttccgactagaaaatgagtcaccgaccactagaaataccgtcactcagtgtcaaaacactgctcaactagaaactcactctcaaactgatacaaatcatgacacaagtgaacctg

SEQ ID NO: 12272 - DNA, 596 bp, Cannabis sativa
tgtccaactgttcaaaacccccttagatggcagagagtaggcttttattgtcggaagatggcgtcgtttctatccctttggtctgcttgtcttgggccttcgggtgacctcctttgcatgaggggaaagtcttttgaagctaacttatgttatgtttttatttggtttaatttttgttatttgtttagttttgtcggggttgaattccctatgtcttttgtggtgttggctttaggccctttttggggggttgtctccttcgatgctcctacgtgagccatgagcttaatgctcctttcgatatcagcgtgattggccgacatttgagtcatctcctagtgagatttgtgcagttcctctgccagacttatacagcttcgatttttgcttaacctcaaataaagttctcgtgtcaaaaaaaacaaaattattcctctctctatgtctttctagtctgcttaatagtagcttttgattattattttcttcctctgtccacaaaacagaagcaagattctccatcaaggtctttccaactctctacatccaatgaatatttagaatattttcagtctgccgtatttcttgcctatgat

SEQ ID NO: 12273 - DNA, 1033 bp, Cannabis sativa
acttatttctccccatagaactaggcaatcccaagtataaactcccttcaatggccgtggtcatccccaacaatgcatttactctaactttcatagtatccaaagtgttagcactatagaagatagaggacttagagaagttaaccttttgacccgaggcaagttcgaatttggatagcacttcttgaatccgacgagcctccatttcagtggccttgcagtataagtagctatcatctgcaaagagcatatgtgacacccttggagcaccattggccactttacatccatgaagccaccctcgttgttcatattttcgcagtaaagctgtgaaaccttcagcacagagaataaaaagatacggcgaaagtggatcaccctgtcgtatacctcttgtgggaatgattggaccaacttcattgttgttatgcataacactgcatttggccgatttcacacacatcataaccagctcaatccatctctccacaaagcctagtttccggagcattgcctcaagaaaatcccattcaatgcggtcatatgctttactcatgtctaactttaacgccataaagccttcttttcctttgcgcttccttttaagatagtgtaatatttcaaaagaaacaagaatgttgtcagagatcaatctacctgggataaaggcactttgatttcagatataatggaatccatgaaaggcttcattctgttaaccatgacttttgttatgatcttgaacaagacattacataaggcaataggacgaagattagacatacgttcaggatttctcgtttttggaataaggacgacattcgcatcaccacaactatccgctaaggttcccttgtcaaaaaaacagcgaacatttttcacaacttcattccccactatcggccaacacttttgaaagaaagcaggtgtcatcccgtcaggtcccgggcttttatcagggtgcatctgaaagactgcttttcgaaatgataactccactaaaattgtagaaatagataaaagattaaaataa

SEQ ID NO: 12274 - DNA, 657 bp, Cannabis sativa
aatcatttattaaattaaaatttacaaaatttcatattgaaatacactaataacagtatgctaccttttgtggtgtttgacaccttaaaatatcccataacattttcgtaattaatacgtacatatttttattatgttcgattagaattttaattttttttcattattatatataagtttgcaagaacatttctaatgtgatatgtaaaaattgtgttatattttgtgaaaagaaaaactttgtgatatatttacatcaatttttagtattatactttaatgcacaattgtaaaatttaatgtaattttttttgttatgaatatgattgttaattatttttacaatttttttcgtatattttttttacaacaacttctgtggatttttttatgtaaaatattttttttctgaattatctttttttattattcttaatagagtattattagttggcatcttaagatgtctaatattatacagatatgacacttaataattagttagcagtttctcatattattcaccaaattaaaatttgtgagacccaatattgaaatgcaccaataatggtataccaccatttatgatgtttagcactttccttggcattattcttatcatctctaatggaaggtgtataatttgagctaaaaaaa

SEQ ID NO: 12275 - DNA, 546 bp, Cannabis sativa
gttgtttttgtgttgttaattagtcccacgttatatatttaagttgtttttgtgttgttaattagttgtttttgcataactattgcattgagaaaagaaaaccctacacgcccaagctcactttgtccaaactgccatgtggcagtcgtagagtcattgccacattctgacgctgtagttctgacgcacgtcagtaaaaaactttactctccccactcgcgtgtaagtctcactctcctatcatattcacatgtgtatctcactctctccttttacacttcgtatccattgtattttttgtaataaagaaactttataagtattatttttgtaattagtaaaagtataaatgtttatttttcctaaggatggtacaaatgtttattttgagtaattttaacttaaaatagaaaaaatcccaataaaaattgaatttggtaactccatttcattttttgtttttaaaattaagatataaaatggagtaagttttaaaaatagatttttgataatttaaaaaaatacttttttcatttttgcttctct

SEQ ID NO: 12276 - DNA, 523 bp, Cannabis sativa
ccaaccacagtaataacaatcgtaacaaacaagcgtccaataaactacggggccaataaaaatttgagaatcccctagacctgaacacggccaaggttagtcatgctactagcacaaatatgctttgagccaattgaaatttcctcaatgtcccaaaaagaaataagacttaaattcactgccatcaataaataaagtcttgcgtactaccatataacaataacaaggtggtatagcaacatcttattaaaaataaaagaaaacataaaaataaaaacaaaatatatagcaaataaaaataacatagtaagaggattaacactactgaggatctaatccagagccaatgagcaacttaaacctccgagaaacatctctatagaaagaagacgaagaagaaagagcactcgaaaatagtgtgggaatcaataagaccccccggagctatgttgtggtgtaaaaatagccaacgagccttctttaagcaaaaaaaaaaaaaccaaggctaaaaacttttggaaga

SEQ ID NO: 12277 - DNA, 626 bp, Cannabis sativa
gaggcgaaattgaggccattctggggtagtaacaaccatatcaatgtaattagtgccataagccttgatctccacttcttccttatttctccaaagaacagcaatccctccactatgtccctggcttcccacagtgaaagaaccctcaaaaccaatagcaaatctcagtcgttcaactttttccttttgacaaaatgtttcacaaagaaaaacaaaattgggtttcttttggataataatatccttaaggaattgaaaggtccacggggtcccaagcccacggcaattccagcttaaaacactcataatccttggcgggtccgtgattcggagcccgccccaatcgagtttttttgcccgttgttaagcattgggtctgagttacccacatcttcatcatctgatacaaggcccacttcactttcaatgcacattgctacactctggcccagttctgagtcagaccttctttttttagactcaacaataatctttcctttctttgacagtggctgattgtttgccaattcatcaatcacgtgctggagggagttattaagttgactaaccccattatcaataggggtatcatccacgtgattcttcccacgatccacggccatttg

SEQ ID NO: 12278 - DNA, 546 bp, Cannabis sativa
ctcaatttttaattttgagcggttaaaaataataccaaccaagccaatcaacccgaactaaattaaccaacccgattacgagagttttatatatattttattatatatatttatatatcatactatttacatacatacacattttaaaatcaatttatatatatatatatttgttttattatcacaattaattaaaatataataattgaatgtaaaaaaatagaacattaattgtcggtttgggtggattaacccgatcaaaccgaccaatttcattggacaggttactaattacttttttcttgattggacgggttgcacttatatttttgtaactcaatttttacattagattgaataatatgtaacataaaccgaccaaactattccacatacactcttaatttatatgtacatgaaattaaacttaattatttgcaccgaggaaaaaaaatattatttattctaaacaaaatccatgcttggacacatatcaactaagattagacactaattaaaaacattaaagaagaaaattatatcaca

SEQ ID NO: 12279 - DNA, 563 bp, Cannabis sativa
tggctcataacataatgatttttcaggatctcttgaagggctataccagaaagaatgtttcagccagatgcattatgaaaattgatctcagtaaggcttatgatacggtcgactggaattttgtggaagatcttcttagggtgctctgctttccttctcgttttatcaactggatcatgacttgcttgaaaggcactagctatcatctgcttcttaatggaagaattcagggttcctttaaagggaagaaaggcctccgccaaggtgacccgatgtcgccgcttctgtttgtcctagttatggaataccttactaggttgctgagctcctattctagtaaaaagggtttcgggtttcaccctctgtgcaaacatcttcgtttgaccaatctgtgttttgcggatgatcttgttatcttctgcaagggtaatatcaactcggtgaggttaatcattgaagctttctctaagttttgtaatgacacaggtctgtctgctaactcctctaaatcccaaattttctttggaggagtgcgggacgatataaaagctgtgattctggat

SEQ ID NO: 12280 - DNA, 723 bp, Cannabis sativa
tataactagataaaaaggcatgtcattgattaggaacatacaagcttcgtaaccaacatgggactttattgctataaagtcatgccatttgggttgaaaaacgttggggcaacatatcagcgacttgtgaatgaaatgtttgctagacaagttggaagaaacatggaagtctacgttgatgatatgttggtgaagtcaataaagagtggagatcatactacagacctcgcggagtgcttcgagatattaagaaagtacaatatgaagcttaacctgaaaaagtgttcctttggagtctccttaggaaattttctgggattcatagtcaacgtgaggggcatcgaagtaaacactgaaaaaatcaaggctttgatagatatgtcatcaccaaccaaaccaaaggaagttcagggcataacaggaagaatggcagcacttaacagattcatttctaagtcacctgataagtgcctaccgttttcaatgtattgcgaggcaataaaaaaattgaatggacaaaagagtgcgaggaggcctttaagactgaagagcataaaaaggcatttgttgacacctctagttttggcaaaaccagtaactggagagacattactcctctacttggctgtctcgaaaaatgtgattagtgctgcaatagtgcgagaagagggaaagcaccagcaacactttcactatgttagtaagaggttattaggggcagaa

SEQ ID NO: 12281 - DNA, 546 bp, Cannabis sativa
ggatgatagaatagggggaaatagcatcactctgaatgacatagtggattctaataattggttaacgcatgctaatgttgtgagactcacaaagacgggatcccattacacttggaccaacaaccaggagaataacagtagaatttatttgaagattgatcatgcttttgtgaatgaggactgggttgatattatgccagatgctaaagctcattttgatttggaattaatgtctgatcattgctcttgtgttatctctatagtggtttctgagaggattggtattaaaccttttaaattttttaacttctggactgaacatcgagattttaaaaaggtggttttggagagttggtgtatgcctctaaggagcatgggattaaaggctatctatttcaaactcatgagggttaagcataggctcaaagactttaacaggaacactataggagatattggaagaaattatcaagaagccaaagagggttacttaacagctagaagggaagctcaatctaacctgatggacatagtgattcaaagaca

SEQ ID NO: 12282 - DNA, 531 bp, Cannabis sativa
taaaagacaagcttgtcgaatactgaaacatatttttctgtcttctctaaaattaagtaaagtatttgttcttttatatgtccagcatttgtttttgaaggaacagcacgatcatataataatgttatgagtttctataatgaacagtgtaaaataccttataaacaaattattttacagtagttaatatggtactaatataattatttttaatttaattttttaaaagaacatatatatatttattttaattttttaaaagcaattaataaaaataaatataaaaataaaattaaatatattatttttaatgaacaattttattaataacaataaattaaaatgggattaaaattaggaaaacgaatcaaataatcaatcttattattcccaaattgtttgaaaaaaaaaaaaaaaaaactaaaaataaaattaaatgaaaaagattgcagcatcatagttaattttataagaaatgtatatttagtttcatctactgctatacagcaatagagactgttcattcaatct

SEQ ID NO: 12283 - DNA, 571 bp, Cannabis sativa
tagatggatttctatttcattacacattagcaatatgcctctaattaattctaatatatctttttcacgtttgggcttaaaaagtataggtataataaacgatctgccaaattgcaaaatttaagagtgtgtacatggtcttacatggagagtaaatgcggagactgtagaagcttttaattgctctaagtgtgtgatttaaggtgcatggagttttatctcaagaccaattagctatgagagaaatagctgatacatcttatatatggtattatcttatatatggtattatatttttacaccctagcaatgtgtaacatccccccaagattgtgactagtatttgctcactaatcttggacaactcgatcacaagtggcactattgactcacaatggaacacaaatggctatttttttggctcgtcattttggaccggcggtactttgggctcacaacggatcacaatgggctcttttatggctcatatttttggatcggcgacacttttggctccctatttcctaatcacaagcggctctttggctcatctttttagaccatcgatact

SEQ ID NO: 12284 - DNA, 793 bp, Cannabis sativa
tttttttttttgtaaacaacaaataataattttttctttgagaaaacttcaagctaatttgtcttttgattctacaactgtaaggtatgtatggtatagaatagccaatattaattaatttgatatctgaatatatatctagctttattaattataatataaacaaacaactatcatatcagccaacttttaaagagagatatttatggctttactcttcaagcgcagaaatatttatgtacgtattcgatgcttttcaagtaacatttaggtgagattatagccacataatgattttcgcacaattatttatttatttttgagactttctagtgctgcgttatagctccaacttgtctaccctatctatgtgtatgtatagataagttaggccgccataatagtaatacttatatatttaattagaattaattagttttggttaagaaaagaaaagagctaattagtttttttctgttattagaattaattagtttttttgtctgttattagaattaattagttttgtttaagaaaaaaaagaattaattagtttttttgtctgttattagaattaatttatttttggttaagaaaaaaaaagaattaattagttttttttctgctattagaattaattagtttgtttctccgggttattatgtaaatatatataactttatactaattaacccttttaccgtgcatttccaaaaaaaaaaaaaaaaacaacctttcaccttgtgttaacgggaaataaaatatgttttctgcttgaataactttgaattgg

SEQ ID NO: 12285 - DNA, 517 bp, Cannabis sativa
cagtaaaaaagtcaacaagctgcatcgatgaaggaacaaacggcaaagtaatggtgtccaattttagatggtgacgagtaaaatgacaatcaatctcaatatacttggtgtgtttatgaaaaattgaattgtgagcaatctgaatgacgctttgattgtcacaatacatagaagtaggacaagagtgagtgtactcgtatctacaagtaaccatctcaaccaaacaatttagtagtagacgtcatgacacgatactcagcttccgtagaagattgagaaacaacatactacttcttgctcttccaaaaaataagggaatctcccaaaaagatatagaaatcagtgatagattttcagtctgtgggatcacgaccatgatctgcatcacagtaagctcgtaactctagagaggaggtggaaggcagtagtatgctctgaaagatggtaccccgaagataccgtggaatgcgaagaacaacagcccaatcaacattatagtaggagaagcaaaaatttg

SEQ ID NO: 12286 - DNA, 645 bp, Cannabis sativa
ctagatgacgaaataaataggaggtgcattggtacaatcattttaaggaggtacattgtaaaagtatctaaatttaaaatatattaaaaaaattttaatttttcccattttccattttaacttctattttaaaataaaaaagtcattttattaaaatgatattttcatactttaaaatgtaattaaacaaataaataaaagaaaagtttattcattttcatttctttctatttcattatttctaatcaaacacgcacttaagattaatgttaaaggacatcaatagtgtttaacactactacaaattgcgatattaatatagatgtaattaaatattaaatcttattattttaacttaataactattataaaatattactaactattcattattcattaagtatcatctcataatagtgtaggacattacattagtacttaatagtgatgctctaatcttaactcgtgcaatgtgctgtttgaattttatttgttagcaccataaaatatttgaaatttcacaaatcactattaaaaatcaagatattagggcatgttgtaatagtacaacttaagatgagctagcaaacattccccataataaattcacctcacatttttaccacataactttaagatatttga

SEQ ID NO: 12287 - DNA, 557 bp, Cannabis sativa
aattaattagttacctatttataaatttttttaattttacatcatataatttgaaatacattttagttacctctaaaacatgtttgtattaattaattagttatttttaaattatgttatggtagattataatttaaaatacatttagataattttaaaaattattttcgatactaataagtcaccatgtaatataataagatactatttttatatactaattattttatattttttgttattttgaaaactagttatcgtataatataatataattcaattgacaaaattttaaaatgaatattaactaaaaaaagtataatacagtaaataattactaataactaaatagttttatttttttgaaatagtaaaaaaaatatatgctttctacatcttgaaatgtttacatcgaagagtagatcacaatgacatctttttaggctcatctaagtaacgacgtgatcaaaaattattttaaaagtttgagggaagagagagaaataagaaagagagaaagggtataaatgagggtattaaaacatacccaaacaaat

SEQ ID NO: 12288 - DNA, 887 bp, Cannabis sativa
tcaagtggtggtgatggttcaaaactaaagttgagggtatatattttttttgatgtgagtgataaaaagtaaattaaatattaaagataaaaatatatttttgttagaatttaaaaccttaacttctataatataagtaaaataatttttcaatcatgtcaaagttaatattatagaaatatgttgacaactatcattttttattatacattaattaaatataattataaaataattttaattaatacttaccttttttataattaaagtactaaatataaattcacataacttattaaaatttttaacgcacataattgataattgagatataacctataaaattaggtataaattaaagaataataaaaaatataaaaattttaataaaaaataaaaaataaataaattaagtgtaatttccttaatattatatttatatttattatctttaattacataaccaactaaaatatatatataaatatatatttgcattatatttaacccaatgtcctaatcttaaatgttcaacacacagatacaaaccaatatataaacatgatttcagacatatgctttgaccaaactaagaaaacaacataacaataataatttattactaaatcaaaaacacgataagataatagctatctagtacctagtcaataaatcagtaacatcttagtcaacaattacttgtgctttggaaataattacagtaactaaccgaatttcaacaagtaacatgataccattttattaggaacttaaacattagtgactagatactacacaagaaaaattaataagaatactaaaataaaaaataaataaataaaaaattactactaaattaaagtaacgataacaacttattagttttc

SEQ ID NO: 12289 - DNA, 642 bp, Cannabis sativa
aaaaaaaaaaaaaaactacaatatgcaatgttgttataaaactgctttgcctaactaatgccatgacatttaagtgtcaatgtttgattagtcacggtcagctcacaactcactgttatagttaattaaagtttcttgtgatgtccttgttccttgtacataaaaggacatgtgacttagttcatgtaagttgtcatatattgacacaattaccattttcaataacagagcttagactcaattcagaattgtattctgtgttcgattatgtgcgtgtgtgcgtatcatctcataattctattcttgagtgtgcaatgttgctgaaccgatagggacttatctattgcaaggtcacactgtaaaatatgaggtgaatgcggcaatcaaacaaacaaggaatccaactttaatctggcacagaagactttctcacatacgtaatggaggaatgtaagtgctcaaaaaaaggaatctttggataggatcaaatccaagaggtggagttctgtgagcaatgtgtccttggaaaatctacaagagtcaagtttggaaagggtcttcatgtgtcaaaggctattttggagtacatccattcagacttatagggcccttcaagaattgaatctagaggtggagctaggt

SEQ ID NO: 12290 - DNA, 576 bp, Cannabis sativa
tcaaaattatagagagaaaaaggactttgatttttctctcatctgttcttgctcatgtgttgagaactcaacaaaaacaaatctataaactttattctaatagcccacagtattcctttgtgtgtagtggaacgatttggaagacactggtgtgagtctaattgcatcatcttcattatttggataatgaatacaacatacgagaagtttcaagaatatcttgatagtcttcaagaggtatattctaaacttgttaaatttatgttttgatttaatgtacacaaatctggagatctattgtgatatggtacaatgacaatcaaataatacgaaactattccactgcatacgtgatttagtaccataaaactaataatcttaacaaaataaaatcacgttaatcaacagtttaaataatcaatttaaaaatattaacacaagtaaatgagcatatttataagataaacatggacttatcaaattctctcacacttgactcttgcttatcctcgagtaagttaatgttaaaattaaatgagtccttacatattggtctttatgaataaaataatcttg

SEQ ID NO: 12291 - DNA, 811 bp, Cannabis sativa
attaagatagtatcagataacagatttcagttcgatggtgaattattcactgagttctgtaaaaggaacaagattatcaaaagcttctcgtcagtctccacgcctcaggcgaatgggcaagtagaagctgtaaataagaccttgaaagatactatcaaaaagaaattagacgctgccaaaggtagatgggtcgatgaattacctcaagtactttgggctcataggacaaatgagaagacagcaacgggacatactccattctcgctagcatttggctcggaggcaatggtaccagcagaagtaaatattgtgactcacagacgagagttttataatcaataagaaaaccaaaagctcttaaaattatccttagatctacttgatgaaaaacgtactgagtcgcaaattactgttgttggaggaatttagacgacaccaaaataaataatattttaaaaatataaacagaaaatgtgcgagtactcaacctagagcggcgagtattcaagctatggatgtacagacgtactaagttgagtacttgcacattttctgtttatatttttaatatattatttattttggtgttgtctaaattcctccaacaacatttggtgtcgtttgtgggaaagaaattttctgttgatttcggaggaaaatcatcatggctggaaaccagacgaatggagataacaacactggatcaatcaatgttggaatgatgaatattctactcacaagtaatggaatggcacctgtcaacaccatcaacgcaggagtgggacaaacaaccattactcctctcaactta

SEQ ID NO: 12292 - DNA, 511 bp, Cannabis sativa
aaagtaagtgagaagatgagagatagttgatgtacatggttttcacttttgaaataatacaaattgttaatttaacaaaaaaaattatttcaaattgtaatacatgtataaatataatatttactcaacaataattttattgtgatatagtattaatgattatttattgttattgttgttatatatttgatactttggatgttttaattttttttttctaatttacttctatttagttataacatctcaaatataatataattattttcttggtactaaatttatttttagatagatgttctactatttatatatgtatatatatatatataaatgtaagcttataggtacttgatggtatccaaatatgagctaacatatatttctatacaaaataatatcgaaattctgtattttataattataaatttattatttaatcattcaattaattaaatgcacaataataaatttagaataacctactacaagaaaattcacttatgttgat

SEQ ID NO: 12293 - DNA, 666 bp, Cannabis sativa
aatttttaaaaaatattattaactaatagtaaaatacggcatcttaaaagtatttggacactgaatgccacgtctatcaataatcatcaatattgataagaaatatgatagttataaataagaaattaattgatcacgtgactattaatgcatctcgtaaacatgcatggtgactaaattatataataattagaaattaattataattagtgtaacaaatgatgcatcataaatgtgcatgtgactaaattataaaataatattattataaattagaaattgattgataagtgtgacaattaatgcatctcgtaaacatgcatatggtgactaattaaattatataataattagaaattaattaattagtgtcacaaataatgcatctcgtaaatgtgcatgtcactgaatttatatatatatacatatttatataaatagaaattgttaaaagatattagttataataaaatttgtgattaaaagtaaaaaagttatttaattataaaaaaatattttctttagtaggctttttagatccaaaatttacatttttatcttagtatgaaaaaataaacaaaaaaggaaagaaaaaactttttttttttcaaaaatacggactgataaaagggtacaatcgttaagcaaaaatcgtacaagattgat

SEQ ID NO: 12294 - DNA, 814 bp, Cannabis sativa
tctttacaaaaagcttaaaaaaaattaaacatacacgattcgagctccaaaaattgacgatcatcatctagagccaatttaaccattagaccaccatcaatggctaagatcagcctacaatattttatcatattgtttgtattattttattaatattttaatggacttccttgcatataaaaggagagctccattcgctcatttttcacatttagaaaagtccccacaaggttagagcatatctctctaattcctctctctaagaatctaagctcttaccttagttaatgttcttgtaattattgtgatcaataaaacttgaagtagacatagctccattactgtcgcaatacgagaagtgaactactataaatattgtgtgtctctctttaatatttacttaactcattacttatctcgccaatctagcgagacagtattggccaggtgtaataccctaaggtttaataacaagattagcaaccctaactaagttaaatatgtattaatgagaaattatattattatatgatttaatatgtgaaactattatgatttattgcattttaagacctcgttggtatgtcaggagcattttaataattttgacccgagatgggtaaaattgaatttttatggcatactgtgtttatggactatattattatatggtatgtttattctatctttctctaggtattttctgacaagtcggcgcggtatagtcacaaccggatattttggtccgaaccgggttcggggcctaatacatttttgggatttattcatcgcatttatgggataaatgagaaaa

SEQ ID NO: 12295 - DNA, 501 bp, Cannabis sativa
atattactattaattaaaaaaaaatagtcaaacattctaatttctttgtataaaaaaaattaataaaatattctaactttttttttataataatcgtaatataattttaattacttcctatgaataattatatatattagctaataattacataacaaatcatataaataagaaaaacttgcataaactattatttggcaaatttttttacacattttacatatattttttttttacattttacattgttcataaaaataatatcaaaataacataaagagtttttttatttttacacctcaaaatagtttttttttttattttttttattttgaatttctacggaatctcatacagaaacacctataacaactaacggagcaaccaaaatccatatagcaattcacatagaaatcattgaagcaacccaaaaaatatatatatatatatatagagtaattcccaatattagataaaaaaatatttataaataaacaaaat

SEQ ID NO: 12296 - DNA, 568 bp, Cannabis sativa
cttggccggttaaccaagaaaaaatcaatattttggtagattatttatctgtttcggtatttagaataaaagtttagtgttattttattttattatcttgtatgttcagtaattacaaaacgtttgtaattttttagaaaattttgagctatttagcatggggaaaaataaattttaaatattttattacacacaattgttattcttatacaaataactatttgaatgttaatttcaccactataaactatttgatttacgtacacattattaaaaaaaaaattagattaattttttttcttagtgccaaaacacatagaagatctacccgaacatcctctttaagtgcctgtactatagagatttcctatattgttaatctcactattctatattacttctagagctttactttaagcttcattggttcctagcactatgtagaggtaatattttgtaaataattaactaattttttaaaataattattaaattaaattatttaaaatttgatatatttaaatacactaataatgatatcacattttttagatggtactagttacca

SEQ ID NO: 12297 - DNA, 611 bp, Cannabis sativa
  modified_base (285)..(300): a, c, t, g, unknown or other
tttgactaagtgaaactaattgtacctatcaatatcattacttttatcttgttttgtttcaattttcttttttaatgaaaaaaattaaataatttacaataaaaatatttaaatttaattttcagttataaataaatttttaaatttaatttttaatagtaaccacatttaagttatatttttttttaaatttttgtaagtattaaaccgttaagtattaatttaataattacgtaatagtttttaattagtctaattagtcgttaaatttttattttttatttnnnnnnnnnnnnnnnnatactaataaaaaaataacatgtgaataatgacttaacacttaacgcacatgtatctaagaaagttctaaaatataacttaagtaatatttctttcaaaaattaaatttaggtatttgtacacagcagagaattaaatttaagtatttacgccacaaattacttaaaaattttatgaaaattacaaaagttgcacgtgttatatttctatagagtaatgcgaccaaattttatatgttttgttaaattttttagacattttgaaagagaaaaagtctaaaaagagaggaaaagagaagaaatttgaagagt

SEQ ID NO: 12298 - DNA, 572 bp, Cannabis sativa
aatattaccatgaaggggataattcatcaatcataacggcaacttgaaattatttatcaatagtcataccttcagacagaatttcatgggctattttttgaagctcgtgagactgggcttcaactgatttatcatcggtcatttgaaacttcagatattggctctcagcatatttctttgttcctacctccttggtatcatattttttttgtaatgcttcccatatttctttggcaaatttatcataattatagtaatcatacaaatcatcagataaatcattcaaattaaaattcttacacaaaaagtcgttctctacttaggagtctctttccttaacatgtgattcatacttcttgacttcatccttcttctcaccaaaaggtagagtctcaaacacaactggtttcaaaacagtcagcataaacacaacttttttcatagttataaaaaaaaaacatcttttgtctctaacgtttaaaatgcaaactctcaaaacgaaaaagcttattaatgtgagcagtagaaccaaaaaaaatcatcgacaatagtcatagcagaatgaacgtctt

SEQ ID NO: 12299 - DNA, 736 bp, Cannabis sativa
ttgcctggcaggacactatcgtggtcaaactgatacaggcatcctaatggatccaagtggcaggcccatgtctccaagggaggaccttccatagacgcctccaactgaaggaagagtccttggggggcaccccccaagaacaacaattaggtttcatccttggtactatgcaagagagacgagaccaggaattggcgagcctactaatggcgagccccatgtgaacttaggagaagatcttgagttggccagactcagggaagttgtaggccatgcaagcgtaattgaagaaccacgcactgctgagtgcgatgcattcactcagcagagacgcgaattcctttaagaaccacgcgctgctgatcgttatgtactcgctcagcagatatgcgaattcttgagatggatggatgaccaagagtacatccttcgatctcgccaagtagagttagatcgccacaacagagaggccagcaatctaataaggtagttacaccagagaaccgatggaaaaggccaggatctcatcagagattcacttcaaggaagacttattgatagatcaggaagggtctatcaatatgctgatcaacccagttccccacaaactagggcagatcttcccttgctagagggaggacagacctttcctcaaaggtcaaacggtaaagactgccagatcacggtaacaaggaacaagaggggtcatccagggtaggaatggaaaacggggcag

SEQ ID NO: 12300 - DNA, 573 bp, Cannabis sativa
ggatttttagccaaccgacgcggattcataataaatgagattcaaaccaaaaaaataaacagtaaatgtaaataatgacacttgaaattaaagaaattcagccaaggatgtcggtaatagcctactcccctcgtgttttattaattagagttgtaaaatcaagaacaagctcttgcatgcaaaagataacaatggcaaagttcttttttttttctctaagtactcaaattctcaaattcctttcccaggttatgggtgatcctttatatagaggaaaaggtcgatgcttctcgcttcaggagacacgaccactttgcaaatatttcaaccatctccttaatttttagaggtggttgaaacccgattcttatgataatatcccactattttcgtagagttataaccatttttgagcttcttgcgggattcgaatatttgaattagtcactgacgataagggtctccccccaaagtgtgaggtagtagccaatactaaggggtgacaccccaagacccatcgtgaagggggtgacagtgccatctcgggctggtaccctcaagaccccttccact

SEQ ID NO: 12301 - DNA, 630 bp, Cannabis sativa
tgtagttgacttcaaacctatctcttgttgcaatgtattatataagatagctaccaaggtgatttgcaatagacttaggaaaatccttcctgatcttattgcagaaaatcaaggtggcattgttcatgggaggtatatagcacataatatcttggtttgccaagacttggtaagattatatggaaggaaaaactgtaagcctagttgtatgatcaagattgacctaaggaaggcatatgacgcaattgattgggatttcttggaggagatgttaactgcttttgagtatcctttgcagtttatacagctaattatgaattgtattaggactccaaagttttctcttctccttaatggctccatgtgtggattttttgaagcaaatagagggttaaggcaaggagaccccatgtcccctcttctttttgttcttggcaaggaatatttgtctcgaatatttatgaagattggggaatggccaggattcaaattccatgataggtgtacatccctcaaactgaatcatctttgttttgcagatgacctgttggtgttttgtaatggtgactttatttcagcaatgctcatgctcaaaggtgtgaagcttttctcttcaacatctggtttcga

SEQ ID NO: 12302 - DNA, 624 bp, Cannabis sativa
tgataaatctgtgttgtctttttctccaaatactactttggcagctcaagtgttcttccatcgacatctctccatgccaatcagtgagtgtcatgaaagatatcttggtttaccatcttattcgggaagagacaagaaagaactcgtcagcaatataaaggaacgaatatggaaacttatgcattcttggagtgaaaagatcttttcagtcggtggtagagaaaaccttctcaaggctgttgttcaatctatcccaacctatgctatgagttgctttcggctaccgggttatttttgcaaactacttgagagtatgatggctaatttttggtggggtataaatgagaatggatccaaaatccattggcgctcttagaatttgctatgtaagacaaagggcgagggcggaatgggatttcggtcttttatccatttcaatcaagctctattagctaagcaagcatggcgccttgttgaaaatccacactccctgcttggacaattactcaaaagcaggtactaccctcataacacctttctagaggcacgaatgggtcactcaccttcgttaacttggcaaggcattaaatggggtcgtgatcttttgatcaaaggattgagatg

SEQ ID NO: 12303 - DNA, 782 bp, Cannabis sativa
tataaattctaatattagtactttcaaatattaggtgcacccgacaaatgatgttttgttcgaagttcgtgatggatgcaaaaaagcaatagttgatctaagctcgagaacttgtacatgcaaacggtatataacgcaacctatatatataatttgatccttatatattgtccttagctttgttctatagatgcaaacggtacatgctaattgctaaacttgcaaaatcaatatgagatttcattgttatagatgtggttaattatttgggttagaattgttgctgtaaaatcagattgtaaaaaaaagatatatgtacaagggaaatcagattgtaaccagatagttgttgttagttattacgggatgttagatataaagttcctcccaaacataaatttaaatgaaattgctagtgcagctgattaggaattgtaaagggaaatcatggaatcttgtgctatattgttggctttgaatgctagatttttcttttgtggaatttcattgtcaagttgtagtttataaggtttaaaatcataatccgtagcagtagcagtacactacctgctactacattctcttctttttctccaaactcattattcattggcagctgctaaaaacttcattgaatgcgtgtcaataaattctgagctatcagttctagtggtcacaacacttttcacaccaaacacaatgtcattcacttctgtccttggatccacaccaactaatctcagattcgtagagcccctagttccaaaacctcagatcatctt

SEQ ID NO: 12304 - DNA, 577 bp, Cannabis sativa
atactttcctttggattcttctctaccaatttcccctgtcttcatttcagaacttttagatgaagaccctgacccttcttctaatctctgctgaatcttgtgttggaccgagtctctgttatccaccccgaacttgccttctattttgttctcgcccatggaagctattgagggaaaaaaagaagcattcgtggcccttacatttgtttttgtcgattcctgcatagtgtcttcaggaattaaattcctttcaagttcttttcgatcctctggtgtgtctccttgtagactattgccaacctttaaccatttaccataagtccctgtatcagccgagccttctctttgagtgagtatggaatcttgatgacaatctttgaaacaatgcccaatttttccacattgaaagcacatgaaaggcaattcttcatattggaatgctatccacttcttttggccgctccaagggaggaaaaaacccggacacactggtttattgatagacatccagattctaaaccgaaaaaatccatctgcaaccatccgagatacgtctgaattctgtaccgtgattatt

SEQ ID NO: 12305 - DNA, 627 bp, Cannabis sativa
tcagctccaagaattaagaagttgaaatctggcaccttggacaaggtagtatatatgtagttggagaccacttggtcgtactgcttcttcccattctccttctcagtctccaagtcgcgagacaactccttgacctttgactgagagagttttgcttgaagttccacctgctctttggacttctggaggttctcgagctctttgtccatagcatttgcatcctgcttcagcttcgtgttgttctcctgaagctggacgatctatttcttcaaaagatcgacctccttggggcccgcgacaaacgccctcgaaaacatagtgataaactgcgaagccaactccacagagtgaggcattaattcctcaaaaggagtcccttcaaccttcgacatgaaatcctcgcccacgaacttttcttgaagagctaggatgtcgtgagctcgaatagttggatcgatcataacctttttccccttgtcctgagaaggcttggtttgcttcttggatgagtcagtaataggaattgcgaccgcgtcactcttcctcttctaaggaacaacaggagaagtcgtcggcgtttcagtttttggcttgtgattaagaactggagcttgcttcaagaaagtc

SEQ ID NO: 12306 - DNA, 634 bp, Cannabis sativa
tgactttaggagagaggttcacgcggttgaatagatcaatcaattgagatagttttaaatagatcttttcggctcacagtttttttttatgtatgttatttgattaaaatttttattagaatccccatattgtaaaaattttggtagcgtaacaccatgaagatttatattattctcttcgattatataacacatattgacttattttctgaagtctagtgaatcgaagagaaatataaaaaatcgatgataaaattaacaacataggaatattagtcttttctctttgattatatatcacattgacttatttccgaagtctagtgaatcaaagaggattagaatgactcttaatcacaagattgaaagtaagagaatcaaaagaaaaagaatagattcctattatgaattttcccttacccttataaagcttgaaggtagactttggatgtgcagatttttttttattctttttttcctctgtttcactcttacgattaatttcttgccaaagattttcaaaaattttcgctttaactgttcagtcatcaatctttttatagcccatttatttatttatttttttgttgatgaaatccacttaacgtagaagtggtggaagtggagaaaaaat

SEQ ID NO: 12307 - DNA, 847 bp, Cannabis sativa
aggtcatccaaattttgtatatctgaaacacttatccccatccctatttgtcaatataaatcctcagtctcttaggtgtgatatttgtcaattctctaagcattctcgttactcttttattctaagatctcatcaaccctctcacccattcttactcattcacggggatatattgggaccatccaaaattcaaaatattagtggggtatgttggtttttattactagttgatgattacagccacctaagttggacattcctcatgagagaaaaatctgaaacaagtcatgtaatgactgcatagttaaatcatgggaattagtagataaataagagaattaatcattttatgatatatgtgtttcttgatagaaagttatggcttattatcagaaataggccttaggaaaatattttctcaattacggagatatattcgaattctatatgtattatatatactatgtatgaattttataatttcatgttttgtgcttggtaatagtagaatgcaataatttggccaatagagttacttagatatggtagagtatcttaaaattagaggagctagatagttagacatttggaatatcggttttaggcgggttatggttttagactattttacccctaagcctaaagatgacttaagctttaagaaagggcaatttttgtaaatttttccaagaggttaattttgccctttatggactttggtggaattaattaattaattctatgttaatcctttttaattataataaagacatatattatttaggggtaagttagaaaaatcattagaaaataaaactaaaattcatccaaactctctctctctctc

SEQ ID NO: 12308 - DNA, 732 bp, Cannabis sativa
atttgataagattaaacaggataatttcactagttcaatgctttgcaatgctgtcggaccagataactaatccagttaattaatctcatatatgtgaaattatttatcccatccagtaatgtgggataaatagtctattctagcatgatcacttttttattttatttttaattttgtaaatatattttatattaaaaaataatttaaacggaagaatgaaaaatttatttgtagatttatgggttaatattattttgggctttgtgtagttttgtgaaagttaccgattggacttttaattttgttaagtgatacaatggaccttgtattttcaaaaatagtagaaataagaccctgagcttaaattttgacaatatttgttttagatataaccaaattaataataatttctagcacgaacaaatacagaaaacgtaactataaattttgtcatagcacctctaggtcaagttattattaagttttattttgacaattgacaaaaaaaatcaattcagtacactatttagtactattttagaaaatacagtgtttaattttttatttaacaaaagagtccaatcagtaatttaatttttacaaaatacaggatccaaattagtattattcctaaatttattatcggaatattatctattaaaattgataaaaaaaaatgtataatattgatttattaggctaataaatttttaaaatatgatactaattttt

SEQ ID NO: 12309 - DNA, 954 bp, Cannabis sativa
  modified_base (750)..(754): a, c, t, g, unknown or other
gtctttttggtatgggtcatcagtctatggctggacgaaagacttagggaagaatgactgtcactcgaaaaagttggattagaacgaagacgaggatgatcctcgtgcaagagttgaagtagatcctggtcaatttggtgttcgcttccccaaaactcacctcggttcatctacaaaagacattacacaagatgagtgtttggtcgaaatatcgaacgttaaaacaagcaaatatgccgaccaggagtactcaacagattgaagaatgagaatattcaacgaaaagtcaaaactcaggaagtttgaaattttcacgagttagggcaaaaaatctcatgaagcttagaataagcagaatgaaagacaggcattatgcagttcaacagataagcattacggatgatgaaatcgcatgaaccgtgataaaggaaaatcgcagagtttctaaacttagggtttcctacatatcttctacagcaaaatcaaaagtgcattcagaaagtaaatgtgcgtagcgaacataaaagaaatcgagaacttactcacgaaatcaagcgtctgggttcaagttgcgtcaaaccaaacgagcagttttgatgaaagcacttcaacaagcttgaagccaaaaacctctctttttgctctgaacttacttagcaaggaaggttggtgaaaatgagtttgtatacaaatgctcacttgtatttataggcaaacaacaaaaatgggtaatcatttcaaaagaacctnnnnngcctcggttcccccttaaaagcgaatatgggaaatcaaaagtactcaagtgtatccgtcaaccatggtgggataaaatcggattttgaaatattaactgtcagagcatttattagttgaaaaccgaaaagacgcccagtcagcctcacatcgagtcacgaacagacgcgcttggagtgtgttgttggaatttattttacc

SEQ ID NO: 12310 - DNA, 696 bp, Cannabis sativa
cccttcggaccacgggactctgactgtcatatttcttgttgatggaacttgctgggcattatccacatcttcatcgggttgttctttagattttttggtaagaaccattttttcagtgaaaaacttcaagatcttgagttcagctctcaatgaaagtaccaaaatgttaactggatttttagccaactgatgcggaggtggttgaagtctgattcttatagtaatatctcgatatttttgtgggtttataactactgttgagcttcttgcaagatttgaatattttaattagtcacagacgatgagggtcccccttccccaagagtgtggtatgaccgttaacctcctctgggggtagtaactaatgcttcggggtgacacccctgagacccatattcgtgaagggggtgacagtcgccactcagggtgttacccccgagacccctttcacttgatcttcgacgttgtgggtagccttggcatcatgaagatgtgccatatctgccatgtcttatgtaggagaacaaatttcttggaccatgaggatgtaggggtttaggtgtacacccctagaccaaccccatcaccttttgagtagatcgttatatttgaggtaggcgtaatagtatatacctcctagactggtttgacttccttagtgtatggtgatcgtttatttcctagtccaccttcccc

SEQ ID NO: 12311 - DNA, 662 bp, Cannabis sativa
caagggttttagttttggggtttcactttaaatctggttgttgtatttgtattttgtttgtaatatattttgatttaggatgatgtataaagtttttgttcttgataagttttgggtttgttttagggtgttaaacacattttgtattattgatggataattgaaaatcgatgatgaataaggaaggaaaatagtgagttgatagagatagggtaaatatttttggattgttttttttttcttttctgcgtttgaagttggatatctggttctagattttgtttttttttttctgcgtttcaatttcacaatttgagtttattttttaattaaaaaaaaagaaatggaaaagaaataaatgttaaaaaaataaaaaattaattatatttagtttttttattaatttttcataatttttaaatttttaaataataaataaaaaaaataatgacatggacaaattaatgagtgacacgtggattctgacgacacttaacgaacaaatgtctactgaagttccacactaataacagaaggtatttttaccctaaaacataagacttaaatatttatccagataatattgtgaacaaacacacgaatacagctaagcaagtaaatgtgagctaaaaaattcacacagatagaatgatggagggaat

SEQ ID NO: 12312 - DNA, 517 bp, Cannabis sativa
ctttcactatgaagatcatcaccattattatgtgtaaatgcgtcatgtataactccatccaaatcaatagcataatttgactcagaagtatcaatactctcattattttgcgtagcatgcgaaaaagtttctccgtgcaatacccatttagtgtaacctttcacaaatccattacatatgagatgttcaaatgcagttgtgcgaataacaggtgtaattaggccacacttcacacaaggacatataattttttcttcaagactagcatttttaaatgcaaaatcaagaaaaaatttaactccttcttggtaggaatcacttaatctagaatgatgcatccaactcttatccataactgtgaaagcatttttttcaaattaatatattaaaaaaataatcttctctaataaaacattgttgaaataattttgtccaatacacaaattatatatcaaatttagaataaatttagttaataaaataaattacattaataacaaagtgtatataacaaact

SEQ ID NO: 12313 - DNA, 545 bp, Cannabis sativa
ttgtgaactgtgagatttaatatttctaaaaatttttggtcccaatatgagtttaggaagagaacagatatgaactctggttgatcatggtggtggtaccattaattgagggtctgtgccattggaaatgtttttttttttttgggtctactgcgattgagaataggagttttttttaagtttttgattttatgtttgtgttgttttaataaattaggtaaaaaaaattagaaataatcataacatgacacgtgtttactacactaacttttgttagtgggtactaacaacaaatgtttaaaatggtgttttgagtatttgtgccataaattttaaaaattgggtacttattagcaacaaaatgaataaaatgagtatttatgccgtaaatttccctttattttttagttcataaatagtgcattaaaaaaatcagtttgagactcaaaaagggtaaactagggataatcacaaataagttagtttgaaaggcacacgcgttccaaaaaaattgcttaaatcatttttcaaagcataagtcatca

SEQ ID NO: 12314 - DNA, 529 bp, Cannabis sativa
cagaatgaaatgggaattgaagcagtgaagctggcgagcttctatatgtttgttgttggtgaatattttacaagacagctaagattacccttaattaagatagaattatttgagaaatactaaaaggtatcggtagagcctactgtctagtaccctactatatgtcaatattgctattggttcaactaagtatcagattctatatagtttaatgaaataacttttaaggagtatcgctaacaaattacaaagcgacacacataaaagacattaggtaccactgatacccaataacaatattggaattatttatatcactcaaaaagtgaacctgtgtatatttattaatatgcatgtcatatatcataatcatattatagtatgtaaaattcattgtataaaataagtgtgcctctctatgattcatactctttatacttcatatttgttgatatatttgacaaaagaagtagttttcttaactttttattagaagaaaagatacatgtatggatgatgaaaaactaat

SEQ ID NO: 12315 - DNA, 551 bp, Cannabis sativa
tttcatatacatcaccttgtttggattatttgtttgtttgtcttggcttatttgtcatgataggaactcagctaccaaaaaaaaaaaaaggtttggcagttcaacaccaccatctgctagactctacaagatcattgcttagtgactattctcaagctaaagaggcatctcaagctaaataggcagatcgagctcttcaagcagaccatcttattctcctaaaggctcctgctatttgggctccccctcctagacttgccaagctatccactgtgcaaccattgatacccacataaataagccaggattcgcaggcgttctacgtacgtaacagcaacggagaaacaatcgatggcctttccatcccctattttgaaattggggaacctcatatccaagaagtcaaaactctcgtcatcttcctgaagtagtttttttcgtgaagacttcctcattcacattaaagagacagattacaagttaataattgatgctttgaacaccataattgttgtagtatttttattgatcttatttcccagctgaggaca

SEQ ID NO: 12316 - DNA, 537 bp, Cannabis sativa
ctttacttatagagaattaaaggagtacatcagacaagttagttagcaaagataacaactaaacagcttttaactaactctctaattaagtatatagcttcactaattattagtttgttaacaagttgaattgtttatgattctctactttggttacaattttagaattctcgccatcggttgaaaggatacaatattattttttattttttatttttttgagaaaataacctcagagaacaccactaaagagcatagaacatctgaggggccgagagctaagagtttattgatggatggcctcagccaaaataaggttcctaatacaatttgggtacccaggccaccaaaccatatttgcagtagctgttaaaacaaattttgcaagagtgtcagctactgcattagcaacaaaacttacaacattaaatgtctatataaagctctattgtcatcaagaattaaacctaaagacaaatctaaaacaatgaacatattaagtttatggattaaaatcagatttaatttgaatgttgt

SEQ ID NO: 12317 - DNA, 704 bp, Cannabis sativa
tttgaaattaagagtgtttataaagtacataatttatttcaatctatactatttaatctgtaaagtacggatattcgcacttaggattagattgaaaaatctaaaatttacacttgcacaaattaaatgttgattagaagtaactaaatcaattcaatttacacatttatatatattttaagaaaattatttatataattaatattttaatgtaaaaaaaataataatttataaattgaatacatacgatacaaatatattttaaatcaaatgtattttttttttaaaagaaggtatgtatatttcattcttatatataaagaaaatataatctaatacaaaattaaacaattctttctacatataattttttttctatctttgaatttgttatttttttttattttatttattgtaatttgttattggagacataaacaacaataatttattttattttattgctagttatgtaaaaaaaattatatttttttttaaataattcaatattaaaaagtaataaatctaaattaataaccgagtcaatccgcacagtgtggattagattttaattcttgagcagattgagttggattggatccaaaatataaaatccgtacttagtacagatcagatgcataggaaaaaaataatgcgaattagattagatgaaaatcattaaattttaaaattgatttgataaa

SEQ ID NO: 12318 - DNA, 937 bp, Cannabis sativa
ctcgaattcaaagaaaactcgtggtgtgacttgggttagttggtcacgtttatgcaaacataaaagtgttggagggctgggctttcggagtatccgtgattataatctctctttgcttgggaaacaagcctggaggttgcttaattttgagaactccctcatgggttagatctataaggcaaggtactatccgaacagtactttccttaatgctaagttggggaataatccgagcttcatttggcgaagtatttttgagacacaaagtttgattaaagctggtgctcggatttatattggaaatgggttgaagactgatattttgcatactccttggctacctcatgactcaaatccgtatgtggtttctacacacccggggttgaataattttaaggttcaaagtttgatgcaaattactagccgtgagtgggacatggaggttgtctcggatctctttaacaccagggatcaggcccttatcttgagtgtccctcttagtaataatgctgaggaggatacatggtattggaagaagaatgctactggtttctacactgtcaagagtgcataccagtacttacaagaaattaaaggtgcgtgggggttggaagctgaggatttagcttggaagaccctttggaaaatcaaagttccacctaaggttcttcaccttatttggaaggctctctctgggtgcttaccaacaaaaacacagctacaatccaaacatgttttcatggggctggcgtgtcctttttgtaacaatgcagcagagacaattgagcatgtgttactgttctgcaacttcagaactattgttggattcggtctgggtggggaagtgcaccaacacagaatgtcagctttgtggattggtttactgctctggtcagtcggtaaaaacaagagttaattgaggagggagttatgatgt

SEQ ID NO: 12319 - DNA, 604 bp, Cannabis sativa
caagagttgcagagtgaagaaacagcagggatgtatgtatgcagtaaatataaaacaagcaggaccaaccccgctcagttgatggcctaataatctccatcaacaatcaatggcatttcctgaattgtcgatcggggatatagatcgtgcttgaactgaagaaatattcaccccagaaaagatgcactgtcaactataaccatggtccatgaatttgcattttttttgttctgatgcactgtcaataatacccatggtccatggatttgcattttctgggttcttatcacgagtcgctaaagtgaaagtagtcagcaacttttaaatgctttgcaagccgaataacagcactctgaacaactttagaatctggggagactgaattgggaaatgagggtaggcacgttggtaaacattgctcgttatcttcaggagaacagaagtaagagagcactgatctgcagaatatgaatctggaaatagaagtatatcatcaacacttccatttgttctaaacaataatgttcaaacttcaaacactaaagtaaagcttggaaacaattgttgccatttatgttaaagtattcaaaatatatcaagcctg

SEQ ID NO: 12320 - DNA, 620 bp, Cannabis sativa
  modified_base (150)..(189): a, c, t, g, unknown or other
ttttaattatttgtatatcaaaatcttcttatagttaaataaatatatatatttcattataaaatacttaagttcatccaataattttaggctaaaatattattgaaatttactaataatctaggaaaagttaataataataataataannnnnnnnnnnnnnnnnnnnnnnnnnnnnnnnnnnnnnnnaataataataataataagatttattatttcaattcagattttccaaattaatttaattttcactatttttatttatttatttattttgaaaggggtaggtttattccacagaagaaaattttaaatagatggaagcatttcgtaataattatcataaacgccctatgttagataattaagtagacagatggattattagttgcactaaactttgaagataattggtaattaaatatataaattaataatgtctatggctttgtcataataataagtctctatcaccataatagtaaatacgtacacggagactgatcagacaaacttcaaatacataaaatagaatttttcatataaattattgacaaggcctactgtcataaataataaaggtcatgatcatagaaagtaaataatacaaatctcacaac

SEQ ID NO: 12321 - DNA, 691 bp, Cannabis sativa
tctctctctctctctccctcttttaaaattttgttagtttgaatttgaagaaggtggctcttataaatatattttattcaaaggaattaaaccactctgttgatcatataaagaagaattgaattttttttttcttcataatcataatttcaacaatagtcttcttttgctcttcctcgtacttattcatattctccattttgtagcctaactctatcatattggctatatctcctgcaaatcaagatattgccacatcagacgcaataaaacttgcaagagaagttgatccttcaggtagtttgatacttccgtgtcttattttacgttcatcggttttcttgtataggctaagaaataatttttctccattataacttatgtttcaggtgaaagaacatttggagtgctaacaaaacttgatcttatggataaaggaaccaatgcagttgatgtaagtattagcatcttgaatgcagaattaaatcagattagaacttcaacctagtgaaaaatttaacctttcaaatgattaattcatattctgcttctattctttctgggcttctctatctgaattctaacaaagttgaagatattctttttgtttttctcattcatctgattggaaggctataaggttcttactttttattgcatgtgtttaaggttcttgaaggaaggtcataca

SEQ ID NO: 12322 - DNA, 666 bp, Cannabis sativa
agtagtgttgatcacctataatattactatttgtaaaattaagtatcgaattttatataatttaatatattaatttttatgaaatattgtgtaaatactattttagatcctgtattttgtaaaagttactaattagactctctgttttgttaaatgataaaataaaccctgtattttctaaaatggtataaataagattctgaactgattttttgtaaaataaaatttcataataatccgatctaaaagtattatgagaaaattgtttatattttctgtatttgttcgtgttaggaattatttttaagtttgttatatattaaaaaaaattatcgaaaattaaacttaatgtcttatttttactattttaaaaaatataaagtccattttgtcatttaacaaatcagaaagtttaatcagtaatttttacaaaatataaaatccaagatacattaaaatattactaaccaattataagatgttatctatttaaatagtgctagaactagcagtagtggcttagcaatactcataagataattaacattaataaatgttaactaacaccaaccacgtgtataatatgtgtatgtatacggtgtacacgtatatatatatatattgtcttataagatggattgattattattatggttaatattgtta

SEQ ID NO: 12323 - DNA, 691 bp, Cannabis sativa
gagtccaaagctcttctggaatctcaccaccaacatccattgcagaaactctcctgcattgttatgcaaaaactaaatcacaaaacaaagttggatcatatatcactttaaaggatgttcataacagccttcgcctacctgcaatttctattattaattttaccattaaactgtggaaaattacagttagcatagacctttacctctaagcccaagaagccttcaaattgtttttctttaacaatttatattttattcaagtatatctacttttatatgggtgagttgcccaatatactattactctctacttaaatctatcttataatttatattaacttaaggatctaacatcatctataaaatagtatatcttgaagaatataaaaataaaaattaaaataaacctaatgagtaagttattaaataaagaaacacataatgtcatcaagagtcaatactaatccaaaaataaaggtatatatatataaatgtacatacagttgagtaatgtgacatagagaaccgttattaaaagtgcagtcgcatttgataaaagggctcggtgagttaatgatgtcgatggagttgtttatgacggaaccactgcatggttccccacttatgttccactcaaaattagcctttatcttccattgctcaaatatagagttcaaagctctcactacaa

SEQ ID NO: 12324 - DNA, 677 bp, Cannabis sativa
aaaatattatttttgataaaatttatatattttacgttcaaatatattttttttaatattttagtattttataaaaaaaaaacacgaaaaataataaaaaaaatataaaaataataaaaaataatatataaataatagaaaaatcaataacaaaacaataatacaataacaaaagtatagcataacatataaataaaaacataaaaaaaaaaaatcagtatttcatgtaaataaaatcttaaaaaccgtaaaaatatttaaaattccgtacaaaattacatttttatatttataaaagaataatttgtgacataaatacttaagtttaacttctagttgtaaataatacttaagttataattttaagacttcagtatgtactggttaaataaattgacacgtggtagtttgattggtccaagtcattaaatttttattattaaaaaaaattagtttaaatataccaataagaaaatgacacgtggatttgatgtcttaatatttaatagttaggtgcctacaatacaaagttactgaaatataacttaggtattattaccgccaaaaattaaacttaagtatttatttgcagttagaagttaaacttacgtatttatgcggtaaattactctttataaaataacccctaaaacgtggttattttgcaaatttgaaac

SEQ ID NO: 12325 - DNA, 588 bp, Cannabis sativa
gaatatctgggtcatttggtttctacacagggtgttcaggcagacccgtccaagattacagccatggtgcagtggcctctaccaaaaacattgaagcaactccgcggatttctgggtttaacggggtattatcgccgttttgtgagccactatgcgactgtggcagcaccattaactgatatgctgaaacatgataagttcaagtggacaccagcagcgacaatggcatttgatcttttaaaaaaaaattaatgacagagacactagttttaaggctgccagattttactaaacagttcgtgattgagaccgacgcctctaatgtgggcattggcggagtgttgatgcaagatggtcaccccctcgcatatttcagtaaaaagttgggtcctcgtttccttcgagcttctgcttatagccgtgagatgcgagctattataaaagctgtgtcaaaatggcggcaatatctcttggctcgacactttattatccaaactgaccataagagtctccgtgagttactttcacaggttatacaaactccggagcaacaacaattcatccgcaagcttgttggttttcagttta

SEQ ID NO: 12326 - DNA, 681 bp, Cannabis sativa
tgaagcttgtaagggttttgaaacatatgcgatatatgcgagaagtggtttcgaggaggatgacaatgatatttttttttgggcaatccactatagcgacggttagtatagccgacagctttaaaccgtggcctatagtcgacggtttaaatttgtcgggaattcttttataacaatatttttccactgtcgcctattctactcagtatttgcgacgctcgtataggcgacagttttatagaccttcgggaattctttacccgacggtgtaaaaatgtcgagaattctaggttttttagtagtgcataataattctataagctatccaaactatatagatactctcatcctatatcgaaattcggttctatttcactatagcataatcgacactcacttctcagatctcgcatcaaaatcatagatagttaattggtgatcagacaattaaaagtaattaagtaagaatgaaatagaatacatggaaattgagaaaaaaataaatcatattaaaaccacaaataaatatcaaacaatcttcgtctagaccctagtgaactgtttagctacttatgttcattgtagcaaattcacacatattaatttaagaaaagagaaaaaaaaaataaagaagaaaaaaatgttgaaaactctattgaaaaagccttcacgattgatttt

SEQ ID NO: 12327 - DNA, 656 bp, Cannabis sativa
  modified_base (470)..(490): a, c, t, g, unknown or other
tatggaactaatttaggaacggttcaggaaacaaaatctttaattttatgtgggtttaggataataatcgagttcgatgtgttgtatatatgttgagagatgatgctcaaatttggagggagattgtatctcagggtcatgatctgaataccatgacttgggatacgttttaggtaatattaattttatgagaaatactataatgattccatacgtgtcgtcaaagtagaagagtttatacggttggttcagggtagcatgattgtgacagaatacactaccaagtttgacagattggccaagtttgcttctgatgaagtggtcattgaagttgcacgaaagtcaagtttattagaggctttgaagagtagattactagagatgttattgctagagatctactatattttgaaatatatttgtatcatatgtattaaatttttaaattactatttttttacattaaaatnnnnnnnnnnnnnnnnnnnnntttaaaaaatatatataaatatatgtagattggattgcggattttagatttttcaatctaatttaatctacacaagtgtagacatgcatccgcactttgttgattggattgaattgagtattttataaacacctctaatttatactttttatttacaataatatgt

SEQ ID NO: 12328 - DNA, 1009 bp, Cannabis sativa
ttaagataggttaccatcaattagcaaaatattaagggagtttacgtcccccctccaaaattcatgctttaattttgtacggagattaagcgatttgttataacctctcactattgattctattgaatcatgcatgccaaaatataacgttcactttgggaccacttttctccttaagtacttaaattttaaaaaatcaatcataaaagattattttttacacaactcagattcttaataattttgataccaagcatatcaaaattaaacattaatttagacgaaaaatatgtctaaattacacttattttaaggcaccaaacatgtctcaaattctcatattggagtattactcccatactttcacattttattatcaagataatattttaagtttaaaatatagaagaccactttgtctctataaattctcttaaatttaatttccttcttgaaattatttttactaaaacttgatttaaaaattgaatccaaaatcaaataaattaatcaacaatgtctcaacacactttaactaaatttgtggctgacccccacatttctagtataaagtaaaattttttataagaatcacttttcaccaatatttgttatctaaataatctcaactatttaaataactttaatttaattatttttctaaaatgcctcttagagatcattattagaaaaatatcatttgagattctttgttttctcaacaaaactaagatatcaaactcacatcaccacttacaaaataaagtgattatttttacccattattttaaagttatctcctcaatgagattaacctaaatattacatcaaagttaacaaaattcttatcaatttcgttccacattttgattatttcagattcaaaattgtttctctaattttgttatcttttcacaatttttgaatcaaaattgattcactttatttgagtctaaaatttctcttccaattgatgtttcgtttcacaagtttgaatctacttttgatc

SEQ ID NO: 12329 - DNA, 606 bp, Cannabis sativa
tatttgacatctggattttatttgctatttattaatgtttaaaatattaaatatttaaacaataatattttttaagtagttacataagggggtgttagatagaatttttttagtgtttctaaattacgcattttttaataaatcatacaattttattaatagcaatcagctaaaataataacatgcattccaattgagatatctctccgttggagacacgactagaattaaaattaaaaaaaaatgagtcaaataatcaattgtctaattcttagattgtttgataaaaaaactaaaaaataaaataatgtaaaaaagattacagcatcacaattacttcaaaaatgcatatatttagttatttatcgctcagaagacactacattgaatgttgtagcaagttcattcaaccccctctgaaatagcatacttggagacgatatcattaaaagtcgattcatattcaaataagaaattcaggtcaatcaaaggaggagccctctttgtagttgacttggatttgcatttaggaattcttaaagtcatgaatgcaaagtacataaagaagaagggaaacattaaaggatgaatggggagaagggtggg

SEQ ID NO: 12330 - DNA, 1042 bp, Cannabis sativa
tatatatatttatacgatctttcagaggcttgattgtaatttgtctgaagatgttttatctatggtagttacatctttagttttggattatttaatttaataaaatttatcattattcaaaaaaaaaaaaaaactcatatatatataaatcatgttattaattattattatttttttcaaccacatatatgcatgttatatattaaacactaaaccgtactatatatactctttctttgcacgtatatataaaaaaaggcaaccaatacccaatggagctaataatatatagtgatattaacgtgaattttaatttttttaacatttaatcacaaaaattaattttttaggagcaaaattacctaaactcccattccgtctctgtatccacctccgtccaaaaatcacagttaggtgtcacagtgtgataaccaaaaccaagactagttagttaagttgttttggtctgttattttctgttaaaaacagtttctttaactgattgctgtaacggttttgtttgtaactcttagctctgttgagctatatatactttagtaaaatccctgaatgggataagttttgcctttcaaactttctcttctcccctgttcttctctgttcagtttgtttcatggtatcagagcctttgaccttcgtcaatggcttcgtcgggcgacaactcgtcacctgcaagtatcaccgatcctgcaccttctgcttctgctactccatcttggaaccccttctctcattctctgacgtcctctctcacgatcaagcttgatcgaaacaacttcctggcatggaagtatcaagttctgcctactgtaatcggtcatgagcttgatgaaatcttgctcactgatctgtctcctcccagagtcttagtcaatggtgatccgaatccgtccttccaacaatggcgcaagaaagatcagcttctcctctcgtggatccgatcatccatgactgaaggtattctggaaactgtggccatttacactacttcaaatgctgtgtggaaagctcttgaacaaaa

SEQ ID NO: 12331 - DNA, 605 bp, Cannabis sativa
ttataatatatttttaatatatagaggttcacacaagaatgcaaaatttgatttacttaatcagtatagacctatgtattatcgtactctctgaactttttattccattaaaaatggtccccaaactattattcatagtattgtaaattagttcttctatcaagttttgtcacacgtgacaaataaaatgatgacatgattacttagctaattgtcacgtcagtgtcatgtcaacatcacgtatgtaattaattggaaaaaaaataatttaatttttttaatttagttttacgtaattttcttaattattaattgatttttaatttgatgagtttcttaaaaatacataacttttatttttttaatgttaaattatacacgtaacactaatgttataattgactaaatagtcatatcatcattttatttgccacgtatgacaaaacttaacagaaaaatcaatttacaatagtgtgaatagttcaagaatcatttataacagattgaaaaatttaagaagcacaataataaatacatcataaaatcctaaatagccttccataaaattgagattacacatcctaaacttttttttcatcccaacc

SEQ ID NO: 12332 - DNA, 716 bp, Cannabis sativa
tcaattttaaagttctataataatgtatttattgaagttgattgagttttaaaagctttgccgtattgcagattgattttttttttttttaacaaaattgtagttttatttcttgtacttattaatgtctatgtaaaatattaatttggtagccttatttttactcttttggaaacgttggtcctgaaccgttgagtaatctctattattacatgttgcaacaatctattggatcaaaatcataacacctctaatcatgtagtcttacgattggttagtgatactctctaaaagttattatattaaattatgtgaaacctgataacactacaaaaaactgttatttttagtgaaatttttttttgtaacaacttataaattaaattaatacacataaagataagataatttttatctcaaaaaaaatataagataattttaactttggctaataattaagtaatactttcatatgtagtatatattgcgcatgattttgaagaaataatgtttgtgtaaatataacatatataaattataatgtgatatatatggatacaattatgtatctctcatcccatatatatatatatatatatatatataatgatgaaaaggaaaacacaaaattcgattaaatattaattagtacatgtacgtacgtacacaaaagaaaggaaatgaaaagaccgtgcatgcatgcatattattaatta

SEQ ID NO: 12333 - DNA, 709 bp, Cannabis sativa
ctcgagccataaaatgaggaccccgaaggtcttattgtcgtcgattggtggtcggaccaccatgcagccattatcgatgtcaatcacagggatttcagtcccttggtgcgatcggcctatgttgattgagcggaggggcacggtacctgaggtcttacatggttggggttcctctatgaacccgagctcacatgcttctgatattttcgatgtgcatagtcgggttacaagattaaaaatcgagctcacatgctatgaacattacaatgaataattttttacgtaaaattttatttcaaaaaataaattacattacataaaaatttctatgctttaaattggcttacattattttttaaaaacaataacaacaaaacttatacccaattataccatgtaattaacgattcatcacctcttatacattcacaataaaataccatccattcacatgcatatcacatatatgtaaatatttaaaatttacacagcatttaatgtatacacattcatggaactgctcttgataccaattgttggttttatggtactaaatcaggtacgcagcgaaagagtgtattatttaattatcattataccatagcctctaagatgtctagatgtgtgtgcattaaatcaaaacaattaaaacaattagtttagagtatacctcttgaagccttttagtgtattctcaaaacttctcgta

SEQ ID NO: 12334 - DNA, 834 bp, Cannabis sativa
atgctagcacaaaattcctcaatccaagcaaacttcaagtaatttctcacaaaaacaagagaaaataataagagcgtttgagagagagagagaaggtcggccaagaaggaagaaaaatccagaaattctaacttattttcccaaaaatcaatctattactaaatgagaaataaaaggtcaaaagaccattttgcccctagggccaattctcagatattcaaacacacaagggcaaatttgcatttcgggcccgaacccggttcagcccaaaatacccggttgtgactataccgcgccaacctgtaagaacacacctgaaaagacaacacaggcataccatataataatatagttccattaagcacgtaattaatttaatttcatcaatttacccttcttgggtcataattactaaaatgcccctggctcaccaatgtggtcttaccatataattaatcaaataaattctcatatattgaagtatatagtaatataatacctcaattatttaaaattatccaattaggatttagctaatccattacttaattctagggtattacaaagacggtgttggaaactgaaaccctaattagggatgtcatcttgggcactaggtgaaaccctaggagcccaggttgaatttcaggggtgcaggttcatgtaatttcaattctcaaggccttgatttgattactttgtgtcttcatgggatagacactaaaagatattgagttggaaacaagctattaaagtctgaacttccatcctggagttcccaaaatcaactaggtgcagggtttgggaatcgggacccctcccaggttgactgct

SEQ ID NO: 12335 - DNA, 576 bp, Cannabis sativa
cccatttttattagggtttttttacatccagcacttaattttatatctaaattttaaaaataacatatattctcattttaaatattattaacgtttttattagatgggaatgtttacctaacgtggccactattttatttttttatttataattgcttttgggtcatttaattatagtagaatttacgtagagtatgggttttttaaacattttatgataaatatggcataattgattatggacactttatatggtttttttaaagtttggccataatttatggcattttaaagcctatattgctagaatatatttgtcaaaagcccatattatacaataatatagcgacgactgccaccttgttcctggttcgctctccctccccatcttcctctctctttttcttctatcgatccagtgctcgtgtgccaccgccgctagctccgaaggagctatttctgtcattgatggacaaggtaagcgacctaccaaaaccttgaacccgaggttctccatctcatacttatgagatttctgttaaaaattgtctattgttgaaattttatttcgttccg

SEQ ID NO: 12336 - DNA, 660 bp, Cannabis sativa
tttcccaaaaaaataaggcgtttttataatgtatttctcaaaaaaaattatatcgatgcattttttaatttataacataaaagacattatttaaacaatttgtttcacacatatgtaaaataaaagaatcacatgtgcaacaagttgtttgaatcatgttttacattttggcgtgataaatttttttaaaatttttcaaaatttttcagaatgtctttaataattacagtatatattcaaacaatctatttcacacgtatgtaaattaaaaaaatcacacgtgaaataaattgtttgaatcttgttttactttttagcatgttaaatttttcaaatttctcaaaatgttagagaatatttttaataattacaacatattcaaacaatctatttcacacatatataaagtaaaagaatcacacgtataagagcatctccaataataatattttttaagagtgtcaaaaattttcacatcacttaaaaatatattattttattttattactcttttatattatttttgacactatttgttctaaaatgatcgaataataaacatcttctttgcgaatggcagtattcctgatggactgaatgacacgaatattgtcttgattccgaagaagaaacagtctacttcgatgggtgaccttcgac

SEQ ID NO: 12337 - DNA, 649 bp, Cannabis sativa
acgggtaaatgacatatcaaaaccttaattcgggacacccaaactccaactaagggttctgttattggtaactactataacaatacccaaaaaaattaaggaaataactaactaaggtactggaaataacacaaaccgacaacacaaaaaattcgtgaaacctgttcctgatccgattaactaattttacagggcctgtaaaaccggttaatcggtgccagtaacccaaataatttgaaatcatgtccaaattgtgtccaaaccaatccaaactcttcagaacacctgcaaaaccattctaggataatttccaagtgaaagtagcaagaaaaacacactaatactcaatatgccattgttgagtcaagtttgagttcgtagaactcaaacttgctcaaccccaaaaccagccaacaacaacagtccaataaagcttaatacatcaaacctaatttgtagaaaccaattctaaccgaaacccaaccaaacagtagctaactaatagttatgcataattcaaaacttcaggaaaagttagttctagggctcaccttagctttcctcctccaaagcttcttctaaacccttgaattccagctagaatgaacaaagaaaaaaattggaggaaccttggttctatggctgctac

SEQ ID NO: 12338 - DNA, 524 bp, Cannabis sativa
aaaaaaaaaaaaaaacaaattttaggatttttaatgattttagttttgttttatttgccattaagattataatatttacttaattacttttttaattttatttacctattttgttaaaaatttaataaagttgatatttaattaaaaaaaattcatctttattttaaatattttataattttatattaatttaaatgtatatttttattattttttaaataacttggatatatttatttttattttgattattttatttttttttaattttaaattaattacttaataataataaatacaaggtacaatagtcatataaaaatacattatgatcttaagttcctaattataattttttctacaaaacactgtgacaaaattaattttataaaattataagaattcaaaatgatattaaagagaacacaaagtcgaagatactataaataaactcttaaaatataaatgatttatttatttccatccaactaatattttaccaaacaattattattattattatt

SEQ ID NO: 12339 - DNA, 745 bp, Cannabis sativa
tcaccaagaaactagtttcttaaaaaccagtttcttagtatttttgcggtgattttttcgacgataatgcaaatattgatgacttttctggcatcggtagcaactccgacgactttttcggcgctgatagcaaactccagtacctttttcggcaccggtgacaactccgacgatcactgtagttttatttgttttaaaaaaaatatgaagggaattttaatattttttatggtaatttaatcccatatatatatattaaaattttattttaaataccatattttccctattaagtttcattaccatatttatctaaactagctttattttttccatatttatggaattaccccttgaaaaagggaaatttgactaaatatgcttacataaccttcaaaaatttcccctaaacttataattaccaatatttgtaatctaggtcaactttaatgtcatccccaaattaccctccccatttacatcacctccctctctctcttctcttcccattccttcttcctccttggaccccacatcggacctcgtctgaccccatatcgaacacaatcagaccccatactgaaccctcacattagaccccaattcggaccccacatcggaccccacatcgaatcccacgtcggaccccatcggacctatttctcctaccttgcaaccttacagattcattgaacccctcggaccccatcggacctacattgaatgtgcatcggaccttgcccaa

SEQ ID NO: 12340 - DNA, 575 bp, Cannabis sativa
ctaaaattctacaatacattaaggatccaccgatgcacccctctttatttcagcatatgagagaattttttagtttaatttgtttcatggtcgtctacgttgcagttatttaggacatcttgtaaaattttgagaaattcaaaaaaaaaaattaacacgccgaaaataggatttaaacagtctatttcacgcgcatataaaataaaagagtttcgtgtgcaataggcagtttgaaccttgttttcggcatgttaaattttttcaaattttttgaaattttgtaagatgtcttaaataactataatatagacgactatacaaaaattaagctaaaaaattatcccagatacaataaatagaattgcatcgattgatctattttaagggagtgtattgtaaaaataacatttttaattttataaatacaaataataatatatatcaatatctataatataaattaaataatatataataataatttttttaaaaaaaagaatgccgtagctacagtgccacgacatatataccgtccactgtagccacacgatatgttgaattggagagaaagaaag

SEQ ID NO: 12341 - DNA, 618 bp, Cannabis sativa
aaaacagtttccccaattaccgtgtacagctgttcgaattatcgtggtccggatttaaactacagttttccaatttcaatgaacaaccctaatatatatgatgcacttttaatgggtattacctgtaagtgggtaatattagaaattttaatatctcataataatatatttttgacatagtgtaaaaagaagtagtttttgatataattaagtagtaaaattaagtataaaaattcaaaattttcttttattattcgctatcggaccaaaatctaataatttaatattcttaaaattaatatttatagttaaatttgtttaatatccatcaatgaataatacacattaataagtgttccatatatatatatataaagtgtaactatttaactaaagactaattagtaatttttcctcctgaactttgacatgtagtaaatcgtacccctgaacttttttggctgttaaaaattctccccaaactattgagattgttaaatttatttaatatccatcaatgaataatacacgttaagaggtgttccatatatatccataaaattattgctttcatgtttttttttaactttttttccattagaattaacatcggtaaac

SEQ ID NO: 12342 - DNA, 964 bp, Cannabis sativa
aataataataataataagagttttggagtttctagcggttaaacttttttaattatggttttatttgcacttaatcttttaagttcaaattttagagataaagcttccttaattattgaactgttaacaaatggataactgctaccatagactgtttatgtgtattttcttgtacacgtaatacgtttatattggtacacctaatattattatttcaaaattataaaaataaaaagagtttttaacggctaaactctcccaattattgtttcacatgcattcaaccttccaaactcaaattttgacggtaaaactttctaaattactgaattgttagcaaatttaaggtgtgatctggtaaactactactactaccataaattgtttatgtgtacactcttgtacacgtgatacgtttatattagtttacctaatattattatttcaaaatttattttaaaattataaaaaaataggaaaattacttcatatactattctttatttttttttcttcaaatatacggtttagattgctctggtggtttctccggtagtttctatctgagttgctatacgaattttagttgcgatttaggttgctctgttagttcctgtaagggtttctgtgtggaattccgtaaaaatacaaaaaaaaaaaaatattttcaagtgttaaaaatgaaaaaactcctaaaaaatattataaattttaaaataataatattatatttatcaatataaacgtgtcacatgtataagagtgtacacgtactcagtttatgttggtagtaaaatgtgaaacatagataatactttaaatttactaacaggaagattttaccattaaatttgaaattaaaaaattaattgcaaataaaataatagttgagaagatttattcgtaaaaaattctaataataaacaaataaatgtatcacttcaaaataaataataaataaata

SEQ ID NO: 12343 - DNA, 503 bp, Cannabis sativa
tttttgaccttgtgtgagagtgattgtcactttctgtcagtatcacattgttgcacactattatttggatagctaccaaaaaggatcgtgtttctgtgttgctgaatgtgttcacacacaatgaatatcgtgtcaaatcagtttccttagtttatcgttttatgtaaaacaggagactttcgtcatccttgatttggagtggttggcaacattctttcagttggtatttcagttgtatttgagttgtttcacggttgcattgtagttcctccatcatcatctgcactagttcaacaaaagtacaatctcttgatattaattctacacttgatttgtaatcaatatagtgcttattttcatcccaatgatcattactctgtaccaaaatttgcagaggttccatacctaaaacttgtgaattaattttttaatattgttaagcaaccattttaatatatgaaaacaacgtataaataactattttatgacaataatcagtaaat

SEQ ID NO: 12344 - DNA, 533 bp, Cannabis sativa
  modified_base (305)..(307): a, c, t, g, unknown or other
agagagagagagagagagacaatatagaagagagaagttagagtgagaaatggaaagagatatctgagaaagagggggctggattgggaaattgtattgagcaacagtttggattatgtggctcgggttagtgacttgatgagtgttgagggattataccatggatatcttgctgtgattatttctttgtagctcctgagattgatatctcttattctcattatcaataaagattggtggcaatactttcacactggagtatgactaagttcacattgaacttaggatcggaaccagtataaatnnntgtgttattgtgtctgacaaccatttagattcatctgtgttatatttttttggtttatgtgtttgctagtttttgttcttgatttgtttgttttgatttaacttttgtttgtttaagtgtgattttgaagctgaaattaccgtggttaattcctatgtatcggagctaaatttcctacaattttatttattaaaatgcactgtttctcaatttcagtgtctctctc

SEQ ID NO: 12345 - DNA, 532 bp, Cannabis sativa
taaatcctaattattcacaattagatttccagaatattacatcccgagtttaatcgtgccattcactgtccaaaatcttatcggaatctcattgaaaaatcgattgaaggtttcaggggccgcgactttaattgagtcattctcctcattggcgacacgagtcaggcagggctttcacaggtggaggtttcagagggtggtcgttctcttcgtgcaacgtgtgttgtcagccgatgatggaaaatcggtgtcgaatctggaggataaaccaccgagagtgaaggtgagggagagagagaaaatatgaacaatttttagggataaaaagagaaaaaaaaaagaatattatttttttattattgttttatttttaataatttttatattatttttttataatattttaataattaaaattatgtggaccactaaaaatgtgtcacatgtacattagtatacacttcaactgtccactgtggcacttaactgagatttttggatggaggaataaatagcatgacaaaagtgagat

SEQ ID NO: 12346 - DNA, 513 bp, Cannabis sativa
cggcgttccaaacgagccctaagaaatttaatatatctaaatatgatgatacctattttatgactgacaattgtaaaagttaatcattggtggcatatactatggacatactatagtattagaaagtctcacattgataatatataaaaattaaatactatacataaaatacataagttactattctcatttccaattaattttgattctaaaccatacacttctgtattctaagacataatagactttttacatgtttacagatttttttttatatattttaaaggatttttcttttattaatattatttacatttttacggaattttttttacaggttttcacttgtttttttttaacgtaaaatgttgttttcatgttattttcccgcgacaacgacattaaaataatattattttgaaataataaaaaaaaataacactctatatagttgtaaaaacaaattatgttgctttctcgtaacagtgtaaaaaaaaattcttaaaagcaatg

SEQ ID NO: 12347 - DNA, 775 bp, Cannabis sativa
actggcttctgccccattgcattttgttatgaagtctgtcagggcctgtccttttatggaaatgcgtggcaagtagtgtatgtcaatctggctcaattccatggcccatttaaggagtcttcttgaagcctccgacttctgcaagacttgccaaagtggatggtttgtaagtaccttaatgggatgggcctagaagtagggtctcaacttccttgaagccatcaggagggaaaaaactaacttttcaattaaaggataccgtatctcagcccctatcatgcacttgctaacatagtaccttggaccttgtcctcttcccggactagggctgcgctgacaacattctcggagacggccaagtatagtaacaagtcttctccgtgaactggctttaacaataccagtggtttagccatgtgctctttaagttttttgaatgcctcctcgcattcttcagttcattcaaatttttggcacttctttaaaatgttaaagaaagggatgcacttgtcagttgatcgagaaatgaatatacttaaggcagcaacctttcaagtcaagctttgcacatccttgtgcttcttgggggaagacatgtttaataaagcttgaatttttttggggtttgcctctattcctctttggctggcgataaatcccagaaatttccctaacttgactccaaaagtgcacgtcttcggattaagtttcattccatacctacagaccacttcgaagcattctgtaaggtcgtctgtatggtccatgcatgtct

SEQ ID NO: 12348 - DNA, 618 bp, Cannabis sativa
  modified_base (347)..(347): a, c, t, g, unknown or other
tttttttttggtatttgtctttgcaattatatcccaaaaatccatatctaacttacccatctatctacaataaattaacaataatgaccaaaatatttgaacgtgttcactctattagccacttatccttttttgctagactgcattaatgtaacattccgatattttattttacaaacgtacaattttcatacatgatttgaaaatattcaaaactacttaaaatataacagttttgaaaatcatactacaaaaaactactatttttagtaacaaccttttagttttaatataaattttttataaataaatgtaacttttagtcataacaaaatgttacttgtgantaaaacatagtatttaattacaagttgtcactaatatagttttcgtcacaacaaatattgtgactaaaaatacatttagttataacaaattgtaatttttgtggctaatacatttatccacaaaccttttactcataacaccataataataatttataattagacatttttttatctcgactaaaagtaaaattttttgtatagtatcaaaatggaaaaagagaaaaattcttcatttataaaacaaaatacagtaaatatgtgattttaa

SEQ ID NO: 12349 - DNA, 683 bp, Cannabis sativa
ttccatgtttgggtccgagttctggtcccgagtctcagtccgggtttggttctaggttcgagtgtgggcctatgtctaagttccggtcctggtcctattacagttccaggtccgtgtctaggtccttgtcccggtcttgttcataggtcctattccactctcggttctggttccactttcaggtcatggagtacgggttcgggtttgagtttgggttcgggtctagttcctgttctgggtctgagtccaggtacgggtccgagtttatgtcctagattctgacaccgactatgggtcgggtccaagcctcaagtcttgatttggatcccagtctcggttctcggtctagttctagttcatgtgtcaggtctcgagttagatcctaggtgtgtgtccgggactggggtggggtcctgggtctcgatcccagttctggggcccaggtccctatcccagttaaaggttcaggtcccggttcttgtcttggtttaggtctcagttcgtgttcaagtttgggtcccattctgggttctggtcttggtttgggttcgggtactggtcttggatttgggacccaaacttgatcttggactcgaaccaagactcgaacttggaccctaaccctgacccagacgcatatccatacttggatttggaacgggacccatacctagactgggacc

SEQ ID NO: 12350 - DNA, 669 bp, Cannabis sativa
tcacaaccttgagtgtataatagcaggaattaccgtgacttaaacaagatattacacttttgtcgaaaagtttatttttcctatctctaagcactaagagaactctcatagaaatagcttatggaattatcaagtcttttagggttttcttgcaaaattcttttttgatagaaaacttggttcattctaaatgagcaccaaagacttctttttatagtgtttaggtgatcacacttagaattaaaacacaccacactttatttctctcacacaaatgagtattaatccattttgtaataatcatatcatcatagttttgaattcctaaatcaaattgtgtcataacaattttattacactaattatgtgatcaataaaagagttacaagtgacaacaaatgtaacttctctccaatttacaatatgtaggttataaagcgtaggttaaaactataggttatgcatttatttaacatacacttaatatatattattcacataataatatatattgtcacattttaatctacatgttatatattattacataatataactatctcccactagactaaaatgtgtgatacacttgtaatatttatgttatcaatcaaaatattatatcaaaatataacatctcccacattgattgactaaatacacactatt

SEQ ID NO: 12351 - DNA, 568 bp, Cannabis sativa
tttttcttaaagaaaaaatatatagtattactacatacatttgtaataaaaaaaataatatttataagtatcaaggctaattataatttttacctttaaattttaatatgtactaaatcatgtgcttaaatttttctgatcattaaaaattctccctaaattattaagattgttagatttaaagacttttatttaatttcattcaattttactatatcagtgattgtttatgtactaaatcatgctcacaaactttgatatctaccaaatcataccctcgaactttgacatatactagataatgtcccctgaactttcatccatgttagactttttttactcaaattagacaaaagtctttaaatccaacaatcttgatagttcgaagagcatttttaacgaccttaaaagttcagggcataatttggtacatgttaaagtttgaagataaaaatcttaattagcctaatattaaatttggtgtaatggttaaactagattacgagtatttttttttctttttaagtttacttttgtctcctactaaaattatagggtaaataccatt

SEQ ID NO: 12352 - DNA, 821 bp, Cannabis sativa
ttttttttttttttttattactttgatctggtcgttattttcctctgattagcatgtagttctctcttctacttttgagggaatcgtatcatgtttgctaggagacctcctggccctcctggccatgggaagcgtcaccacgaccccactggtcatggggagaaagatggcctaaaccacactgctctgggtcaatacaaaatcaatggctctgccatttgtcaaggactccaatgttattggagtttcagaacaaaagtgcaatgtgtctactcttacgcaataaagttttctggctaatattaggttaatattaattgtttgaaatgaaaagtttaggttgcctgtcagttattgctctgcatgacagtcaacataattaacccgaagtcgatttgatgatttaatacatggggcacaatgtgtattagttgcaagtttgggaggttgaagtaagtttttccactggaaaaagctataactttggttttagtcaaatataaattctgcagtcttggagagactatgatgcatacttttttgcgctattcaaaatagttggactaaatgatatttagaggagtgatctttgcatgtttgtactttgtactgttgtctcctgcttcagatcatgttaaggggaatataataatattttgttattatgcagctgtttgcaaagatcaaagtatgacatcggagaagaagctgttcatcgattttcattgtccgcggaagacaaagcgaccctagaattagctgagtgggtggataatgctgttagaagagaatctgtatgaataataacccccccccccccc

SEQ ID NO: 12353 - DNA, 540 bp, Cannabis sativa
ttccaattaatcgtcttttatatttaatgaaatccatttcctttccaataatacaaacaaaaatgtcttaaaatagaagacctcaaatatcaatgcacacacaaattcaaacagagatgaatcactattagacttggacaaaattataaacactacactgacacaaatatatttatatgtatatcaaaatcattgtatacattttcacgtgtgagaatagtatgcgtggatcaaaaatagtattggcaatattgtcaggtagagtacagaaatgcttcctacaacagtaatttttttttacccatttaactcatttttactgtctgtgttaattttgaaaaatagagattttttttaccctaataaatcaattccttttcagtttaggtaatgaagacagaatagaacccaaactctatttgtcagtctctttggtcatcatcacctaacgacaatcataaatttgactccatatgcaatatgactcaaactatatatatgatcatgggtcttggaatcgtattagaatagatttaaaat

SEQ ID NO: 12354 - DNA, 836 bp, Cannabis sativa
tttccagagtatctcaaagcattccgtgaggtcttttatatggtattcacactttaccgactttattaacatatcatcgacatagacttccatgttccttccaattttcttttcaaacatttcaaacattccattcaacattccattcaccattccattcaccagtccattcaccagtcgtttcaccagtcgttgatatgttgccccagcattctttaaaccaaagggcatcactttgtaacaataaagtcccatattggttacaaaactcgtatattattgatcaaggacattcattttgatctgtttatatctagaatatgcatccataaatgtcattagcttgtgttttgcagttgcatccactaacttgtcaatccttggtaatggaaagcaatcttttggacatgcctcattcatatatgaaaaatcaatacaagttctccaggtgtcgttttgtttcgggataagagcaggatttggaatccacaaaggatataatgcctcgcggataatatcgttatttaataacttgtccacttcctctttaagtgccccttgtctcttagaatcaaggggtcaccgtttttgtattttggctgggtaattggggtccatattcaagtgatgggagattattttagggtcaatccctaccatgtctgaatggctctaggaaaattgatcctggtttgcctttagaaaatttgttaactgctattttagtttttcatctagatttttcccaataaacacacatttagtgggattgtcttgatctaaaacactttcttccagttcttcgattggagtggtttttctcgtcttgaattcta

SEQ ID NO: 12355 - DNA, 795 bp, Cannabis sativa
ccgtgagatttccacccaaagcgtccgagcagtttcatctggactgaacttagacgccgaatagtgagtaagttttcaatttcttcccctttttactttgcatgttaatttatgggtttcatacatgtgttgttgactttgctgtagaagataggtagaaaatcaaggtttaaaactttgcgattttctttttaataatctgtgcaacttcatggttcatgacgttggcctttaatcgcacattgtccgcctgacaccttgtttattcaaagcttcatgaaatttaacccttaagccaaaaatttcaaacttctgggttttaagttatttttgaatattctcattcttttaatctggtgagtactccttgtcggcatatttgcctatttattgttcgatatcctggccaaacactcatctcgtgtgttgtcttttgtagatgaattctggtgagttttggggaagtgaacaccgaattgaccaggacttgcttcaacttctgtatgaggatcacgctcctctttgtgccagtctgtcctcttcaagtaacggacttttcacttcgagcttcgaagattgggaggtgagtagcgaacgttcttctacttcagaatccgtagtgcaacaccactattactccaagcaaatcgctggagagggatacgaccgcttcatttgggaattgaagaaaggttggaggcgttatctgcgatcgaactggacatacattgtctggccaggtgttgctgacactattcctattggttgtcaaagttcggggaactttggtattcc

SEQ ID NO: 12356 - DNA, 517 bp, Cannabis sativa
agcagctcacttttttgtgagtgcctctatattccatcttgataaccttttcaatttaaacactctttcaattgatttgttactaagtttggtaactgatttaatcgtttagtaaaatgataactttcatttcaaaagaaaatatatatgattatacggaaatttaaatatttttattattttttaattttatttataaaaaatatagttttttaatgtatttttttgttatactcttgttaatttgtttttaattttttattatttgtatgttatttttattgttattttgatattatttgaatgttatttttctattacttttatataattttttattaattctatagaccaccattcaaatgttaaaaaaaaatatttttaaacataaaaatataaaaattttacaaaaaaataaaataatattttatgtaattatcctttgataaaataaaatcatactatttatccaaattatcaaaactctatgattgattaagatttgatagttactagt

SEQ ID NO: 12357 - DNA, 713 bp, Cannabis sativa
aaaaaacagataagagagaactattataaacataatttacacacaaacatagcatatatttaggagaaaaaagattattgagccatttatttaaaaaatatatggtattgttgaaaactactaaaatatatgtataattttaattaaaaaatatattttttgagccccatagtttggtggatcttaggcgcaggtctaatccgtcttagctcagattcgaccatgtgtggtaaattacttttaataagtgagaaccatcttaaataaaaatgattaattgacgttaattactacataaatatgtgtcaagtttatgtgcatgtgtacatatcattactctttttttacctacatatcattactcttattattattattgcatttttttaagaaaatttacggtagaagtacttaaaaagttcactatgatgcagattagtctccaacctcaaaaaataaaggcaatagttcttaaggtcacatattttgtaattctgttagccttaaatttgacagatccgttaagttattcataattaacacatgttgagtcatattggtctaaataataattttaataaaaaatacttaaaattaaaagaattaaaaatatattttaaaatataatttcttttaatatttttttctccttcttcttctatctccagccacacttgaccctttttcttcacttttttttcctcaaactcaat

SEQ ID NO: 12358 - DNA, 589 bp, Cannabis sativa
tgtagtctcaattaattagttttattaatcaattagaattttctataagactatgtcttgtttttgaattttcactaagcaaggacttatttgagaaaaaaagaggatttagagattattaattaattaagagactttgtaaggtcttattaataaataaattaaatgaaaattttatttaataattaattatgattattatatagatagaattgacatttgtggagttagaattaaaatatagtatttgtgaatagaaagatgagttaaataaatgacaaaattgaaacctgtggggcccacaatatggccgatcacttaaggttcataaagctattatttttatcctttttttaatgtcatttgaattctaaacctaatcctagtatctcactataaatagaataagatggctctttatttctcaattcattcattgacatcagactattttgtcagacagaaaatagaaaagagcctttggtaatttgactttcctcttcttcttcttcataaatttcgaagcctatggtggattgagagtatgtccactcatgtcaaaataatccctagcatagtgaggaagact

SEQ ID NO: 12359 - DNA, 572 bp, Cannabis sativa
gtcaaatgttgcgaggagataggggttatacgggaccacccatcgattgtctaagggtgacccactaacattcacagtcacaccattgtttgagcgcctatatattgggaagcaatcatttccaacagaggtaaatggtgcatagctctttggataattacttttgcaacgtggtttgtcccccttcatgcaaacattgtgtgatttttagtctccgcagggtcgatgcatcatgtgctttaaaacagccttgtgcatgtggaggttggtatttttatcaggaatctctacagagacaatctcatcaaatgattcgggtgcatgtagtctccaatctctttgcaagataattaaaaagtgtgcatgcgggaggcccctcttttggggctcaataacgtatacatatactgcaactttgccaaatatttcccgtttgaataatttatgttttaattcttccaattttgcatgaaaaactcgagcggttagatcatgtctattctgcagtgcaagcaatattttatttttttatatattagagataataataatcatgtaaatatatatttaca

SEQ ID NO: 12360 - DNA, 1121 bp, Cannabis sativa
tgtgaaataaccagagcacctctacctactttgcagcttgttaatcgaagattttgttcataaaacttcaacaaggacgataacctttctgcacaaattagaaagagataatgagataatggatctccttgtctcaagcctctattgggaatgataggacccataggatgtccaacatgagtcaccttgtaactgacaggactcacacaacacataatcaaagaaaccaaccttctgtcaaaccccattcaaatcaataaagcttcaataaaaggccattcaactctatcgtaatcctttctcatgtcaagttttagagccatttaaccatccttcccaactctctttcttttcaaccattgcataatttcaaatgagaccataatgttatccgaaatcaaacgcacatgtaagaatgcactttgagcatcagaaataaccactggcaaaacaaattttaatctattggccaacactttagagatgactttataaagtacattacaaaggaaaataggccgaaactgggatatgactttagcccgcaaaggctctgcccatacgtgtcagactacggacccagtaaccaggcttttgtaggtacaatgttagaggttgttcccacgacacgctatcgtacagagcatgtgtgtctcatcgtacctgaccaaatgatccaatggctagggataagggaaattcaaaaaggaaaagcactgggacgacacgcttaggaagtccaacccgtatgatctgacacccttaaattccatatgggaaaaatgccacctaccaatccaatggtcgaatttcgcccaaggatgatcaatccatactagcacaagaagagaagttggcctataaaggcccctaaaaagcacgagagaaaataagactttttctagagagagagatcccttctttttggggcttaactcattcttcaccattttgggcaaacacatttgtattaaaccaggcaatattatacctaaaaaatttcagaatattcctactaagctttctcttcttcaagaggaacaagggggaaagagttcgaatccattgtatttttatttgtataaatagttactggctgatgtgcccaataaaatggactc

SEQ ID NO: 12361 - DNA, 697 bp, Cannabis sativa
  modified_base (469)..(471): a, c, t, g, unknown or other
aataaatgaaaaatattttcaaaaagaaaaatcaaaatctattcaaacagattgtcgatatgttcaaacagattcattgcacctggataaattttatgcaaaatttccttatataaataaggaaattaataaaacatacattaaagacacaagctatacattgttccttggtaaagaaagttaaaataagattttttttgtggttaaaccctctcaattatcactttatttgcacttaaccttctccctccaaactattgaactgcttgcaaatttaaggtgtcatctatttttacagttaattgccaatatagactgtttatgagtagtacacttttgtacatgtgtcaaatttttaggtacacctaatattattattttgaaaatataaaattattttaaaattcataacattttttatttttttttaaatattattttttattttttttataattttatttaattnnnaaataaattttgaaaataatttttaaataataatattaggtgtaccaatataaacttaccagtacaagagtggacacagtctatagtgacaattaaccgaatgacaccttaaatttgctactagttcgataatttaaagggttttaccactaaaatttgagcttgaaaaattaaatacaattatacaagtgaaataattttgcgcaaaaaactcaaaatttaaatg

SEQ ID NO: 12362 - DNA, 638 bp, Cannabis sativa
ttgaaccaacaaaatatatatgggatttttacaaaatactagattttaaacacaagtttataattcacagagaaatttttataaaatacttttttttataaaacaactgtaaaacactaaataaaacaattaaaaacaacaacagtaaaacaactaaaaaacaacagtagaacaatagatgaaacttaacacagtcaatagtattttttaaaaaaaaatttgctccacagtaaaaaaaaaattgaaaatttcagtatgtggtgtaaaaatctcaatatatattttgcaacaataacacatactccactcttctcacctcaaccggaccttcattattctttatatttctttgtagaaacccaccaaccaaagtcgtcgttaggaatgtaatgcggtagggtcgaccccgctatgccccgccaccaacctgttgggtcccattaaagttttattaacggggcgggttagccccaatccaactgaactgagacccgccctgattacatttttaactaaaaatatacattggttatttgtgacaatctcaaactagtttctttctctttctctttattttcttgattatgttgatgtctaatgttaacccatgataagttttcaaagggaataaattagaa

SEQ ID NO: 12363 - DNA, 517 bp, Cannabis sativa
cggggacacaaacatagatcctcggtttggggatcttataagaagcttcagacctatagaagagttggaaaaagaggaagttgatcccactcaccaaacaaatagactaaagatcggtaaaggtttggctccaaaaatcaagttagtcttgacagaatttcgaagggaaaacctggacctgtttacctggtcacatggagacatggttggaattgacccctctgtgataacccatggactcaacattgatccaagcatctagcatgtcaaacaaaagaggcggttgctagacaaggagcatgctcaggcgctcaaagatgaagttaaatgactgagggccaatgacttcataatagaagcattgtacccttagtgggtgtccaacctagtgctgctacctaaacccaataagaagtggagagtctgcattgacttcaccagcctgacaaagcatgtgcaaaggactaattctcgctgcctagaattgaccagcttgtggatgccacgactggcaatg

SEQ ID NO: 12364 - DNA, 504 bp, Cannabis sativa
ctgaagctgctattattcttggtacccccattactcagtcaggtggggatgatacatggtactggattgcagaaaagaatggtttttactctgttcgtagtgcgtataagctgcttcaagaccaaaagcctcaatcggacaaccccgagggtcatcatttttggaaaaaactatggggtttgaaggtaccgcctaagactaaggacctggtgtggagagcagcatcaaattgccttgtaaccaaggtgaatctttgtattaaaggtcttgattgaaaacacttgtcctatgtgtggtgccttcgcggaaacggaaatgcatctcttagtttcttgtccattcgcttggtcatgttgggagttctcgggacttactactgttggcagggagtcatcaaccttactgtcgtggctggaagcttctgctactcgtgtggataacgaggctttatgtaaaattgtgatgatatgttgggccatatggtcagcaagaaatgatctcata

SEQ ID NO: 12365 - DNA, 596 bp, Cannabis sativa
tggtgtatgtgtgttgtagacgtaaggtgaaatttaatttgaatgcgcgctgaagagaatatcgttagaggaagaatcaaaggacaaggcttacaaccacgcctcctaaactctaagatcaaggaggtacgactagtggagggaatgcacctacaaggtctaaggacccgaccaagggtacactaaaaccatcacgtctgcgaccggggaccacctctacgaccgggaaccacctgacaccaaacaaaggtacgaggcgcaagatgacctcctgcacttgcaacttaataaagcgacagcttgtctatttgggaccaccatgtaactcaagcaattaaagcctataaataccccattctcaaatgtgagagggggtgggaagatcaagcttgtaatattacattgagagtaaatagaaagtttatcattttctcttcattttaagatagtaatttgaatttatatttcatttttctcttcatcttagatctgggcttgaagtatagtttagttttccagtcaacaaattagttgacgagttctcaccatcaatagtacgtaattacaaaggagaagaatgtctcttaaataagaaa

SEQ ID NO: 12366 - DNA, 582 bp, Cannabis sativa
tagctttaattaacaatggtataaaatgtagtaaaatccaaacatatatagtactgaaagaaatgttaagtgacacactttaaaaaatcaatcactaccaaaaataacatatatcagtgtaatttaatattaaatttcacataataattaataaactatattcgtatagtattgaccataataataaaaggaatcctcatatatatatatatgactttcaaattggaataaattaatagatactttattagtttggatactgtaaatagaaaaaaggcatatatgtctttctctaacaactctttccctctctttttataggtctaaaatattaatcagtatagggatgggttcaagtagattagctatgatgaactttgaaggccagcgcattaattaatattattcatcatcatatataattcaattataacatgtataatttatctaataaaaaaaattataacatatgtaatatcttttgtggtaattaactgatcctaatcctgtaatccatatgaaattatatattctgtcgaattatatattctgttgatagtaggatagtggtctactatggtg

SEQ ID NO: 12367 - DNA, 514 bp, Cannabis sativa
atgctgccttacctcttaaattaaaacaatttgtttggagaacttgtaagcaccttcttcccactactttgaatctgcataatataaaagacatttcttttttttttttgagtgtaacgtaatatggtattttacaatcatttattagcttaatagcttaaaggtcctgggttcgaacccatgacttctccatgctcttattgtgcctatcagtctgaaatagtgacctattccctacttgagtattccagagataggaagatatggaaatacgcaccttttctagaatcaaaataaacatttggatattaaagactatatgttaacgacttttaaaacaatgagtaaatctgattgtgaaactgttttaggtcttttatggatgatttggaataatagaaatttaaagattttcaggtctaattatcttccagctaaagatgtgtactcatggaattcaaagtatcttcaagagtataaacaagtacaaagaaatgtttataaccttagtaat

SEQ ID NO: 12368 - DNA, 1502 bp, Cannabis sativa
ccaaacaaaacccgaggtagctcacaggtaatgtgcccctagtatgcttagtgattcatcaaatttatgtgattatttacacttagtgtgattttgtagagatgactttcctcaagagtgttctagccctcaatcgcaagtcgagatctaacaaggagcacgtaactccttcttcagtgaaccctcttctgaaaaggaagagtgatgttgtcaagactctgatcatcaacttgtcaaagaaacaatagaaaatttttcaggagaaagggaagaagcttgtggtggagctggcggtaaaagctcatgactttatggccctctaggagctctacatcgatgatgatttcttttctaacttggagaagaccccaattatagatttctagagtcgcgcctctcagcacttggtccttgggatgacaaaatatgccttttcctttgcagacatgtagtaaatgctcaaggattgcgagcttttgaagaaacaaaaccttgctcttcaagaagattttaagaagatcaagctcaacatagccaacaaggaaaaggaaatcaaggatatcggcaaggcaaagggcaaagtagaaaagaagatcaaagagttggaggaccaagtcactgcccttactcgcgacctgagcaaggagaaagaagagaagaagaaaccttacgactaggcagttagcgattaaatttacactactttgaccaagctacctaattttgacattgctgtctttggcactgaggcagttgagatgacaaaggcttttcacagcatgtctccaaccgaaacccaaaatgttgagagtccttttcttgagaatgtgattccagatgccgagaccaaggagaatgctagcaagttcatggagaatgttgatacccttgcttctaaaaaaattatacattgattaatttctttttttatttattttcttagcggtacaagggtacttgcattttgtacccagatatagaggaaatggcctcgtgccttttattttctaacactttttgaacattatatacctcagggatatttatttttctgaaaaatattttaagtatgtttatctacgatttaagcttttttagcgcatttataaatgtaactgagtgaattattattaacttaactttttgatacaaaaattttgagataacgatctcttatagtgcaatttatgaatatctcggtgttctgaaaaaataagaaaattattaagtaaataaatatctcggttttaaatcgtcgcctatagtataaggcacggttatgaaccgtcacctatacccagttataggcgacgattttaaaccgtcgggaacccacattagcgacggttttgaactgtcgcctattatgcccgttttacgacggtcgtataggcgacgattatagaaaccgacaggaatactttaaacgactatttaaaaatgtcaggaaaacccatttttgtagtagtgagaggatgtaatacaaaatgagacatagttct

SEQ ID NO: 12369 - DNA, 549 bp, Cannabis sativa
caaaaataaaggaaatgcttacccgagcagcctcttcaaaattcctcccatgaccaattccaaggacatatcgttgtccaccccagacagatgatcgctcacctcgggaagtgaccgatcaaggtagtactaaagcatgtcctttcctttcttggcctctgtgctcagtaccacggctgttgaggaagtcttggtctaaccaaacccatccgggctccccctttggaactcctagattttgagaccttctggactgagggtccatggcaggcactacctcagagaggttaattacttcatcggctgacactttctctttggatggagcctcttcgccttgagatctattgggcaggggagtcttgcctgagctgtcaccaaccctcttcttcaaagcttggagtactttttgggacatgactgcacaaacaaaaccagaaagttagaagcaagtgcaatataaggcatgtcaggaaagaaataaatacaagtcaaaaataccctgcacgtgggcaagagcattcttccgaacgagtagggatggagcct

SEQ ID NO: 12370 - DNA, 817 bp, Cannabis sativa
gtaagtaaggaattgaaatttggagtgttcgacaaataaaaatttagaaaaaaatttaagttgcttttacagcatcctcttacattgttgagttttattatttttagtgtggtagttgagatattttcttttaaaaaaaaatattatttagtcattttttttaattatatatattatagttatttacgactgtttgtaaatttttaaaaaatttaaataattttcaatactaaataatatttaaataatttcctactacttgtacaaaaaaaagtacccacgcttgttatataatattttaattttattttagtattataaattattctaatttttttaaaaatttacaaataattttaaataattacaacatacacaatcataaaaaaattaaaataaaaattctcctctataccaaaataaatagcaggagatgtaagtataaacttaacttaaaatatttgttaaaaatcaagttgataagattctttagtatttaccatttacttttctcacatattattctttagatcaatacacactcaaataaactaaatattaattttattttttaatatatcacatcaaattaataagaattattaaaagctatctaagattctctgccctcaatatcatattattatcagtatatttagtatatttagtattagtttggtataacttaaaaatatatcattaattaatactaaaacgttgtttataaaaagtattaaatattattgattcaattgtgaatttttcattttttttattaatttgtattaaactattcttattaataagagtttaattt

SEQ ID NO: 12371 - DNA, 1399 bp, Cannabis sativa
  modified_base (726)..(726): a, c, t, g, unknown or other
  modified_base (1138)..(1154): a, c, t, g, unknown or other
ttgctttggtgaaaaatatagttccaaaaagagtagtttggtaaaatatacattttttctttttacaaaaaataacaaactataataaatttgataataaaaattataaaaatacatttattcaacatcaacattttttcttaaaaaaaatatatatataataataaaattattttatataaagttaccagtatatttgttttgctaaatgataaaattgaccctaaattttataaaacaacagtaaaatagaattctagactcaatttttaagaatttaattttttaatataactaactttaagataatttttaacacgaatagatatagaaaatgtaactaattttatcataacatttctacatcagattattattaaattttattttgacaaaaaaataagctcagagtcctatttgtacaaaaatacagggttcattttgtcatttaacaaaataaagagtctaattagtaaattctgcaaaatacaatgtccaaaataatatttaaccttaattaatatatagattgtatatgttatataaagttaatagtataatgtatatataccaccattaaacacctaatagaaaatagggtaaataccattttagatcctgtgttttgtaaaagttaccaattggaccctctatttttttaaatgataaaatggaccctgtattttttaaaatggtacaaataggatcctgaattgattttttgtnaaaataaaatttaattataatcagatctaaaagtgctattacaaaactgtttacattttctgtatctgttcgtattaggaattgtcttcaagttaattatattaaaaaaacaaattgttaaaaattaagctcatggtcctatttttactattttttaaaatataaggctattttgtcaattaacaaaacataacgttcaatcgctaacttttacaaaacacgagatccaaaatgatatttatcctaaaaaaaatatatatatatatattatctaatctaagaataataatatattatatgataaaaaagaaatgagcattgttataaggcaccagtagtgcctagcaccttctcgacatgtcgcgttgcgattggctagcaatacttcataaaaactattatattaaattannnnnnnnnnnnnnnnnagttggaccaataacaatattgacacataaggggtactagacacaactggtgccctttagcatttctcaaaagaaatacattctataacaaaatgtaccaacaattcacactaacccatacaaaattgatttaactttaaaataataaagacaaaaatgttgctcaaatctcccataattcatttataaacgcatagaaaaatgaataattaataaatcaggaagaattaataaattacctggtt

SEQ ID NO: 12372 - DNA, 1482 bp, Cannabis sativa
agaatcagctcaaaggtgaaacctcaaagtaaggaaaatgaaataaacaacttttttggctttcaaggtaattttttctctcatctttataataagtttttgatatagctttactgtctgtacaaaaaaatgtggctttacttatgttcactctgctatgaatttatttatattaaaaatatagtttttaataaaacatacgtccacaaaaatcttctgataatacgtctaagtctacattctttcccattttctttttcttctttcttctcctattcttcctctgttcttctttcttctcattttctttactttaacagtgaagcattctcctttcttctccttactcccttctaatcaaaaaaagaaaaaaagaatcagcttaaagatgaaacatttaatgaaggaaaatgaaataaacaacttttcttggcttttgcggcaatcatttctctctactttataacaagttttgtaatatagctttactgtccattcaaaaaaatatacctttacttatgtcgactctgttatgaatttatatatattaaaaatataggttttaatagaacctatgtccaccaaaatcctctgataaaacatctaagtctatattcttcccccttttctttttcttctttcttctcctgtttttcgtatgttcttctttcttttccttttctttactataacagtgaagtcttctcctttcttctccttactccattctgataaacaaaaaaagaatcagctcaaaggtgaaacctttaaggaaggaaaagaaaataaacaacctttcatggctttcaaggtaatcttttctcttctttgtaataagtttttaatatagctttactgtctaatcaaaaaaaatatagcttaacttatgtccaatctgttatgaatttatatatatatatattaaaaatatagtttttaataaaatctacgtccacaaaaatcctctgataatacatctaagtctacattcttcccccttttctttttcttctttcttctgttttctccctgttcttctttcttctccttttctttactataacagtgaatccttctcttttcttctccttactcccttctgatgaaaaaaaatgaactagcttaaaggtaagacctttaagaaaggaaaaggaaaaaaaaacctttttttttttgcttttaaagtaatctattctctcttctttgtaataagtttttaatataattttattgtctcttcaaaaaaatatagctttacttatgtcaactctgttataaatttatatatatatgtattaaaaatatagtttttaatagagcctacatccttaaaaatcctttgatgatacgttttagtctacgttttagtcgacattcttcccacttttctttttcttttttcttctcctgttcttccctcgttcttctttcttctcatttttcttactgtagtaatgaagctttctcctttcacctcataac

SEQ ID NO: 12373 - DNA, 691 bp, Cannabis sativa
cgaactaatgattgccttttttttattaaaagaaacgttcattcataagacattagaccttacagttgttacaacaaatgttcttaggaatggtagcaacatcaatacaaccatagtagttatgggtataagcctagttggccacgttatgggccataaagttacacgacctagtcgtaaagcaaaataaacaagaaatgaaggaagaaccaatactttcaccaaataaagagtagttttcaattttccatcagggatccaatccgttgagagtgttgatcactatctttgaatcgctttccacaatgataaactggtgtcctttctcctttgcgacttcttgtccaagtaaaccgcagcagcttctccacaagggcatcggaatagtccatcttggccgtagacacccaaatcacccttctcaagtaatctctagcaatttaatttgatccagtcttggggggagggttccagccagcggggggagtcggggggaatatgggaataatggaatctctgtaatctgcataagagtggaaaatagagtcaatacattgattcacattatccattctgttattgtgtaccttgtcattctggacccgccaaattgtgtcagttacaatagaggcttacaggaagaccttatctgtgttcatattcctattgtttagattccacaaaaatttca

SEQ ID NO: 12374 - DNA, 577 bp, Cannabis sativa
acatatcagttcacacattatcaagactctctaacagaattatattcattgcattctaggagaattatttatggctgaaatgcagtacacaaagagcctgaaaatattaaagcacgattagatgagtgtaaggtgtacgagattttatttcaaaattaattggtaataaggaaaatagttcattgatcttatatacagtaatttatttttatacattagcaatgtgaaactaactctaatatattctttttgagcttgaaaagtatatatataatgaacgacctttaagaaattacaggaccgaacgtgacattttaaagaatcgcacaaaatttgtgagtgtacacatcgggaaatttgtagattttgaaataggtcaaaaactcaatactcaaaactgacacattgcttgaactcacaacgataagttaaaggggaagcaaccaaaggttttttttagtttggctcgttttttttttggactaacggtattttgaactcacaacggatcacaaacgactgttagaatttagaataaaagcggctatagtgtatggtaactctaatagtgatcacc

SEQ ID NO: 12375 - DNA, 619 bp, Cannabis sativa
agccaaatttcgggtataacataacttgacactcaatggcctggtaactaggaaagttctagaaacataacataggtattatcaccataaaaattaaacctaggtatttatttgcaataaagagttaaacttaggtatttacgttgcaaattactcaaaaataaattaataacattttttaattcatattaaaattaattaatattaccaatgattgtgtaattggtttgaattttatttgtagggatgctaatcaagtaatacatacttatctacatgatgtactcttcccaataaaaaaattgtattaaaagcttaattgtttttaattattttgaggattaatgataatatagttgtttttcttaaaattcttagctattaaaataatttcttattaaaacttaattatttcatttattttatattagtatacattgttatttatgtgctaattataaaattaaaaaaatattatatatttaatcgatactgtaaataatctgtaggaggtattcaattttctttttcttctttttgttaaatccatcacgatataaattataaaaagtaaatgaactaaaacatattcaactaaatgctaaattatataaatttt

SEQ ID NO: 12376 - DNA, 655 bp, Cannabis sativa
gctagggccggagagatattgatttcacatattcaatcatataataatataatttctcattaatacatattaacctagttagggttgctaattcggttattaaaccttagggtattataattattccgtccttatagaaatttcatcctaaaatttacctaaacaagtctggatatttctgctacatatccgtctcgagttcccaggttgcttcttcaactttactattcctccataatactttgatcaatgtaattgtcttaattctaaagaatttctctcttctatctagtacttgcactggttactcctcgtatgaaagatctggttaaagttccaatgcttcataactcaaaacatgagacgcgtctgacacatatttttgaagcatcaaaacataaaacacatcatgtacaacttccagcactgggggtatagccaatctgtatgctacttgctctatcctctcaacgatctcaaaacgtccaatgaaccttgggctaagttttcctctctttccaaagtgtctaatacccttcatatgagatattcaaagaaataccatatctccaacttgaaaatcaatatctcatcgctttggatcggcataagttttttgtccactctgagtagcgagcattcgtgctctaatctt

SEQ ID NO: 12377 - DNA, 635 bp, Cannabis sativa
atcaactgaataattaatgaactgttaagtgtttttgagtcactatttaaaggggtaattacaaaagtaataaactttggtaagtttttatactgtcacacggaaatttttacaaaaatattgttctcattatttttttttcttttatattatacacactccaaaatacatacgaagcctccatttttaacatctacggaccgaactactagagtaacaccagagtagctgaaaaacaactattaactctgacaatagatggagcaaaatcattaaaatcaacgttaaaaacttcatcaataacatatagatcaacgaattaaaaaggttagaagtttacacccactcaaattcttttaaatcaaaaattacaaatgatgctcaaacatagatttcgaaattcttttaacctgttgtttgagcactttaaattctcaaacataatactggagctgtcatggtttttaatattatttttgagttgttctactgttatttcgtatgtttaacaaacgttagttttaaattacacaggttaaatcaaccattaaatatctatttgaggtaattaaaatgaaagaatcatggacagtagacctcaaagagagtggacaaaagatcgggacaaactcata

SEQ ID NO: 12378 - DNA, 608 bp, Cannabis sativa
agagagagagagagagagtaattattgacttatcttaccaatattaagtttaggggtttcaaaaaaaaaaaaaagtttaggggaaaattttttccctaatgtaagtataaaagatcaaaattccctaaatagaaataaataaacaagtatattctctaaatagaaatagatattctttgtagtgtggtttgaagtttgaactttgaagtgtatgtattgtgaaagcgatttgaaaatttgcttaaacttagcactaaaaccacttagactgcaaacaattttaatttacataaaagtatttgaagagaaaagagaaaaaaagaaaagttattatagagcaacttaaaatatttacctaatcagatatacattgggattaggtcatgtaatgtataacctttatattgaggaatccaattcaaatggcctaactttgtctcttatgttgtgtttttaggcaccagagatgaattgaggagaccaaattatttatggaaattgcattagacaaaatgaaaaattagaataataattagaataataataataataaaaagaattaaattctatatttctgaaatgaatctttttttttttgaaaatggcgt

SEQ ID NO: 12379 - DNA, 584 bp, Cannabis sativa
tataaaccacattggagttgccccttcctcttgattgtttgaaagttttttacaaaattctgaattgggggtgtcccactccagtagagattgagtacctttactcagtcaaggttgttctatcgaggaagaacgctgcaatgggctttttctatctcggttttcatcccagcgagcctaaaattattgtagactttccaaagaaagtatcctttaagaacaacttcttttggacttctggtctctcccccatcggcacaaccacgtttcgcaaacatcgtaagtgatttttctccttttacccatttgcatgaatcttcctttttcaagtttatgaccaattttttgtttgttctgccagctcttttgacgagacctacccctagccccgagattgttagtaggaataggcgcctgttaacccttccctacggtcttcgatcatgcaacttccttttgagcgaagttaacttgcgatcggagggccttctcgctgataaataatatacttgtgattacaagattcccaagtgttcttcttggcaacagattattgttaaacccgaggagcaggcctaggatca

SEQ ID NO: 12380 - DNA, 576 bp, Cannabis sativa
ttttatgctaaactttcatgttttggaaggagagtattaatttgttagctaacctaatacaagaaaattaatttgttagtccttttgacagcaacatccatgtttttggaagtaactaactatctaagttttaatttataagctaagctactacaggactacattttttaatgattatacaaatactcaacaatattaatcattattatgtctaactttaagaagaagaagtgaattttattttattttatttattaaattattttagtttagtaagatagagttagattgttttagagtctaacatatatcctaacacaaaaatacttattattattgttccaaaaccaaagaataacattctttaacttgttccaaacctaaagagttgcattcttcaaactgtcagaaacacaaactgttgcattcttcaacatgtgacaaatccaaactgttgcatttttcagcctcactgtgatcctaacgagccaattccaaatatagtaaagaattatagctgaatgtattccaacaacagggccaattactatcaggagtgagtagcctccattgatt

SEQ ID NO: 12381 - DNA, 814 bp, Cannabis sativa
  modified_base (386)..(398): a, c, t, g, unknown or other
tggcaatttggatggaccttatgtgagcttgtttttcgtagttgtaatgtcttccagatagcttgttgtcaacccagagacgtattcccaaatagcctattgtcaatcacagatgtttatccagaaggagcgctatacgtattcggatagcttgtccgtattaaagctttcagattgtttgtaataaagtgtgttatcaaaactgacgtggattattgttgttggtaatgagttggatcatttaaggcagtgtaaatgtgtcaaggtgatttcataaatattttttggcaacagtgtaaatttataaataactatcaatctttgtaatttgtatgagtttaagaccattattgcttgagtgaaaatcgtgatagtgtaaggttgannnnnnnnnnnnnaactagagagagaaacttcttctcgtaatctctcagagtttgtaaagattcttgtaaccttgtaaacactgatatcaataaagatatggatgctgctgtttcgaccgagatgtaaagcattcacatggctcaaactcgttaaacctggtgttattctattctattttattgttaaattcattaattgacttatgcgatctcttgatttattgtttcttgattgtattgcgtatttgttggtctggtacactgaatcgtaagtcactgattatttctgtttagcacaacaaactggtaccatagcaagttttgtaattatggttgtcgcaaaatacgatgttcaaaagtttactggtacgaatgactttagattatggaggatgaagaggaaagctttgttggttcaccaagggttg

SEQ ID NO: 12382 - DNA, 685 bp, Cannabis sativa
tggctggaatataatttggtatgtgggctcaaatgcatatgcatattatgaatccaactggtctgcccaatgctaaatgctaatgctttaataattgattgttatttttattgattataagtctggctgaaatatggatattcaaaggtaacattttaatgaaaatatgtctttcactctccaatcacttgagatttcagtacatttactatgtgccattaagcacttaagtatctaaagaaataagcaaaatctaaagcaatagattcaacaacttttaaactactaaagtagttgtagaaagaacttattagatgcttgaagaatcaatgagtctcaattcatgagaaaatagaaggcacaatggttactttacaatctgagaatatctacatctctcaagaacaacaacttgtgtctgaaattgcgtattgttgaagttggaataaaattgtagtttgatttgagtgacttgtggaatggttgaacaaagtcttcaaacatctggagaaaggccctttgatttctgtttaacctcctcctcctatatatcaaaagtaaggaaaaaaagcacattgtgaagttgcaaaaagggaattaagtaaaaatgtttgataactaacttacccctccggtttcccttcttcttctaggatcttttcttgcattccgtcgagcaattgca

SEQ ID NO: 12383 - DNA, 530 bp, Cannabis sativa
ttttttttttttttcatgttgttgccaatcaaaattatttttaaatattctctcaattttcacacttattcccacacacatatacaaacttcacatccaaatttcctcaaattactaaagatccacttatgatataattagggtcaaattttaaatattcattgatttatcttatttaggctcaatatgtgtagaaacaacaaaaacagataaaaaaactcaagcgagaaaggatgtcagtaaaaacatttcttactactacaccacacaacacatggtaagatactcaaatttttaaaggcaaactggtttaaaaccagctgaatacatccaggtgggcaaggattctcaagcagtcaacaatttgtttgaccaccacattgtgaccagacaaccttcccttaaatagtatatctataatagtccccatcatttcatcttgaccgttgatttttgattctgattgatctgagtgaagtagttgaatattgttgagaggtctcccacctcatgaaattgccaaagtagta

SEQ ID NO: 12384 - DNA, 585 bp, Cannabis sativa
atgctaccgctagaagttaacattacaatccataagcgtgaattctataatcaagaagaaaagcaagaactcctgaatatgtccttggacttacttgaagaaagacgtaatgagtcgcaaataactaatgtagcttaccaacatcgaatcacgaggtactgtaatgaaagtgtcaagaagaggatctttaatgttggagatttggtgttaaggcgtgtatttacaaacacgcgagatcccactgctggagtgtttaacccaaactgggaaggtccttatgttattaaagtagtagtgggaactggggtttataaattagctcggcttaatgactcgctaataaagaaccactagaatagagaatatttgcgaccttattaccagtagaaatcaaattataaatgatgtattaatctctaaaatagttaaattcttattattaataaaattaaagtttgttgaagtaattacaaggtttatctttttaaaattacttggggcatatatatgtataataactggaattcatctacagatacatattatgttgcaaatctagaaaattgaaattttaaaatttttcta

SEQ ID NO: 12385 - DNA, 505 bp, Cannabis sativa
ggtcagccttagctatttcaaatggagtttttttagaaattcttttgagaatattctccgttttcaaaaaatattgagattcaactatttttggagaccaaaccgaatttttgaagggccaaaaaggggacccaacgcccaggttgacatattttcaacctaggatgtttccgatcaagtttggcaaaaagtctataaagcatttttttggtcataaaaaataatgaagattcaaccaaactcgggaagaaaaccacaatcctgagccccttgaaatagggtccagcgtctaggttgacctgttgttgggtccggtggccaggctgaccatcggcgtgggacgctgccttcaattgctcaaatgtcgaatccaatgtgaccattgaatctggaatggtataaatggggtaggagacctcgttttcaagctcaaaagccttggaagtatgaaaaacgaaatcctgggagcctgggagtaaagtacccagggcccaagttgacaaat

SEQ ID NO: 12386 - DNA, 804 bp, Cannabis sativa
  modified_base (161)..(165): a, c, t, g, unknown or other
  modified_base (718)..(727): a, c, t, g, unknown or other
aaaaagtcaccggaatttgctacccaccgaaaaagtcgtcagagtaactgccggtaccggaaaaatcatcgaagttgctgcaggcgccgaaaaagtcgttaaaattagcattgttgctggaaaaataccaagaaaatggtttcttgatgaagaaaccggtnnnnnggtgatttttccggtaattttaccagtgacaatgccaattctgacgactattctagagtttgatgtcggtgctggaaaagtcgttggagtagttgccgatgtcaaaaaaattgccgaagttattgccggcataaaaaaattcgcagaattggcattgtcgccagcaaaatcactagaaaaatcataaagaaagtgattttttcatcaagaaatcggtttcttcaccaagaaagcggtttcttcatcaaggaactaattttgttacacaacaataataaagattatgaaaacaaaacaaaaatgatatacactgaaaataattgaaaccagtttcatcaattaaccaaattgaaaaaaaaaacaaaaaaaattaccaagaaactggtttcttcattaagacattggtttcttgatgaagaaaagaaactagtttcttggtgatttttctggtaattttttcggcgacaatgccatttgtgacgaattcctagagtttactgtcggtactgaaaagtcaccagagtagctgccggtgtattagtcgtcagagttnnnnnnnnnnccagaaaagtcgtcataattgccattgtcgtcagaaaaatcaccgaaagaatcaccatgaaactggtttcttcatca

SEQ ID NO: 12387 - DNA, 681 bp, Cannabis sativa
tatatatataacttgtaagttagtttaacttttcaataaaatattaaaaagtaaaatttggtaagcttagttcaatttttttaataaaatattagaaaaaataataaaataaaattaaaaattataaaaatgagagaatcaaggagagaatagaaaaatctatttaaagtgattttatactgttatgtcaccgcttcattcctctcatatatatatatatatatagattcatataataaatttatatactccatctccatgaagtatatttatttttagtaagtgggttatattttaactttacatatttacttatccattgcacttgttgttactttcgagacgatcatctttttttgtgtgggtaataataggaaataaagaaaaaagtagtattttttttagagtaatttacgatgaaacacttttatgttttaatttttatacacttaatctttttactttttttagaggcaaaatccccttaagtttatttttttttgcaaatttgacacgccagttaaatattatcgttaaatatcaattggatgaccactatgtacacctgtgtatatgtaacagtaaaacctcaaagtcgatacagtagtaattctgttagtatttaacggtaatatctaactgaaacctcaattttgaaaagaaaagtaaacttaagggagt

SEQ ID NO: 12388 - DNA, 774 bp, Cannabis sativa
cttgaacccccgaccaaaatcctacagggctcgtgcttaggacctgaagcgctgcaccaaatcccaattaatgtcgtgaattttatatgtatatgtttgaaagtgcacaaattgacaagtaataaagtagttaggagactgatatcgtgccataaaaattaaaaattattaaagcaattaattatagtaaaattaaaacctaattttatctaagcaattgatttcaaatgggttgaagaaatcaaacttaactaaaaaagataaaaaaaaaataacaacattaagttgagaataaatagatcaaaataattgttaaagttttgattttgccctattataactataattttaatcattaatgtgcctagtttattccaatatttttaagaacctagagtaatattatatctttataccctcttttgagtgccgcataagaatgtgtaagcgaataatagtctatatatctataccaccgttataccttacgggtccatttggtacgcaagactggattggattagataggctaatttgttaaatccaatgtttgggcatttgaaaagtctggattactaatccagctaatctcatctgtctgggattatttatcccaccctattggtgggataagtaatcccatgaaggtgagatttttttttaattgttttttaattttgattttattaatatattttatgtaataagaatttaaatgaaaaaattatcacaaatttatttattaatttctttatcaaaaactttttcattaaa

SEQ ID NO: 12389 - DNA, 524 bp, Cannabis sativa
gcaattgagcttcaaccaatcttgcggggggggactccaagaactcgtaggccgacggatggggcaagggagcaagaaagcatgatgatctgcaaaagagaaacgaatagtgtcaatgcatttaaaaatatccactggacagttattgtgtaccttttcattccgggttcgccatatcgtgtcaataatgagagatgcataaagaaagacctcatgatcattgatgcctttcttcttgagatcccataagaatttaacccagtcccacattcttataccggtgtcacagatgggaaaaattccccagggagacgacctccataagtgagaggcaacattacaagctaggaaaagatgttccatcgactcctcctccaaaccacacaaggggcaactttcgtcttctatggggaactttcttcgtaacaccgaacgaacaggaagagccttggacagaatacaccaccataaaacctttagtctctctggaatctttctagtccagagcttgttccacagagatg

SEQ ID NO: 12390 - DNA, 775 bp, Cannabis sativa
atgcatggccgaccagcttttggcatggcaggattttggtgcatagcttcacacggggacagcaagacagactacgaattgggccttaacaacccacaaaatagaggaaaaatatctatttttgaggggcattttggtcatttgtattttactaatttaatatgtaaataatagcttattttacatatttttaaggaatttgaagggggtaagctctcctataaaaagatccttactcaaatcctaaaaccctaagataaaaccctagctcaaagtctaataactcatctctctctcacatgcccactgctatactcatacttgagatttacaacctttgatttctacattgtaacctttagagagctactacagatcccatcactatagtgatttgagtagtattatctctcagtatcaatgtaaataaaaaaggagtaggtcattacccgctaactaagggggccgaacctctataaaatcttgtgttcatttactttattattcttattgtgtaacacgtgacaatcatcaatattaaatacgactctgctgttggttagccaaatctgaggtcaatagctgttatgatctttgagttgagttgtacaattatttttatttctcttccaagggctgacaacataattcttatcccccgaattaagccaagctgcttagaccttcgtttctaaaagatttctcgctgagccaacacttcaaaaaaataccctcctcatgctactgaattgaagcagaatccctccaccacttc

SEQ ID NO: 12391 - DNA, 597 bp, Cannabis sativa
acaattttagtatattgtaaaccaggaaatccaagagttttattcgaaagtttttatcgtgcaatgtctgaagattatgtacacaaaaacattacattagaagcagttagaagagctgtcttagaacaaattcgattagctttgctatctatggataatgatataaatgatttccaattagttgattaccatgtgcttgaaaatgatgagcttaacactgtaaaagacatagatgaagaactcaattatgttgttaccgaaaaagatttgtctttagtgtccttgctaaatgtagagcagaaaaatgcttatgatattattgttgagagagttatgacaatgaagggaggtatattttttgttgatggtcctggtggaactggtaaaacatttctatataagtctattttggcaacaattcgatcacaacatttaattgccctagcaactgcttcgtcaggagtagctgcttctgttttacctggaggtcgtactgcacattctcgattcaaaattccacttgctgttgataaggacattacgtgttcagttagtaaacaatcaggcttagctaaacttttgcgtcgtacaagttta

SEQ ID NO: 12392 - DNA, 1138 bp, Cannabis sativa
tctctctctctctctcttcacttctaatatacaagtcttgggtttttacatcatatactgaaaattttaattttttttctttttttattatgggacagaatttttttcaaaaaatactatgtaagttttatactgtgtacggtgttaagttttcgctgttgttccacggttattttttagttgttatactattatttttaatttttctattttattattttacaattgttttataaaaaaacaatatttttgtaaagtattccgtgtgacagtaaaattgtaaacttttgatcaaaattcaatatttttgtaaaaactccataaataatccacaaaaccttattaaagataaatgctcaaaatcatcacgtaaacttaaggtgtgtttggtaacactttttttaattatttatttttttttgtttttaaattagaaaagtaaaaatattttccaaaatcatgtcctataatactgtttttattttttaattttttatttaaaaaactaaattttaaaaataaaacaaatcactatttttttaaacaattttttttaattaatattttggacttcgaccccaaattagaccttgaaaaccaaacctggacctgcccccagtctcgacctcagacccgtccccagacccgacttaaataaaatcaacaagtaaaaataaaatttatagaacacacttttaatttttgtttttaaaattaaaaaacaaaattgattattgaacatatttttatttctcagaaacaaaatttaaaaaacaaaaaaatttacttttatttttgtgattaaaaaaaaaacaaaagtgttaccaaatactaccttattttatcttgtataacttataaaatcacttgattcactttatgagaaataaaatgacaagaagtaacatggcaaagcgaaaaaaaatattaaatatcatcaacaataaaaacatgcttgatgcaattgatctaaatttagaaaattaatttcttaacatttatatcataattagattagaatgtgttactcttaacctcttattacaattttttaatcaacttttgtgttcgaaaatatataacgattttatttttttaaaatatttttcatgatggtgtacgttatagttacaatacc

SEQ ID NO: 12393 - DNA, 712 bp, Cannabis sativa
aaaaaaaaaaaaaaccttatatatcttttatcttctcaatttagcctaacttagtgaaaattctgatgtttcacatagtcaatttttgaattctaataaattaattaattgagacatcaaggtgatattatcccaagtactttagggaccatgtgcctatgtaaccaaactcccaataagcagatcttaaaatttacgagtaaacttcttaacttattaattcctcctgactctactatagattcaaaattgcttgattacatagaatgttctatataccaaatgtagatacactataaattatctattgtttcaatcacttcaatcattgatcctctatggacgatttacattgagtacggataaaattatcgttttacccttcaatgtattttatccttaaaatacttagcttcttataaatgatatttcaagaaactaatataattaccgaaatgagcgctctatcacttatcgtctttagccaagctcaaagaaaactatcattttatttttaataaacatagaagctacagatgtccatatatatgattaacactcccacttaattattatactactgagtttctaagatgtaagtatgggatagtcctacgggtaagctagtaacgaacaagtcaaagaactcgtgcaatataattaggctagagcttaaccatctcaggaaggagatcaaatgatctatgatcaa

SEQ ID NO: 12394 - DNA, 527 bp, Cannabis sativa
agccaatcgtaaagtgatacgtctggaaggtgataggcactactagtgtctaataggaatggtgttatcttatttaatcctctgcaaaaagctgagtagttggactaaaagtcttcactcttcactgtccactcccatcggctccaagttcccaaaaaactactctcacttgtttcatcgttttcaaaaccagtaacactagctgtccttcttctaccaaatattacactaaacctctttatacacataaaataatatccctataaattcatcaaaatgggtggtctcaattgataggagggttacattgcacccataattttatttaattgttagaacacaaactacatttctatgattttttagtctaattaagattttttatactcaaattttaacatgtatcaaatcatgtcattcaagaggtgggatttaatatatatcaaaatttaggtacacaatttaatacatattaaaattcaaaaaaacaatttaatacaaactagtaataagaaaagaacctaaac

SEQ ID NO: 12395 - DNA, 570 bp, Cannabis sativa
gtgttacattgaacaaatggctaacaagtttagcacatttgtgttgtcgggaaaattagttgtagttatgctgtgaaaattgagaaaaaaattcgagtagagtgtttgataaattataaattttaaagtgttgtgagttgttaagattttattataatgttaatgattggtaatgttataatctaatcacaaatatataaaaacttatgttatataattttttttattttttttatatattttattctaaaagtataaatttatatgtatttgataaaaataaattatatttttataatatgtaataaataaataaaatttaaaaacttaaatatataagaaactctaagttgatgtgaaatgttaatattaaaaatacaaaataaaaaatattttttaagacaaaataaaaaaaaaaataagagatttaaatattatttatttaaaatattttgttttataataaataataagtggataaatttttagtataattaataaatttattaatagtcttttaatcaaataggttttgaaaaagtataattgtatcagttttagtttttaatt

SEQ ID NO: 12396 - DNA, 765 bp, Cannabis sativa
ttaatcaaaaactttaaaaattataaaaattttaaagtagtggatttgcaatatatcatgatatcatgtatttccagatgaaatctggttaatcatacacacagcccctcaagtaattttaaaaaatgaagctttgtaattacttgaaaaatgaatcatctttattaattactgaagttcaaaatattacaaaagaactaaaagttacagcatcagtctactggaagaaggttcacaaatgttccacgttccagtggttctttattagcgagctattaacctgagctaatttgtaaactcttgttcctatattgcctcgattacataaggacagtcccagtttcgattaaatactcctgcaaatgcatctcttgtatttgcaaatactcgccttagcaccaagtctccaacattgaagagtttcttttcactttcttgttgaagtatctcgtcactcggtgttggtatgctgcattagtgatttgtgactcagtaagtttttcttcaagtagatctaaggaaaattttagtagttcttggttttcttcttgattatagaaatctcgtatgtgggtcgcaatattgacttctattggcagcattgcctccgagcaaaatgctagcgagaatagagtatgtcatgttgttgtcttctcagttgttttatgagcccaaagtacttgaggtagttcatcgacccatctacctttagtagcgtctaaattctttctgatagtatctttccaggttttattaactgcttct

SEQ ID NO: 12397 - DNA, 639 bp, Cannabis sativa
attaatttttctaaagaaaaaaaaaacaatacacacttttaataaaaaggaagggaaaaaatacaaaattttaaattatgaatggggttaaactaagtactaaatagttacttttttttttctttctttaaaaaaaaaaaaaaaaagatttttgagaaatactaaaagacattaatggtatctagtatcactattagtataattaagtattggtacttatatataatttttataaaatattgataattaatcacaatgtgtcaactttaggtggtgctaggcactactgatggcttataagttataacaatgatctttggtattatggcaaaatattaaaatttttacagtcaaacaattttcttttatttttataaaatctatttttttcaacattacaatttttttttattttggtgtcctataaaaataacgataaaacaacataaagataataaaaaaataaaaataaaaataacaagattaaaatacaaatatatatatatgaatagtttgtattttttgaaaataaaagctgataaattgtaaaaatatttaaaattttatttaactatattttgaaatttttttactataatatttatgaaaatatccctattaaaaaatgttttttttttt

SEQ ID NO: 12398 - DNA, 662 bp, Cannabis sativa
gatagattatagaaaaatggctaaatctgcatgctctaatttctagagagagaaactagagatagatgttttgatcttatggctacttttttggatatgcaaaatgagttggttgagctctccttttataggtgaaggagtacctattaaatgtgaataaaataatccaaaaagtatggaaaatgcatttaggctatttttgactgtagatgatgatctaacggtgaaaattaaattctgaggttgattatcaatttttggagttcgagtcacggcggcagacctacggtaagttgtagcttaaatttgtaactcccttggaggtgaaatttggagtcaatagctttagaattgcaattgaaatgtgagacatgaattgatagagcattgaattagctttaaagcacaagttgaattgcatcacttagatcaatattgagtgatttatgactattttactaaaggatattttgggctcaacgcccaaggtgacatgtgatattaacctgaacgcttggtgagtgggaaaatgtgtcgagatgtattttttgatgcctaagtgatattttgacataatttagtccatttttatgttgtagcaaagttgttcactaattctcgaagatgttgttctatacaaatgagagactcgaaactaccta

SEQ ID NO: 12399 - DNA, 502 bp, Cannabis sativa
acgtattttgggaaaaattcgaggaaatatttaccccccaagtctgatttagtaaatgggaaatgaggcttgtacgcggcctctggtctctatataaatacactggcaggtgcgtgggtggcatttatgaccgtcatcattgatatttatttctttttgcaggcaacgattcgcttcttatctattgacagacctgcgtgtttaatgctagtgtcagagatgtgcttgaacgtttcaaccgtcctttctcttcgtttaacccattcaccccattcgttgaatcatagaatgtgaatcgatacaaattcccaccttacgatggtgcctggtcatagatgccttgcaccgtctttggcctataaaagttagcactttctcttgggtgggttactttcaccactctgccatttcgacttaaataacacatttgaaaaaattctagaaatcatcaacatcttattgctattcctctgtcgctgccagtccaagttttaccatcgga

SEQ ID NO: 12400 - DNA, 585 bp, Cannabis sativa
ggccgctctgtgttgaacatggctggccattttttatataaattataagactataaatgctaaatatgatacaaaatccaattaccgaacagtcaattaaaaacaaagtagataagggggtgttcataaaaattgatactgactagactgtaactaaatttttggttcaaattcatcattgaatttggtggtcgggtggtcggttctgttatagtttttttgacacggcagtgtttctatttttgaaaaaaaaaaatttgttaaattgaaaattcagcaaactaaaaaattgcaaaaaatctccaaaattgtacttttgattttgtactggtataatttttaaacggtcaataaaaaattggtgaaattgattataactaattgaatttcaccaaaccacttgaggctagttcaagtggccataggtgagtgtgtgtgttggaggtcttggattcaagtcccaagtaaaacatggttataatatataaacacttaaataaataaaaaaaaaaaactgaatttcaccaaccataaccgaccctagaccgacttaaaaagaaaatggccatgacccatagttttatg

SEQ ID NO: 12401 - DNA, 547 bp, Cannabis sativa
aagctagttgggggttgtgttaaacagtaaaaaatggatatttattagtgtaaaaatacaaaataaaattcattctacataatattttaatgaaattaatgtaatatatttttatttaaaaatattgtagcgttgagttaattttgtaagaaaaataacattttatgacacaaataagagaaagaaataaataaaaagataaaaaaaatgtattatttttattaaaagaattacaaattaattagattttaaaagaaatattttctttaaaattaatgtgatatattttttgttggaaatattttgtttggatttaattttgtttgtgtttgaagaagaaaataacatttgtgaaaatgaaaagaaagagataaaaatggtgaaaatatggcccaaagaagcagaaaatggcatttttgaagcccaaatgacagcacaagaagacaaagcttaagttggcccattttccttctcccagccaacataggtgccacgtggcaccttcggcttcgccggtagtacaaaaatcaagagtaaaagctccttg

SEQ ID NO: 12402 - DNA, 709 bp, Cannabis sativa
atatttctctaagttaaattatgaattatcttttttatcttcattttattatttttaattagataatttttttaaaaaaaaatccaaatatactataagttaaaaaatgttatcaagtattattcacactattttataaatatataggtgtgtatcaaatataaaagagctaatactattttggattatgtattttgcaaaaattacttattgaattatctgttttgttaaatgacaaagtagattatgtaaaatgatataaataggactctgagatcggtttttaataattttttattttaatataactaatttgaaaaaaattcttgacacgaacaaatgcataaaatataactatttttgttataatccatctacattaagttattattaagttttattttaataaaaaaaacaatttaaggtattatttagtactattttaaaaaatacatggtctaatttgtcatttaataaaacagatggtttactcaataatttttacaaaatataaagtttaaaatagtatttactcaatatatacttagtaattagctaccaagcttttaacctaattttagtaattgggtaatttagaataatttaaaaactatattttttgtattataattaatcaaaatttacaagatcctattataaatactatcaaaagtatataacgcaactaattttatataaaatttcccaa

SEQ ID NO: 12403 - DNA, 543 bp, Cannabis sativa
aggcgaaggtggtatggggtttagttccttcattcaatttaaccaagctttattggctaaacaagcttggcgtctcctagagaacccgacttcactcctgggtcaacttcttaaaagcaaatattttccacacaattctttcctagatgctaatatgggccattcaccatctctaacttggcaaggaataagatggggtcgggagttgttgattaaagggctgagatggaaaattggtgaaggtagatctattggatgtggccttgacccttggatcccaagtctttctactttccttccaatctgctactcggggccttcacatggtgttgtggcgaatctcatcaccgaagagagacaatggaatatccctttattgcaacagtatttttgccaacttgatttggagaggattctcacaattcctttgagctacttcagcactagagataaattgatatggcattatcaatcctcgggtattttcacggttcaaagtgcctatcatcttactacatcgcttgctgacgaaaatctcagttc

SEQ ID NO: 12404 - DNA, 869 bp, Cannabis sativa
tatcaaaatttatgttaattttagctataagaaaaatagtcattgctaaagtaatgataataataatttattattaaaattttgcattaatattatgcatgtgtcaaattttgacacaccattttatatttcttgaaaatgtactaaatatggtgagaattgttaaaacttactcatggtagtaaacgtttttataagttgtaatattgttattagtgtaatttaataatgtatctcatctcatattagtgttagacacgtcttccaatactcaaaatagggcaaggaaccactggtaacactatgctaacaaaagttgaaaaaaataaataaaaattattgactaccaaacttcattaattaattgaaacatcaaacaaattaattctatcaaatcttttaggaaaagaaaaacattacaaaaggtactaattaattaatgaaactacataaatatatatttttaaagaaaatgatgacatctcactagttgtgaatattacaagagcttactacgtgttacataagaacattgttattagatattagtggtgtctagtattattatgagatgatgttttaaaaatgattaacaatattttataaaagttaatatattaaataatatgagacttaatatttaattgtaataataacgatataatacttttagcatttctctttactaatttatattaaaatttaattgttatgatatgagtccttaagtaccatacctcctttcaatatacactatactccaccaaaaacctcataaaaaaaaataagaaaaacactgggaaccatgtctaacactaccataatacattacattgttactagtgtaatttaatataaagtgacatatt

SEQ ID NO: 12405 - DNA, 526 bp, Cannabis sativa
tattttttaagacaatttattaatgtggctacaaatcacatgtataattataagggtttatttaagtaataaaagttagttagaactgaggcgtttggttgggaggaatgaaaatataagggggaatgggaataagaataagaatggaatggaataaaatttaaaatgcataaaaaaatcattaatttttttttttgttacattggaatggtcgccattctaccaaaatggtggaaagagcattccattggaatgctattccaatactttaaaatgtaaccaaacaaatgaatggaataaaaattgtttcatttccatttcattccatttcattacctccaaccaaacgccacctaagtataatgatcttaaacattcaaacatttaacattaatcatgaatcaatcgtacattagaaaattgtttgcaaaaatgaataatagaaggcaaaaattatatttaaaagaatccaatactataaaagaatagatgatgttttataatttcatatataattaattagatt

SEQ ID NO: 12406 - DNA, 574 bp, Cannabis sativa
tactataaatcttattttgatctatataatttaggcaaattaatattttcgccacttaattttaacatataccaaatcatgtctttcgtatttttcaagttgttaaatattttttcgaactatattgagattgttgaattcaaggagttctgtccaattttattaattcagtgataatccatgaactaaattgtagctccaaactttgatatctatcaaatatttgtgccctcaaattttaacatatattaaattatacctcatgaacttttattcatggtgggcttccattagtaaaattaggcaaaagtccttgagtctaataatctcaatagttcgaagagaatttttaactgtctaaaacattcacacaatatggtttattaatacatatcaaaattaaaaagtaaaaattctaattaatctttaatttattaacacttggtaaattctattccataatttttcaaatgaaatatttattatgttataatgagtaatgatatattacaattctcacaccttatatgagaaagtacaataagttacaaaaaaattaaataatcacttttaa

SEQ ID NO: 12407 - DNA, 745 bp, Cannabis sativa
aaaaaaaaaaacagaacatgtgaaaatgagaaatgatagaaatgacttatatttaaccctataaacactctactcactcctattttaaacaaaaaaataatatatgattataaacattacacacacaaaaataactaactacaaatttaaaaaaagttaacgaaattcttagagcttaatttttttggaggttggttgatgtcgtggaaggatggatatgatgggctgacgtcatcaaaatgaaaatcaattaatttaaaaatggtatagtttagaattataatggacccaccatatttttaaaatttaattacaattgatgtacttagatgtaaattttccaaaacgtaaatctattattgtctacctttgtccctaactataccataagtggatcataaatttggagggatagtaatagggaaaattatattttactaggtaacataaccgcgctttgcgcggtttgttgaaagaaaatataatttaatttatagattttaaatattttgaacactttttttttctttttcacatataatataagtttaactttttatcgaacaaataaaaaatagcaaatgtgagaaaaaaatgagaataaattaatagatttggaacaactatagagtgtgacatttatcccatatttataaaatttatatttattagttactaatatttttttaaaaaataatatatatactatgaaagctttcagtgtgcaccctttaaagttgaccat

SEQ ID NO: 12408 - DNA, 543 bp, Cannabis sativa
tttcacacagaaattcttgtagtaactaacagagcaacttattaaatcggaatcaaaattcgtatagcaacccatatagaaactaccagagaaactagtggagcaacccaaactataaatttgaaaagaaaaagttaaaaaaaatagtatatgaggtaatttctttaattttaaattatgttattgtatacttttattttactaatttttaataattttaattgtagaattataaatactttaatgttatatttgagttttattatcattttaatttatatataatcattaaataaatatttattattattatattatttatagtataatgatagattaaatagtattgtgacaaatacttagagtgagaaataatgtttttgtacatgcaaaataaagttacaacatatatagatgacgtgagaaaaaaagtttgcaaatcttttaaaatgatagccataaaatttgtaactcttatttccaatattatcgctctcttgactaataaaataaacttactaattatgttttaatatgtacatg

SEQ ID NO: 12409 - DNA, 585 bp, Cannabis sativa
ctaggaaatccctcgtaatgatgggagaaatcctagaaatcaacctggattcggtcgatccccaaggcatccacaaaggccttctcgcatggacagagagaatacacacacttacctaagtaggggacgtgtttcaaatctctattagagaagaagaccaatgcaagaggagacacgtgaagcaagtttgagtacaggatagtcacgatcctacgggcatagtaggtcgactgaaactaacagacaaatgcgagatgggaatagatctcgacgttattttactgaccaagaaagtatgagtaactcacgttgttaccagtttcaaagttaatcagggacaagatccgtgaataattatcaacagaggcatcgtgaacctgatctccatgagcgattaaatcaaaggcagccagacctgtgagcacttgaatcaaaatgcacctgatttgcctaatcaacttcatcaaaacacaaatcaacaacctatggatcccattcagttgcgagtaatacaattggaggaaaaatttaggaaatatcaagatgaggaatataaaaaactgccaggatatgactcagatgaag

SEQ ID NO: 12410 - DNA, 504 bp, Cannabis sativa
aattatattttcttagattttttaggtgttaaaattttttcttgagttattgagtttatcaaatttaagaatttttgtccaatttcatgtaattttactaattgggttattgttcatgaactaaatcacgcttcttaaactttgatatttatcaaatcatactcttaaaattttaacaagtaacaaatcatgccccttaaatatttatccatattagacttttcttattaaaattagataaaagttcttaaatccaataatttcaatagttcatttagtacatgtcaaagttcgaagagtaaaaatcttaattaaccaaaccaataagaataaagttgctctccctaatgtaagattctaacctttttcttctcttctttttatatcgtgaagatatgaaacatacgtatattacgtaatcaccattttcttttttttttttggaaaattagaacaaaacttgttaaacagtgggacagagttgttagttctctctttcaatat

SEQ ID NO: 12411 - DNA, 539 bp, Cannabis sativa
atgtcacaaaatcaattaatagtgagaggtgattttatttagttatttatttattttgggaaaagagaaagatataatttaaatcacaactctattatttactttaaaaataattaatatcatccctacaatataataataataatgataaagcaacatttttctttttgatgaatcaatgaattttattgcacaaactttctttacaatcgaagtactcgtttgaaaggatgcaaaaatgtttatacataacaatatttacaagtattcaaaccacctcctatcttcatgatcgattttttttggcaagacacaagtaattcttgttttgatttgccatttcaattcctgtaagtgcatctgtctcggattctccagccagattttatcattcctttgaagccagatgaaatacaccagtccggcaatgattgcagaaaaaacctgcttcctaaacctgctcctctttgatctgctaatacacctgattaaagttgttaggtcagttggttgagcattccatcccacccaatccttca

SEQ ID NO: 12412 - DNA, 632 bp, Cannabis sativa
tgatcagcaatacatttcaccaaggtgattatgattatatgcatcatcattacatattaattatgaagtaataatctcacacttggtctagttatggaaactttcatctcagcttgatttctcttaatcagctcaaagatgcagatatatccgggctgaagagaattctgtcttgcaaatacagcaaatccagcagaaaacttatactttgatttataagccaacaacttcacatgccaatatttctcaccaacccaaagagtcataatttgtgtgttttgcccaaaatcttgcaaaagtcaatggaataagcagattatgagaaagatttgattgcaaagtcacttggaagctgggattttctgaagatgaagcatcttgctagtgcctaaattgcccatatttccctcagatatgagcttcctggacttatctgcactaatgcacaaaatatgctagtaagctaatacttaaacagatatttactttttaaaaaatggcattcttgattcatattcatacctgaaagtttaacaacaattttctcttctttctctgaaattatgttctgtcgaaatatgttggctttgtcattctttttagtagaagaagcatcatatctcacattttgc

SEQ ID NO: 12413 - DNA, 581 bp, Cannabis sativa
gcttatctcattggttttccgtacatgtaatgccataagcttttgacattgaacacttgacaagctagagacaaggtctctttccagtggcatttcctcaaattttccttcattagcaccagagaaattaacaccaacaaacttgcctagggtcccttggcatcacggttggggaatctgccatgaagtttgtaaccagggggatatccattgagtttgtaacatctttcaatcgagtttccattcataccacagtgagtacaattgtacttcgatcgaaatggttgaacagctccagcaaactgtccagcattgctcgatctggatttatccaagtcagatgagttgctaaatcaacttcttaatcctctttgcctctcttcttgaaccatagcagcataagccttattcacacttggaagaggatcacacatcaagatttgagatctgacaaagctatacgaatcattcaaaccaactaaaaattccagcaatcgatcttcttcctgatattcctaaataattctcattgcaccacatgtacatgcaggttgtggtctaaattccctgatctgatccca

SEQ ID NO: 12414 - DNA, 1376 bp, Cannabis sativa
tttttttttttttggttttttttagttttacagttaaaaataatttattttataattaacggagcaacttaaattgcaataaattcacatagaaactaaatcatgagaaattcaaattataaatttgaaaataaaaaacaataattagcaattttgcctctgatcttttaacaatattaattttgaccccttaaaatatacggtttgttaagaatcccttgaactattacatttacagaaatttagtccttctattagcttctatctaattattccgcttaaatgatgacatgtctttatcaattagtaattttaccctccaaattttgacaattatcaaatcgtaccccttaaaataaaaatgggaaagatttaatattttttattaaatcttaaaaatttaatttagatcttaaaaaaaatattttgaatgattaaaaagattaaaaaataaattaaaattttaaaactaattacgcgatataaaaaattatctattttttattagaaaattcatttagatattaaaaaaatatattaaaatttaatttgtaaaaactaaattttaaaggaacaaacttgaatatattttgtttttatcaaaaaatgtagatttgtttaagtaaacataatattttttttagtttaattggaaaaaaattatatttttattgaatttttttatttgttaagatatgagtttataaatataaataaattaggtttttcttgaaaaatcttagttcatttaaattatttattagattctcaattattttggtttgattttttaagatacgtgttgataaatataataaagtttgaaaatattttttttaagtaaaattaatattttttttattaatctaatacttttatttaatttttttaataatttttactattttttcttaattaatagaatattataattgctttaaaaatagaatattatagtttttaaaattaatttttttaaataaaagggggaaattttttgtattggtcatagtttaaggggtaaaaatgttaatttttaacggtaaaagacagagaacttaacataaggggcataattatgtaactgttatattttagggagaaattttaacaagtcgtatattttaggggacaaaatcaaatagtgtcaaaaattcatagagcaaaaatactaattattcaaaataaaattaaaaaataatatattatttattttattgttattattattagatcctacataaaacaagaccatctagtaacacaatgagtgattttatttgtagatcatttaacataagataataaatgttattaaaagaagagagaaacaatcaacaatcttacacccaaattttgaattgagaaggtatctc

SEQ ID NO: 12415 - DNA, 684 bp, Cannabis sativa
taaatgaatgaataaaaaattgattttcaaaattaaaattaaaataaaaatatttttaatcatgaatttttttttaaaatatattgtcacaaaataatttttttttttaaaataaatatcattttactaaattataaggtctaaaatagtataactcttttataattaagagtatttttgttgtatatttatagaatatttagtatttttgtccccagaacttttttacattatcaagttgtgcctcctatagtatatgaatcattaataataccttttaaaatataacttttacggtaattaggtccttccatcatattttattcaattttatcgtgaaatgagtgatacaatggatagtaattaaatagttttcactctttttattttaatgattgaaaaacgaaaaaatacaaatgtaaattattataaaaataaaaagtattttattctattattcattaacttaaaaaaggtaatggggtaattaatttgtatttatttatcaactattatccaccactgtattcatttcgcgataaaattaaataaaatgggataaaatgactatgtcactaaaaaaattatattttgagtggtattgttaacaataccattcgcttttattctttttcggatttattttgaattctatttttttcttgggagtatggcatgggctac

SEQ ID NO: 12416 - DNA, 593 bp, Cannabis sativa
tggggttgttacatatcattctttttttaattggaaaaagggtccaagttgcaatcatatacgagactgtacttgtatttctaggtaaaatgttccatcctataacaatagttaataaaatatatttaaagcaataaatagtattctataaattcatcttaaaattataacaattaataaaatatatttagagcaataaatagtattctataaatgtggagcataaaaaaaataaagaaactttaaaatggagtttaaaggagtgatcttaggtgttcaataaagaaactttaaaatggagtttaaaaataaagaaactttaaaatggagtttaaaatggttctttaaattttaatttttttttttttttttattttagagaaactgttaatagtgagtgatcttaggtgttcaataatttctttttagtcattttagttgtttcttattttttttttctttactaaagcacaaattttttttgtaattttggaatgttaaatcagttcttgaaaatttaattttgtaattaaaattgtaaaaaagaaaactagggatagtaaaaatatcaaagtaacaaaaaaaataaaata

SEQ ID NO: 12417 - DNA, 543 bp, Cannabis sativa
aataaaataaaaaaaaaaaagcaattaacggcataagtacataaaattttaagtttgtaagtagcataaactcaatatttatttttagcggcataagtacctaatgtttgtaaaactgtaatttctttctaatttcgtcagtacagactgttattttcttgaacaggccatatataagatagattctagatcattaaatctaagactgaaacatatagtatcatttacttccaaatattcttttaataaattcaaaatagaattatactaaaaaaattaaaaaaaatttatagttttataaataaacattaagtttaaaacttaaaactttagttatatttaccattttaccctaaataaattcactcccatttcccgtttcccattttccgttacgttccgtctcttcaccgttaactatatatatagattcccaattcaaaacgactcctcttcttcacattattacattacacagaacaataaaacgctgtcgttttaccctttcacacagagaatcagatcagagaagagagagagaga

SEQ ID NO: 12418 - DNA, 508 bp, Cannabis sativa
tcactcccttattcaaaagctcatatctggtctgatctctcaattctctctcaaagatttgggacaagttcactatttcttgggtgtagaaatgcatacaacctctgaaggtctatatctgtcacaaacaaagtatatcattgatctcttactcaaagttcacctagaaggagctaagagttgtgtcgatcccacttctacagctcataaattgtctctacatgaaggggctccttttgaagatgctacattatatagaagtacgttgggtgcacttcagtacttaaccttgacaagacctgatgtagcttacattataaataagttgtcccagtttattcatgcccctactcatgtgcactgggaagcttgcaaaaggcttctccgttacttaaaaggcaccatctctgatggaattcttatcaaaccagtacagaggttatccctttttgcctattctgatgcagattgggctagttgtattgatgaccgccggtccagatcggaa

SEQ ID NO: 12419 - DNA, 575 bp, Cannabis sativa
atacaaaatgcaaatttgattaagcctatatagcacatctcaaatgagtattttgatagatctttaatcttttttcatattcgtgagaattttttaatttaatttttctttatgacatatagttatttagaattatttgtaaaattttaaaagacttaatttaagtttatagtacaccctcaaagagtgttttggtacactcctatttatttcgatatcggtaagagttttttagtctaattttttaaaattgggtctgttataattatttaggatacttttaaatttttaaaaaattccaattaacttacaatagcaaaaataagatttatatattttattgtacgcacgataatttttttttttttatatatgtatgatgatgagtaattatttaaattttatttttagcacggtaaattatttgaaattttctaaaatttacaaatagtcttacataactatattgggtgttcgatcataaaagaaaaattaatttttttttttaaatatatatcaaaacactaaaaaaattattaaaaccattctttaagggaactaatatatagaaattt

SEQ ID NO: 12420 - DNA, 502 bp, Cannabis sativa
tatacttaagagtattgctatgagcagtgatgtttaacactttttagaggtgttattttataattgattatatatcaataatctttaaaattattatattaaattgtatgagatccgatacttaattgtactaataacaatatataataagttgagggatacttctgttttatatctattaataaaaaataccctcatattatatttcattaaaaagtactcatttttgtgagtggattgtacaatataccctcactatctacttaaatctagcatataatttacattaagttaaaagatacaatggagatatcatctataaatatgggtatattttaaaaataatgaaataaagataaaaattaaaataggtaaagtaaaaataatataatttcttttagcgcaatattaacacatagaatgatactagatactataaatatgtttgtatataaaattactaaaatgtaagagatatgttgcttcgtagtgaatttatctt

SEQ ID NO: 12421 - DNA, 832 bp, Cannabis sativa
aatcataattgaaaattaaagagactaaggataaggaaagaactataatgatgaataattgatgatgtaatcttcctttttttgtcgatttttttttgtcgcgtgtttaaattagtattttggccataacttttttaatgcaactcaaaattggacaattcgagatgtttcgaaaaagttaagaactagatctacaacttttatgtttagctccaagttcaattttgcttccaaggttgtcaaaaatcacaattacattctgttttgtcaaaccgagctcgccggcctctattattttccacaataatgtgctaaaatccttccaaatgactccaaatgcatgattagtctttaaaagagcctaacaaattataatcacactgatcaataatttaaataatcaatttaaaaatattaatacataaattagccatatttataagacaaaaaatatcgaacttatcaaatattctctcacacacttgactcttttgctcatctcctcgagtaagttaatgataaaatgtatgatgcttaagcaaattggtctttatgaaaagtaattttagttttaaaaattatatatctacttataattataagaaaatctaaacttttcaatcattttaatttcaactcacgataatcattttttaaactctattcttaattcttatatgagtgtgtgatcaatcaactcatcatactactaatatttaaatcaattcatgcatgtcgacaataaatatttatctcaaaataaatgtatattcgaatgaaaattcattccaaatcctaattatcgaactattttatactaatgtaaatacac

SEQ ID NO: 12422 - DNA, 649 bp, Cannabis sativa
tctacatacaatttaaaataaaaaatgaaagtaaacatttctttatatatacaacttttttcttcttttgaatttgttaatttatttatttaatgtgttcttggagacataaaataattataatttattttattttgttgctatgtgaaaaaaaaaattatttcataaatattaaataatttaatattaaaaagtaactaattcaaaataactgattcaatccgcacttttgcggattggattggatttgagctattgtgcggattaaattggatctaaaaaatgaaatctacacttagtgtagatcggatgcactatgagcaaaatagtgcggattgaattggatgaacaaccctaaacatattataagaccaaactttatatgtatatatttactttatattttttttccatttataatttggcacaccttaaacggttaattaacccaattaaaagtcaaataaagaacatactatttattataagcatataattaggatgcaacaaaattatagaataaacgaaaatataactatttattaaaaaattatttgttacattagaaaatatttatgttactactttgaatgaaaataaaataaaaatagaaagccaactacttcatcaaaatatgtgttaatattat

SEQ ID NO: 12423 - DNA, 805 bp, Cannabis sativa
ttagcaatacaacaaaactgtctttaaatgatgaagaaccatttagagaacctactttgtacagaagcataattggggctttccaatatcttactcttaccagaccaaatgttgccttcgctatcaaaaaactcattcaatttctcaaatctccaataatgttactttgggaagcatgcaagaagttgctgagatatctcaaaggcactatctctggtggattgttcctaaaaccttttgtcgtcatgactatagaaagctactatatcaacaatcgtttacaacagtagtgaaaataggaaagggaatttcccctaaccaacaaacgtcttgatccaactctaaagcatgtttagctaaaccatgagcagcatggttagcatttctcttagtatgagagatttatgcttcagggaaaaaggataaaagataacgaacatctaagattaaatcttagaaactagataaatctgtcgatgtagaggttagagcttggaagactctaagagcatcggtctcaatgtttgtgatgcttatttgatgctgcaatacccaattcaaactgtggaaaagtgccttggcctccttctcatctgaccgaaagcagccctgcactgacttggaaagagcagcaacaacatggccaccatgatcccgaccaatggcacctacccccaatttttttgctgcagaatttacaacagcatcaatgttgatttttaatcccataccagttggaggctgcaaacggacagcagttacattgtggctgttgctggaagaagtagcagtaggcgcagcagtc

SEQ ID NO: 12424 - DNA, 544 bp, Cannabis sativa
  modified_base (467)..(467): a, c, t, g, unknown or other
cgtagggttggtggatgaggagtcaactcttggccagagacgagaaaaggacgaaacgagaagacagaacagatatgcaagtttgggaggcagagcaaatgtctagaaacgagagagagatcggagaagttcattatcgaggttgacacaaatctcatccgtggcagcccgttgctgtcaaagaaggacctcgcatatccctcgtatgggaggttgttgcgtgtgtcactgtcaatcgaggacctccaatcgctcaactctagttgctggtcatcgttctttaagcgggactcgtcgatcacggtgagcagtggtcaccgatcaggttcaatgctggatgaatgatgatggtgcgttgaagtttatgcatgaatgattgaagaagaagaagaagaagaagagagagggggtgagtgaagataatatatagggttttgtagctttgattttataataataataataanaataataataataataatagttaagactgacaactatttttttaacgtaacaactgtcacacgttttcatcttctca

SEQ ID NO: 12425 - DNA, 526 bp, Cannabis sativa
atcaaactttgttgtatactctgttactgacatattcttaccctgaaccaagtcaataaactctttcctcttagcactgcaaacagtcttattgtagtatttggaattaaataaatccttaaactattcccaggttattgcagtgacatcccaggcgagggacaccattgacaccatttccaccatttcccaccatccaccataccagggcgtcctcctggaactaaaatgtggcacacgtcactcggtcattttcagtgacacccataaagttcaaaattctctcaattattgtcagtcactactcggctttcatgacatctggaactcccagaaaagttggaggtgcttgtttgcaaaacctctcatacaaaggctctatacggttaccaacaataggctatactgctggcactgctagaaccaaagcagttgccacttgctatggaggcactacaagaggaccctgctatcttagctagtgaatctcctcatcttgctgattaattcggacttgcatttctgc

SEQ ID NO: 12426 - DNA, 581 bp, Cannabis sativa
ggatatcaattttcacataaaaaagattaatatattttcttaaataatattcttaataattaaaagaaaaaaaaatattccattcaaaaaaaaaatattaaagagtggaaagatcggtacaaacttatttataatgatgaggaataatttgtaagtgcatataggatgtatttgaaacacaactaaaagagaaaatttttaaaaaaaattacgatccttttacacatgcacccaaatacttgtgggcatggttatgccatctactgagggcacaagcaacaccaaaatgaaactttgaattcctccattaaattttgcacagttcttggacacataaaataaagtggcagatattaatttttataaaaaaaaattatatattttcttaaataattcttttataaattaaaggaagaaaattaaaaatagaaaaatcggtacaaacttatttacaacgacaataactggtttataagtccatataaaatgtacttagaacataactaaaagaagaagaaaaattgtgattctcatgcataggccctaacacattcgttggcatggttgtgccatctgccaaa

SEQ ID NO: 12427 - DNA, 639 bp, Cannabis sativa
cttacataaaagataaataaaaacgaagactacatcgtaggtgacttggatggatcttcttcttctcctacctcggcttcttcctcctccttcatggtcttctcgcaataagcaagaatttcctcctcatcttcctccaagaagctcgtgtccatgtctggatttgccatcaaggctcgataaatggtacgatggccaaccttgttgcattgatctttggttttagcctctttccactcaagcacccctttgagctcctcgcatggttttggcctttgttgccttctcgacatcttcaagactcttcttcaccctctcagtttctttggtaaggcgattaatttcttgttgagcatcgttccatttcttgactacgacctcacgctagcctagtgagttttggacctcgctctccaagtattttatcctttctataactcaccgctgggaggcaaaagagatggaagacgcctggagattcacaaacaatgatgtataaaaaacaagggggaagaagaaaagaaataaaagatgtatagagactaaggcaataaccttactaagagggtatgaaacaaacccctcgcaagaatttgttcccaatccccatgatttattaaatcccaatcatggggaagg

SEQ ID NO: 12428 - DNA, 530 bp, Cannabis sativa
caccaaagtgcctaacaccactatgaggtgatgttgtataattagttagtgattaactataatcttgattaaagtaaaatatgtaggattcgatattaaattacaccagtaacaatattatacatcataaatgcaaaatatctcactttgttaaaagtctgctctaatagtgtgccaaattgtaattcaaatatagcagaaagtgattcaaatttagatcaacatgatgcaaagtttatattacaataaatgttatgattttatatttaccattataccattttaatattttatttttaaagtttaattagtatactcatttgtattaaatgatttttataattattagtattttattattaaatttaataattactattgtatgattattattattattttatatttttgataaattattaaacgagcattaaatgacatattaaatttacatcaagatttataattatgtattagaacaagtgtttttcttttttttttaaggaatgtattagaacaagttgatacaa

SEQ ID NO: 12429 - DNA, 768 bp, Cannabis sativa
atatatacatacagtttaatttgcggtataaatttaagtttactccgaattgccaacaaatatataaatttaattttaactgtaataatatctaagttgtaattctaaaatttttgtcgttacctcactaattagtctaagtcattaatttttttttaaaaaaaagtttaaatataataataagaaaatgacacgtggataatgatttaatatttaatagataagtaatcaaagagtttcaaaaatgtaacttagtattattacttctaaaaaaacttattaaatatttattaaacttggatatttatgtggcaaaattaaactattcataaaatatatatttttcttttaatacataacaagtaaaattaaatactaacaagttaatactttgttccgttggagaattcgtgtgcatcatttctaaattacgaaaagtaacaaaatttttataaagttcagcaagtcaactgagcatgcctttcaattcattggtgacaatttttataaactgagtatgtattgattttggttttcaataactgtacgttaactcgtggatcgattaagaatatattatctgccattaattatactctctgaaattttttcttgccatgcaaatgtccaagtgttggtcgattcgaaagcgatattgtaactgaaacttaaaattattttctgatgttggtcggcaattgaagtagcccactctttaacaatgttggctgtatgtggaaagcattttgggaagaagggttttatgtt

SEQ ID NO: 12430 - DNA, 641 bp, Cannabis sativa
aaggacgaaatagctgaacaatttccacccaatatttcgaaactctaaaatttagggtttccaaataaataactaactccaacaaaatcaaccggagttgaagagaatccgaacctgagagaggccattctgatcagagaggaagtggcggaagacatctaaagccccccagtcagcgttggcgaaggaagctgggtcggcgccggaagcaatggctttgtcgaaggtcgatcgaacggccccaagagggttggcaaagcaatcgtaggccattcccaccataatttttgttcctcttcctctgtttctttgtttctctctcttctctgtgactcgggcagtgtgttgtggggtgaaactttcccgcgccgatcgtcctaatttagtggggagcttcccgccaaatctatggaggtaagagttctctcccgccaattttagctgtgatccaatacacgagcccctgcgtaggctcgttttcgggtgagccaaagggactatattgggttagttgattgatttgatgggcctcaacagtcaaaaggcccacaagtacttcctcactcacccacaccaaagtgaaaacaaaattaacaaaaaatgatggagattatttctcaaatacaaaaaaaaaaaaaaaa

SEQ ID NO: 12431 - DNA, 501 bp, Cannabis sativa
ttttatatataaaaggccctaaaaaattcaaaaatgccattttataaatttttataaatattatataaatattataaaaaaaaaaaataaaaaatataaatcataattatgatagtttataagaaattaataatgagtaaagatagtgaatttttacattattatgtgcagactaaagaactattaacagagttagctatggttgaaggtgagatttcaagacttgagagccaaatcaatcaacttaaacttggagtagtgcaacatgaacaagaagtagcaacaaagaacaaagaatcgaaatcgaaacaatggcgattcggatcgccaattcgttccgttgtcaatccttcttcttcatcatcatcctttacatttccaagtccaatgcataatagtaataataataataataatactaataatattaatggtgttgaaaccaaaacattacatttcataagtaaagccataaaaggtgattattataacaataataat

SEQ ID NO: 12432 - DNA, 546 bp, Cannabis sativa
catcaaaaatgaaaagaaggagaataactaaaaaacaacaacggaacaataaaggaaaactaaacatatattggagcatatgatagtgaagaaaataacttacatacaaattttattatttccctattactattaaaaatagagcagtacaataatattttaaaaaatgtgataaaaaaaatgaaagaaaacaacaataaaataacatcagaacaataataaaacaataacaaaataagccataagagctattaaacgatacaacatcaccactcacaaaatcagagctaactataaacccaaaaaaataaaaacataattgataataacaacaaaaacccattaaaatttatgtcgttctagaaaaaataaataaagaaaaaaagaaatttttttacttagaaaatttgagttgtgtgttgttcttcttctttctctatattgttcttcttgaagatattctcacgggatagactctcttcaccaagagagcctccatactccttcatcaatatgtttcaagttctctctctccctctctctctc

SEQ ID NO: 12433 - DNA, 525 bp, Cannabis sativa
taatatatacttttttatttaaagacttttgtaattttagttgttgattgaggttttaagtaattattaattggagttgtttatagtaattaatagaaattaagaaagagaattttgtacgtgatagtattaatgagccttaatctacaagtcattgttattaatgagtgttttcttacaaggaatttccaagtgtcccctctgtattattgacatatttataggctcataatggtggtaaaaaaattattattgtcgtgtttgtatgaatcatgtcttacacaattttcaagatttgaacatagggcatgattgcctattctctatgatgtgcttaggcttgttataggcatttggtgattctaaacttgtctcttgctaatgatttgataactcataatgtagctgttgatgaatggggcattgtgaaattaaggaattttgagtttaaaccctcaaacacgtcttttcagagtaatatgtaggatgttctttgccatgctgcattaaattaaggctaattag

SEQ ID NO: 12434 - DNA, 764 bp, Cannabis sativa
aaatttgatcccatgacttaagagcaagtaatctatctttttcaatattaccgcaccaccaatacttcctgatcaatccatctaattctttgcatgcagccagcagtaattttctagagaacatattatacacttgtacatttttggcaaccgattgaatcatagtagtacgacctgcatacgagagaagcttcatttcccacccttcaatgaaattcttcattttacctttcaggaataagtaatcttctctcttccttctcttgaaaacaaagggattacctagatgcctttccttccccgttgcttgttggacgttcaacatttcttagaatgcccttcttcctttcactaggcaggtttgctgagaatagaacttttgttgttttccatgctacagagttgtcccgaccatctttcgtacttcctcttgcattcaacaagaacctcggcctccttctcgttagctctagagaatatgattgtagcatccgcaaacatcaaatgcgatatgggaagggcattccgactgatttctatatcatgaaagcaccccttctcttcttctctactcaatagttttggcagaacctcctggcacatctagaacagaaagggggataaggggtctccctgtctaagacccctttgcggggaaaatttcttgacagggctgccattaagtagcaccaagtaagtgactgtattgatgcaattcataatcattttacttactctcaaattaaacccattttccacgagaa

SEQ ID NO: 12435 - DNA, 735 bp, Cannabis sativa
gggcctatctttaaaatgttgtcacgacacgatctatattttcttatgagccagcacaacataacttatattactgcaaacttttcaaaatatgggtccaactgaccggagacataattatttacagctatatatggtaaggaataaaatttagtgctaaaattcgaatttggaatcactaatcgatcatctatgtagttgagtcttgtatcttgaaaccaagcactaattaacagtcttaccatatctacatatatgagtgaggttgtggggttagttggtacgtaggttgtcgagcagtagtagcctaagcatgctcaccaatttcacattacttctgttgatattcataatataattagttataatcaacaatttttcaaaagttatattgtgccatttattcaatgttgcaataaaaaatacaaaatgagaaaacctcgttttttgcagtttcatatttattcattgtttaatttcatgagggatggattggttactggatttggactatctaaagtgtcaattattcctgtttcaaatagtgatataaagtggtcaatcattaaaactttatggtaagtatgtgtccatgttaattttaccacctgaattttattttaaataataataattaataatagatctgtattaataatatgtattattgttaattttctgagtaggcaaaatagatccgtgcttaagacgtaatctcattttacaagactttga

SEQ ID NO: 12436 - DNA, 583 bp, Cannabis sativa
actggtgaggttccattccttggttggtgttaaaagatttgccactgttgtgtatacatctgagttgtgtctaagataatggagcttaccatatcctgggatccaggcatcattgaaaatggatatagtggtaccatcaccaacggttcttcgaagacctgacaagagaagttctttgccccaagagatgctagaccaaataagtgaaggccgatgacccttacccgaatcaagaaaatgagtatgaggaaaataacgtgatttgagcaaggtggcaacaagtgagtgtggagactgaagaatccgccaagcttgcttggccaacaacgcctgattgaaagctttcattgagcgaaaaccaagacccctgtgaaattttgaaacacaaagggaaaaccagtttttccagtggattttacgattttgctctgttcctccccaccaaaaccgagtcatcatggattcgagcttagagtgaaaagaggccaggagtttaaaacacgcatagcataagagggaatagcttggacaatcgattttaagaggacttctttaccccccccccctttgaaaaaagcttgga

SEQ ID NO: 12437 - DNA, 529 bp, Cannabis sativa
tatatatattatatatccatatgcattattaattgtacattcaagatcaatgacgacatatggttataagctattatagttactattgattaattataactatcatgcaagtcttattgattgctatcaagttttatatatgttccatgttttggtattttagtgtaatactctaacattaacagaatggattaacaaactctaactagttaattgtatattattatgaaattacattattatataatttattatacgtgaattaatatgatatatgatatgttaaaagttaagaccccgttggtgagctagaggcattttagtgattttgacccaaaaagggtaaaattatatatttaatttaattgcgtgcttatggactatattattatatagtatgcttgttttgtcttttttcaggtgtgttctgacaagttggcgcagtatagtcaaaactgggtatttcggaccgaaccgaaatacaattttgggatatgatttattagtattttatttatttgtaattaaa

SEQ ID NO: 12438 - DNA, 572 bp, Cannabis sativa
aatgtaatgtacaagattgctactaaggtgatctgtaatagattaagggggatacttcctgatcttattgtagagaaccaaggagggtttgtacatgggaggttcattgctcataatgtgctagtgtgccaggacttgatgaggcattatgggaggaaaaatcgtaaatcaagttatatgatcaaaattgatttgaggaaggcttatgatacaatagaatgggacttcttggaagagatgttgagagctctgagttttcctggtaagttcattaatcttattatggaatgcataagtactcctaagttttccttgctgctgaatggtgctatgtgtgggttctttaatgcaaagagagggttaagacaaggggatccaatgtctcccctcctctttgtattaggaatggaatatctatctagaattttcaccaatgttggagaatggtcagggtttaaattccatgatagatgtgcctcattaaagctgaatcatatgtgttttgcggatgacttgttagtcttttggaatggagactttatctttgcaatgctgcttctcaaaggacttaa

SEQ ID NO: 12439 - DNA, 545 bp, Cannabis sativa
ttatctgatgtgatcaaagattttcgttttttttagtaaaaactgttattattaaaaatgagctattaataacaaagtagattgggagggaatttctcccaactaaatatcttcatccaatcgaaacgtaaatttaactaaagcatgggttgctttattagcatcttttttaacatgagatatttttactccagcaaaaaagataaacgataagtaatatcatcttctaaattataaaaatgtgttataaatctagtagaagacatgtggttaacagggattgtaaccaaaagggaatctgtctcaatggaatttatttgcagttggtgctcagttgcccatttcacactatagaacatagcagcagcctctatttctttgagagaaaaacatccacagataggcttagaaaaatcagtaatgatagagccttagtggtcaaagatgagagctccaacacctatgaaagcacctacttgattgatgtgatcaaaaattaatactacataattaaaggattatttgaaaactataaatgtttttgt

SEQ ID NO: 12440 - DNA, 551 bp, Cannabis sativa
aatatttgacaaaatcatatcccatcaacatatagtaacatattacaacatttaatttggttccccaataattttactgcttttttctctcggtaaccaaacaaaaaaatcaaatcttgaaaccctaaaaacataaaagaaataaaattgtaaaatggagaagtaccgtagtcgggacgagagcgcttggcggggatggcggaaggcggctggcgcggatcagtgtacctccaataagagtcggccatacgctaaaggttgaatctttaaggtactaataatgtgaaaatggcagggaaagagggaaatgagaaagaagaaaagggattcctgtttgagtgtttaagacgatgaagaaaggaaaataagacacaactaaaatgcctaaatcaaaataagaattataagtagtgctcaaatatgagaatgagatgaaatttacaacaccacccctaacatataggatcacattttcactcatattttaatgtaggttaattaggatttttgtatttataaatttagattattagatttaataatttttattg

SEQ ID NO: 12441 - DNA, 800 bp, Cannabis sativa
ataaaaaattataaaattatgaaaattaattttgaccgtataaatattaaaattggatgaaaaataataatttatgtaaaaatcctagtgtggaaaattaatatttgtcattaatagtttatgaaaactcaatactcatcaataaaataactatcattgtaagtacatcaaattaataaataaaaagaaatactaaaagatactaatgatgtgcttagaaattcaaataaacattgtaagtaggtcaaataaataaataatcatttattggtacttaatcctcatacagtgcaattaaatattaaatcttatatttgtcaaaaaaaaaatatataataacttttataaaatattgctaaccaatcacaagacgctatctataaccatagtaatgttcataaataaataatcaccacgactccacgagtataaagttaaatgagtatatgttagagtactcccaacagcttctttactctattttttaaaatacattacttaaactctactttctttattgaggaaattagactctatacccattttacattgttatctcttatttttaccctctcttttatagtttttcatttctacctcttttttcaaattacctaccaaatttgcccctatcattattctcctttcatttagattttgctgaaacctatctccacccctcaaaaaacactattactcccatgaagatcttcaaagtttagcttttatagactcgtagccaccatttcaaagagagaatatggtaatcactaatcagatacgccaaatcttcatgattt

SEQ ID NO: 12442 - DNA, 622 bp, Cannabis sativa
gcatatcaggatattggtgaagtgtacatacagttgcgctgagataccgatagatatatgataggcttttgtcaagaacattcatgacccaattttaaacttgtgagtaggtgtataggcgcctagttacaggtcggttatgtgtttatgtgttatgtttttcaactgagtctatcaactcacatatattccttcatgtgtctgtaaaagccaggactaaactgctgtgagtattagagctcaatgaagattgtatatatctggatggttagatctagagtattctgatcttcgggacaatatgggctcagatttgtagtcactaggcgacctatttatcatgtccattaaaaaaaatagattttgggatcctaaattttgtaatttatttacattgacagtgtttatttatgaaaaatatttaattattataaaattttgattaaacacaattttatttaaaatcatttaatcagtaaaagttagcatagtaattaaaaaattatagtggcgtgtctaaactaataaaatgttacagcattcaatttgatgttgacatgagcagagcccgagctgcccataaacctcctgaaattattcaagaaatgatccaccacctcca

SEQ ID NO: 12443 - DNA, 786 bp, Cannabis sativa
tattaaaatatataataaaataagggattattttaaaaacacacaaaaataattaaaaaaaaatataaaaatacaattgtatagaattttaaatattttttttacagttttaaagattttatttatataaaatacggacttttttaatgtatttttatgctgtattattattattattttgatgttggttttttgttatttgtatattattttttaggttaattaagatttttcctccgtgaactttgatatgtatcaaattatgtcccgtaaactttttagttattaaaaaatccccctgaactattaagtattggatttaagaacttttgtctaatttcatttaatttttgtgattgcctatgtactataaatctactcccaaactttgatatctaccaatcatgttcctcaaactttaatatgcactaaatcataccccttgaactttcatctatgttagactttccttactaaaattagatgaaagtcctaaaatctaacaattttaatagttcaagggagtgtttttacgactttaaaagttcaatgggcataatttggtacatgtcaaagtttggattgtaaaatcttaattagcctatttgttatgttgttttcttattactttcatgtggttttcttgtgtctttgtagaaaaccataaaaaaaaatatataaaaaaattaatcgtaaaaatataaattttttacgaaaagtaataatttatcaattttccataaaataaaacaaggaaaactcttaggctaatgagtaatgtattac

SEQ ID NO: 12444 - DNA, 501 bp, Cannabis sativa
aatgggcgccacatgtacgtaccaacacgagtctcttgaagtacatgtgccgcctcttctatcgagagatatgtcaataatatcccattgaatgaatgcttgtacaatgtgtcattaaagaccacaaatcgaggcgctcttcttcttacctccactcttttcttcaaatcttctggcaagattcctttttcaatgtagtctttgattggttgacgccaatcgttttcatttgtactatctagaacagttatcaagttgactgtattttcttcttcaactcattccgtggattgagataatatatgacactcccttatagtaatttggatatttctttctccaggaagtgttagcgatgcagctaaattagctaatgcatcaacttttactattttttggtctaggaatgtgatttagagttatatcttagaattgatcaagtaaatatttagcctttttatggtaagggactaaatcctcatgcttgactgtaaattcatc

SEQ ID NO: 12445 - DNA, 539 bp, Cannabis sativa
tctcttttttgtaaggacttgagagtgtttgtactaaccataccaacttattttgattggtacaatttagtaatggattccgatactcaatcatatcaatgagctatgttgcacgactaatcattcttatgttaaatgagttataaatatgcttcacatgtgtaagtcttggtttataaagtgaagtttgtttaattttttattttttagtaatctttaatgcattaaatttaaccttttagcctgtgaaaaggagtattgcaaagttaattgatttgccttattcttgttaattgaagaggtaaatgctcccttaattattatttctaatgtaattatatatatatatatttgagaagtttgaatattttaaatattaatgaagtaggctttgagattacaattgtgtgtcataatggaagatcaagaacttgtgttttagtaaggtaggttataggaaaattgtttgtttgctgcggagatataaacaaaaaacttattgtttgttgtttgaattgtttgactgaagcttgttgtgt

SEQ ID NO: 12446 - DNA, 639 bp, Cannabis sativa
aaatatgcccgtgcagtttggaggtactctgaaatgacctttgattagcgtctatcctcttcaatgcataaaggtgactatttattccatctttctacaattcattctaaagccgaaatggaacagatcatgtgcactctttcggcaatatggactgaatggaatcgggtggttcatggaaaacaagcaaaagcagcaaaggacacagcggcctatgtcatagcttacttgaaaaacttcagatctgcccaacataaataccactctgctgctgcaccagaaactccacaccagcagccactaaactagccactgcctcatactcgtgcacctgctgctcccccgtggaagcctcctcttgctggtgctttcaaattgaatgtcgacgctgctgttgatggctcaaggaatgttattggtgtaggggctatccttcgggattcttgtggcaaagtgatagctgccctctccaagcaactagtgggcaatttcaaatcccatgaaatggaagcattggctattttccatagcttaaattgggcctttcaacaacagttgacattgtcccaaattgaaactgatgccttaatggttgcttcggctttacaagctccattcaattcaaagtcatcttttaat

SEQ ID NO: 12447 - DNA, 519 bp, Cannabis sativa
ttaatatcattttaattcaattgaatgttgaacatgttaaatttttgaacaccaccacaaacatccaatccatcttattggatattcaaaaataatattcaatctgattcgatcacaattggatatataatatttgacggtcgattataattgatcatcaattacctattattggattggatcgatttataggcttattaaaatcccacattaactactgttacacatgtcagtgtatacattttaggtaataattgacgtgcaacttgagaacattgcatgtcaagaaatgatggtgaagtggcactgacatggaaggtgatctggaatgccaatgtggctctactcgtgtaaagaaaaatcttttcagaatattctctccgtacaagccgttagcataagattcctcaatttgttagtcttgttttatgtgccttattctattgtaatcttgtgccatctggccctattgtaaatggctgagatcagcctgtgtaagtattaaatagcaatgaattc

SEQ ID NO: 12448 - DNA, 508 bp, Cannabis sativa
ccaaattttcaatcaatgatgtctcgtttcattcactatatacgcatttaaattgtacaggattaatcatacaatttgctacaagggcattttttagtataagacaaaatcaaagctaaattaagccatatttcttaatggcaataacattcatatatttaactaaggaatcattgtgaatttttaaatgtgaaattttttaggaattaactaatacctcttataaccacatcgagctgttgttctctctccaatcacatgagctatttttaagtggaactatacacaacaactgagaaaaggctcctttggtatactttcgggcacctaaagaaagtgaaagtcatgtacaatgcattaattataaatacaaaatctaacattgcatttttagaactccttgtcgagtttttgagttagcattataaaaaagacgtgtgagagcttacttagtgtagctgctttgtaaccccctattaaagtaagcatgttatcttgttttaattaa

SEQ ID NO: 12449 - DNA, 722 bp, Cannabis sativa
tcctgatctttagaccttacttcttttttattttatttctttacttcatattactgtttacattctttggtattctaacattgtaatctacccccacttcagctacgataggtaaataagcactacttatgaaatctctaacaataaatgaagtgttagaatattttatatggacttcataaataagttgctcataaaatgtcaatattaatatatgtggataactatatgcatggtataataccgattatgctattaggaccataatgggatggtcgattttattatctgcatttgaggcacatggaagcaccctaatgactataaattggcccactaattatagccaccaccactagcattttaaacccaaaaactatgtccactctacccctaataagtatatctatatatttatatatgtgtgtgtgattttagaggaacaagggaaaaatatgggtgatatggtggtaaaaagttttacaaggggatgttttccataagctctcttaatgcttagaagatgttgtggtgaatcaagagactcacatttaaagaatgcacaatattaaagtatgtttattattatttaatgccctaaataaaatgattgatcttggatgtttaccagtattaattgtgtttattgttattgataataaaatgctcattgtgtagtaatttaacgtgaagttcatgcactttttagttttcaaagttga

SEQ ID NO: 12450 - DNA, 673 bp, Cannabis sativa
gttcctcaaattgatacctcctgaacttgttctccaacttgtctattcgcaaatggattgaatcccgttgctttggactaagttgttgacgaacatcaagttttttttttggttcaagcgttcctgtaggtccaattggtcatgacgactggctaatcttgttccacccatagaccttattctacttgatcatcgctgtgacgagcgttctctcctccttgcattgattgattatgagatattgtgtgcctcgcggtagccctcgcctcttcacgtcatgctcttcttcctaaggtttgattcgcctcgttccccctatagggatttgcgagagctccttttttatgagctttgagagaaggctggcgatctccgacttatgttccacatatcccatgctgtatccccaaacttcctttattcttatggggaatttccgatttcttggttcttggttgattatagggcatctcaccttcaaggtatcccttagcttcctcaggttgcctctcctgagagttttgggaatacctttgggttgtctcctgcccctttggttgcgagtttcgaggttttcctcgtggatctttgtctccaaggtcaggttgattttgggaactattctcctgtgccaccctgactgcagatatctcacgttctaattcagcattac

SEQ ID NO: 12451 - DNA, 605 bp, Cannabis sativa
aggaattgcaagctccataaaaagtttgttctaggaatccaagccgctttgaattggattgcttctaatctacaaaaattttgggataagaatggctcaaagaagctttcaaaggagaatgtttgggagccccaaagatgaaaaccacgtgagacatcttagctactcatcaatgttgatgcgactgttagctgatcgaattatggctgctgaagtgttggagcagttgtacgggatcatttgggacatgtgaaggctatcgggatgggggcaagatgtagttgagatgggtcttacaacttgttagttacactcggattatgttgaaacaatggctatataggggagagcacatgatatgagtggtgctttgggattactggtagttgcggtgtcctatggtgtttcgcatgctggaatttcaggggttcacttcaatccaagagctactagctcatgaaattgctaagtatactcttcataataagagcgcttatttttgggataggggattgccccaatggctctctcttatgtagttgagatttgtttttcccaatttgattttttcttgtaatgtaactttctttcaaaaagaaaatgta

SEQ ID NO: 12452 - DNA, 1411 bp, Cannabis sativa
tcaagcgagagggtgatgaagtcattccgagcttatcaacaagaaactggaatctggagtgtgaaagcccttttgtcaaacagtctgcaatctgatcatgtgatggtatgtatctaatctccaattgcttctgaagtactttgtctctgataaagtgcacatcaagttcgatgagcttggttctagcatggtataaacgggattggcagcaagagcgctagcactcatattatcacaccatattataggggctgctggaagtttgaattccatttccttgagtaattcttgaagccatgtaagttctgcagccaattgagctaatgctctatactccgattcggtactcgaacatgcaacaactgtttgcttcttggaagaccatgatatcagagagtctccaagaaaaacatagtaacaagcaatagatcttcggtcgtcagggcaacaagcccaatcagcatcagaaaaacccgtgagtgtgagtctgtcgctaggtgttatatggattccatgttgcagggttcctttaagatatcgtagtacacattttgtgacattccaatgaacactggtaggacacttgagaaactgactaagcttgttgaccacaaaggaaatgtcgggtctggtgtggcttaaatattgtagtgcacctatgacacttctgtagtgagagggatcgaccattggttcaccatcatgaatggacataggtttgcctgctgtcataggtgttggacttggctttaggttgacgatattcactctttgtagaagttcagatacatatttttcctgtgacaaatacaaccccgtatcatctcgaaaaacctcaatgcctaggaagtaatgtagccccctagatcctttagtgaaaaggtcttgtttagccgtgatatgaagctttctaactcccttgatttgctccatgtcacgataatatcatcgacataaatcaagaccataatgacatactcagaatgtttcagcataaagaatgaagagggagccttcgagttcacgaattgccactacaatagtgtgtttttcagttgctcataccagaccctaggggcttgtttcaagccgtagatagatttctgcaatttgcagacataatgtggcttgtttgggtcttcaaatccttgaggttgtaccatatatacatcttcatccaatgtaccatttaagaaggcgttattaatgtctaattgccttatgtcccaattgtgtgcaactacaatagtcaagacaacacgaactgtggattatttgatgacgggactgaaagtctcaccaaaatctaccccaggcctttgatgaaatcctttagccaccaaccgtgccttaagcctctgaagtaccccatttgcatcaaatttttccgtgtaaacccacttatttccaa

SEQ ID NO: 12453 - DNA, 574 bp, Cannabis sativa
aattagtctttggcacaatagtttaaatcatatctcagatactataggagaaacttttctcatatccaaattctgtgaaagctagtatcataaaatattggcatttaattacgggatatttgcagcgaaactcccttaatatttgcaattgttacacatatgaccctaataaaataagtggcgcaaaaagtactttatcttacgattttgttgcatccgtacccttttttagttgttaagtgtcaattaagctcgttacgtgctagctcaaaaacacatggcaacatatttctttagcttatttaatacatagtccaataatatatcgccaagtgtttttgaattgacacttaatggccaaaaaatggtaccactgtaacaaaatcgtaaaataaggtatttttactgccatttttttaattaagctcatacgtgtcacaattataaatattaagggggttttgccacaaatatctctttaattaccatcttacataaattgaaactagagaataagaactgaagaggactaaattaacatgtacccatatatatgaaacaaattgaataaccc

SEQ ID NO: 12454 - DNA, 600 bp, Cannabis sativa
tcttcttcttcttcttccttcttccattccttcttcttattcttttttttctctttttttctccaaaaattattcagattatctctctctccctctccttcactcacgatggtttatcctccagacccgacgctggtattccatcactggccggcgacatgcgctgcacgaagagaacgatcacacttagaggttttggacagtgaatggtacggttaaactcgggaggtctaggagaacaaaacccctcaatagatcgggcttgaagatcattggaatcgggtgttgacgttcaccagaatctatggagtttcgagatgtttgactctgattcggtggcttctggacctcctttcaactaatagtctccaaatgtgtgttctctttggcatgggcttctcgttctcatagttcaatacccctttcgtcactatcgaacttgggcaaccaccttgcgtggtggttcagcggtgatgctccgttttgagttttttctttttttcagatatgtatgtgttttttttcttacagaaatgttggcttttggattttgttggatttgcaaaaatgttggttgtgatagtaatggcaatagaacaa

SEQ ID NO: 12455 - DNA, 529 bp, Cannabis sativa
tcagaagagaaaaatgagagaaaagagtaaatgcaaggtaacaaagagtatgtggaattaatgaagggaaatggggtataatagaatgcttcatgtggaaagtttatatgttaaaatataaagatattatactattggagataaaagaatactattcttgaaatttgcgatgccagctatgtttttatattattttttttttttgaaacaactatgtttttatattaaaagtgcaatatatataatagtttaataaagaaaaaaaacttatatatatataataatatgtgatatgataattatagtatttttaaaaagtattatagtaaaagtgtcaaaaataatatgtaagaaaaataaaataaaatattaaataaaatattatattttgaatgatttagagatatattaaatggcactagtaactaactagaagactaaagtctgcctggtggcagaaactgaagactaattttagatttcctatgtaattatgtaagtacgacacctaaatctgtaggtagatatt

SEQ ID NO: 12456 - DNA, 1113 bp, Cannabis sativa
aagtagctctatcttcgttattgtttgttcttgtactggcttcgggttgtcccttatgctgctttcttctttgcccgtgcactcaaccataaagtctgctaaaggcatgtcctttaaactgcctgtttggggttggaagattatttcgtactgacccaactctattgaccatttaagtaaccgtctagagacgtcaggttcttacaatattttgcgtaatggttggtcggtgtctacccgaacagggtgagcttggaaataaggccttaacttccttgttgctaagattaggcagtaagtgagcttctctatcaaaggatatcgtccctcagcttcaacgatcattttgctgatatagtaaactggatgttggacgttgttctcttctcttatcaacacggtacttatagcatactctgtaacgactaattatattcctaactcttctatgtcagggggttttgagagtatgggaggctttgcaagttgtctttttaattcttagaaaattttctcgcattcctccgtccattcaaattttttattacctcgaaggatgttgaagaaaggaacgcacttgtctgttgacttcgaaacgaatctactgagtgcgactatccgaccagttaagctttggccttccttagtttttgttggtaatttcatatccaggagggcttgtactttctcttgattggcttctataccctgagcattaacaataaaaccaagaaacttacccgagctaactccaaaggagcactttaagggagtgagttccatgttgcattttttgaggattttgaagcattaatccagatcctctatatgcccccaactttcttggatttgacgagcatatcatccacatatacctccatattttgaccaatctggtctttatacattttatttactagactttggtaggtagctccagtattcttcaaaccgaatgccataaacttgtaatcatacagacccatatctgttcgaaaacttgtatgttcttcatctggtggatgcattctgatttgattataccctgaataggcatccatgaagctcatgatttcgcgcccagctgtagcatcaatgagctgatcaattcct

SEQ ID NO: 12457 - DNA, 598 bp, Cannabis sativa
agatctccttctcagctttctgtagcaatttgaatcacccaaatggggttaatatattgacggagttatgctcaaaatatagaagtggtacaaggcttcgagaaggtcactcggccatgacaattcaagaggttagtcgacaaaaggcaatgaaatgtcacacatctaaggacatctcggctttgtatatctccttctcaactttctatagcaccttgaatcgctaaaattgggttaatattgagggagttatgcccaaaatatggaagtggtacaaggccttaagaaggtcactcggccatgataatttaagaggtaagtcgacaaaggtaatgaaatgtcactcggccaaggacatatcacctttgtagatctccttctcagctttctataacaacttaaatcgcccaaatcaggttaatattgagggagttataatgctcaaaaatacggaagtggtacaaggcttcaaaaaggtcactcggccctgaccattcaagaggtcagtcggtaaaggcaatgaaatgtcactcggccaaggacatctcagcttttcaaatctccttttaagctttctatagcagcttgaatcatccaa

SEQ ID NO: 12458 - DNA, 967 bp, Cannabis sativa
tttatgaacatggactaaaaaatgaatatacactagatttgtagcattctattagagatgctcttagggactttctctaagatgggatctaaatagatttttattgggttgtaactttgttatggcttttcaattatgtaattttgggacttataagaccatgtctaataaatggtataacttttgaactaaatttggcttaaaaaaataagtgaatgttatatttagcttaaattttacaattttgttctaatgcattaatgataaattaattttatcaaaaaaataaaatcaattatccttaattagacacaaatgtatgttaaatttggcacaacttttaacatgtgccaaattcagaccatattatacatcattattattcgaagtttaattttatgaacatgggttacaaaatacatacatactatttttataacacttttttagagatgctctaatgtggcttattagactttcacctaaaatttaattaattgaagtgtcattaatatcagtaaacattttatgtaatgattgtgaggtttaattttcactgatttttatttaaaaaaaaaaaaagcgtttgaactacaatttaaatattttttgcttaattataaattttggtcactgaactttgatatgtatcaaattatgtccctgaatttttttgaccatttaaaatttttttgaccatttaaaattctccctgaactttctccctgaactattaagattgttgatttaaggacttttgttcaatttcatacaattttactaattcggtgattgtcaatgtattaaattatgttcttaaaattttgacatgtactaaattatatccttaaactttgattcatgttagatttattaaataaaaattaacttttaataatttaaaaaaaaaaattgttaatgaccctaaatatttgagggacataatttaatatatgctcaaaaaaaa

SEQ ID NO: 12459 - DNA, 1002 bp, Cannabis sativa
ttaaaaagaaaaatattcatatagttcatccctgaaaaacgattaataatgtacaatacaaaaatcaaggttgttctaaattgttgtttttagcttattaacataaattcatttctaattagagggatcaccccattaataaaaaagaacactagaaaactatttttatgcactgttttgtagtgttattttactcttgttttaatagaaaaaagggccacgtaaatgaaatattgtgaaaaatgacaggtcatggaatctatatcaattctgataaagagcaatggacaatgggaagaagaacataattatgtcaagtatgcggctagtggagaattcataccgaaagattgcatgtatgaagagccattacagatactacttacttcagtggggtgcaaaaacacaagaacaacactgtaaatacagtaccaagcaaaagaaggaataccaccgataaaaatattcaacgatgttagcctctacttttacttgcaattgaagatcaaagaaatagatttcaccacatatccattattgcgtcaaccaacaaaacaacaacacaacacctgttgtaatcccaaaaatcacaactacaacaacaccatatcaagagaatgtggcaatgcttgaaaacaatacaacaacaacaaaatcagacacactggaacaccaatcaaaagaaagaggagagtcataaacaagagaatttgaaaacgatatattcatcatagttgactatgcaaatctggttgctgaagaaatggtagaaaaacttgaaaacaaaagtaaaatactagatccaaaaatcgacatcaacaacacgaagctaataactgacaaacatcacccataagtagaaaaaatgaagtcaggcatacaaggacaaggaaacactgaagaatgtccttagctactacgcaatcaaaaataacttctaatacaaagtgtggaagtcatactctcaagagtacagtctgaaataagtttacgaaagctgta

SEQ ID NO: 12460 - DNA, 575 bp, Cannabis sativa
caatatgtgaaggtccagcctaaaatccattaattattatattgttgaaacttgaaatttttttcacttttattttcaagtcttatggtatttttgacacgtgtcgctcaagctttgttatatttgtgataatttaattatttgatgaaagtccaaactgtagaaaccgcaccgcaccacatcattttttgcgatgcaatttctgcagttttttagtttcgcgatgcaggtgcagtttgggaaattagaacgtgcgggttggtttaaaaaaatagtaaaaaatcgcaccgcgaacaatcctaaaaaagacacacggtattttatatatggtatcaacaatccttgtagattgctactatagtacacagagtcacccccaaatatacgatttattagtcaaatttcaacaagtacaaagtaattgactttaaaaaaacttagattctctctaatggttttggcgcaagcttattgtactctatttgctaaatgaatctctttaaggcactaaggtttgaacgaactcccttcaattacttgacaaattctcgcttcctctcgatgcaagacctgta

SEQ ID NO: 12461 - DNA, 749 bp, Cannabis sativa
agaaacaatggtggctcgccagaacctgcacaaaatgataacatttgtttaagcttgtcactagagtagcctttgggaaatagaaagacctcattgattaaattatgtaaacagaataaagtagcaaaggctttttctttacataggagctaatattttcaggtggtatattttccaccctgaaagatggactacactttcatttggccaggaaagaacaagaagtgatttagcccatcaattgaactatgagaaaataagttagctgaaggggagaaaataaaaaaagcaaacaaatgctgtcactaagctactagacaaagcatgaaatcaggagtcaaccccaatctgtatgaagtcccactggaagttgcaagctatgattatggcagaatacagttaaatttctcatcccggtggctgtcttttctatctgtctaccacataaattttgaattgccagaagcttaaatcattttaatccaaactaacattgatttaattatgtaaacaccagatcatttttctttctaacaattttattgtgtagaattgctaagaggtcttccaatataagagctcgatgatccagaaattttcacaattcagtgcaatatttttacactaaagacaaatgttgaattgagaaagatgaagtgaatgatacctttggacgagagaatacgttttttgtgacgtccactgttcaatacttcaacattgaactgtttaggaatggtgtctaatga

SEQ ID NO: 12462 - DNA, 838 bp, Cannabis sativa
gagtaatgaattacattgattgaccaaaaaaatattacttgaggggcatatgtgtatgattaactagaatttatctgaaaagacatgatacattgcaaacccaccactttaaaatttttcaaaattttgtaaagttcttttttattgaacctttcgacgagaaaggaaaatcaaaatttgtgaatgaattttgattagagaacctttctgacgagaaaggaaaatcaaaattttcaaatgggatataactcataagctacatgtgaagctgaatactaacaactcgtactgtataggaaagtattaaacaagacaccaagatgccttgaaaaaatacttaagcctaatacatgaacagacggcctaactattcatataagcaatcaaaaatatacaaagtgataaatcattaacagtatatttaggtttgcttaaaacagactatgactgtttatgcgaagcagaattgataactgctcgcaaatctaaagcatggtaaataataactgctcgcacacgtagtagattactaactacttaaataatatcaaaggaaatcatgagcaatggaaaggcctaaagtatttgaaatttgatcaaaatataattgtttaaattgtgaatgaaaatgcaaacaagcaaatatattaagttcaaatataaaagtacgaagcattcaataaagataaaataaaagcaaagttggtcatccaaccttggaaatctgtctttacaaaagttccacaaggggcaaaccattgtctcggccttagggccattttcctatataaaaaaaccttaaaaccgaacctacattgtaggggacttggttggatct

SEQ ID NO: 12463 - DNA, 683 bp, Cannabis sativa
aataatttaatacactcaaatattaactattatcttacacctacttacttatactcatttttttttgaatggtacttataatcattagatttattatatatggctataaaaatagggacaaaacaataacccctactataaacatgtcttatacatatatatcaattttttttatgttggatatgaaaaattatgttaaatcaaatttcttttatacaacacatatttttttccctacgcattccttgtctattttttttatcccatgaaaatctaacttctaaacataaccattgagaaaaattttaagaaaacactcttcacattttaactgaaagtgtctttactcctcattttttttattaaatcaataacaatttttaaaataattcaaattatatctttgtagtctacaaagctataaaacggcatttaattatcatttttttactttgttttatatttaagaaaagggatttgaatttgagatgaaatcattgaaatgtaatactactaggcttaattataatttaaagctcttttttttaaaaaaataaaataaaagatagaatctattatattttatataattacatcaataaataagtagaaatttatttgctttaaaaagaagttagaaatttataacatcacaacaaaattgtcacatataggaactttca

SEQ ID NO: 12464 - DNA, 768 bp, Cannabis sativa
taaaatctagaaatgtatatttataattatagagttaatatttgaatgtttaatatcattatacttagttttatctagtttaagttagctaaatagacacgtaagtacactgtaattatatgagtggttttgtagccacatcaaaaattatctcaaaaaatgagttatatgcaaggagcatatttataattattttcaaagttcaaggacattttattacaataatttaggggacaaaatcaatattctttaaattaatttggatgtatatatatttttttattttagttaattagtaattgtagaaaatattttatacaatatgatgttattaagggtaaattttattttgcaaaagttatagattggactatctgttttgttaaataacaaaatagattctatattttttaaaatagtataaatatgacccgcgttcaatttttgataacttttttttaatataatcaacttaaagacaattcctaatacgaacagacgtaggatatttaactagttttgtcataacacatttaagtcagattataattaagttttattttgataaaaaatcaatttaggatcctatatatatttgtaccattttgaaaaatataaaaattattttgttatttaacaaaatagagagtctaatatgtaacttttacaaaatataaaatccaaaatagtatttactctctattatttatttatttatgtatataagtatatgtcacttatatatatacacatcttttatttatttat

SEQ ID NO: 12465 - DNA, 1051 bp, Cannabis sativa
attataagcacttaccatatagcttattagaaaaattaatatatatatatatataataattttaataatataactaattctatgtaagatattattttataactttataactttttatattaagatattgaaattattttatcaattaaatttttttataagtatatcatatcgtaatttttaaatatgacataatgaaaaattttataataatttataatgtacttaatttaatatattgaattttattaagtttaaagttttagaatttttttattaaaattttttataaaaaaaaataaaaagattaattttaatggtagttgttcttttttggaaacagtaaaaaaaaaaatgaagatgctttccacatatcaaaattattattattatcataattattattattatttaaaaaaagaattttatttcaagataattttttcatttaacatatttggtcacttatttcatagttaactttaaaatcgtgctttcatttttagatttttaagttatatgatgttattttgttgtttgagatattttggtgctactttttttaaatatcatttacattaattttaaacataattaagaaataaataaattataataaagtataaaaagttactataagtttattaacaaaattagtatattcttttaatgtaactcatatgatgtttaagatactatgtggttttcttgtaagttatttcagaagtctatcaaatttaatttataaaataagtttaattggaatacaatatttatcttttaaaaaaaaaaatatttattggttaactaaataaaaaagaaattaaaataatactttttattttcgtcatttttttaatgacaataaagaaatatatatttctcacatatcaaaatgatcattttaaagagtagtttgaaatagtataatttttgagattaaacaattattggtgtaaccaaacaaatatttaaaacttataaaaataaaaatatttttttaatgtaaaagtttagtactgtataactaaaaaagagaaagaaaacaaaa

SEQ ID NO: 12466 - DNA, 588 bp, Cannabis sativa
aggataaaatcgtgtgttgttcttcttgtataatttctggtttggttcattgtgttgctgactggtttgtgtgtgttattgctgttctaattgttgattaattgcaggttttaggattgatttcttggtgttattgttgctgaaattacaacatttttgccaggtgaatgagatgaggatgacatatttgaaagtaaagaatgagttagaggcagtaaactcacaatttacatacgctttgttcataataagggagaggaaattacattggaacaacagacgttttggggaggctggaaagttgtagtggtcttagggtattatctggtgcttgcttatattttacattagcttcataaagcttgtaatgcatttgatgatgtggtcaagaaggtgagacttcacatttctgttgacaataatgatttcaagtctcaaacctcagcctacctatgttttatgatcatcaactactgctacttcatgttcttcaagtaacacagcaggaacttcatttattactggtttctcaatttacatttgaaactttacatttcccacagtcaaccctttacattttacatttga

SEQ ID NO: 12467 - DNA, 726 bp, Cannabis sativa
tgtataaacacttttgactttcttaaaccaaaaaatgatcctttacttaactaattttaacttattttattcaaacagtgcacaaaaaaatactttttttttttttttgaacttgtgcacaaaaaatacttaaaagctatccggttgccagttttaatatactatttacccttagttgtatatatatttaatactaggtgatctagcacgtgaacaatgcacgtgtttagctctttcattttatttatattttaatttatttaatttttatttcacaaataattataacaaaaaatttatgtaatttaatttttacatcttatcttaattatagtataacttataaaacacatattttattattatacttgagatagaatagtaagtaacaaacattaaagtggatattgtaaattatttgaatattgttttctgtaatctaaattattttaaatttcttaaaaatttatagaatgtctttaacaactactatatacaccatcttgaaaaaaaaaattaaaaagggtgcatcagtacattcttttttggagagtgcactatagaatagcttcctacggtatatactatttaatttttaacctgtaatcatttaaaaaaaattaagagaaaaaacttagaaaaaatctgtaatacacctcttgaacaggtgttgtagtagatcccattacatgtttttgtatctaagaaatttttttaattccagta

SEQ ID NO: 12468 - DNA, 502 bp, Cannabis sativa
tcggcccaaatccaagtgttaaagttgcaccttataaacaaaaatatgagactctttccacattacacacgctaggacacttctatattttgttaaaatattcatcaaaatttcaataaacatatatactacaaattctgaaaaattacaaacatataattataagattattagagaatattgtcccactcccacatggattaacgtgaaagtatatattgaactatatataagaacatggattactccactcatcatcaatgggttttgagttggaatctcatgattctcaacatggtagtagaatcatatcccaagcgagcaaaatagcatcccagccgcgaacaagaataaacgagcaaatagaacaacgaatcctataattttcaaagataacgtgtgaaaattataatattttcttagacaacttagtattaagtcatgcgtgcatggagttatggaaatgtaataagctacatacatgcacaataattctacgaac

SEQ ID NO: 12469 - DNA, 700 bp, Cannabis sativa
tgttatcaaagatcacatcatgcatacactatacaaaactaaacaggaaaattctataatgcacctcttgatgtacttatatttattttggcatttaagataattttgtagtttaatttttttccaatggttgtataaattgtattatttaaagcatcttacaatttttttttaaaaaaattaacacatataaaatataattcaaacaattaatttatacatctataaaataaattatttaaatattaatttctattgtaattttttttaaattttatagtatgtctcaaagtctatttttttttttcaaaatgtcaaaacatataacgagtgcatcaattaatgtactccttccaaaataatgttctaaataaatataacgtacacaattattaaaaaaaaattattattttgtcaaaacttcgaaatatataaaaagtgtaacaatgtactcttttcaaaaggtgcataagagaaatacaccctttaatttagaacattgttatgaagtgtcgttccataattagttaaaaaaattttataataattattaaaataaaataaataaaacttactattcaattatactaataataatattacattttataaaaattgtaaataccattttaacacttctctttaatttattgttggggcattaattaatgaatgaaagaatttatatccacaagattag

SEQ ID NO: 12470 - DNA, 548 bp, Cannabis sativa
  modified_base (406)..(410): a, c, t, g, unknown or other
ataattttctaatttcacgatgtctcatacatcaattgaagactacatagtgagttatgaaatcatgagcaagaaataagtcaaatctcaccaaacacatataatagcccaaatacatcatgaaaaacaggtaatcatgccctaagatcaaatttggaaaattgtgcaaagcatggttcataaaaacacaataatagtggccttttaccactactatgagcctacaaataccccaatgatgtataggagaggggatcgaaaaaatttctgtaataaacactctaattaaatatcagtgactcgtggactaaggctcactaataccccaaccatgtaaaaattatcttctttaatactcattaattgcttcatgtagctctaattaatagttgccgaaaatctcggnnnnnattttggtgctttcatttagagttgtagaaagcttaccaaaaaagaagtcgtataaaatctcgtggcataatagtgttaataaggaacacttcatccacaaccacctaacgactcaaaaggtctagaagaagaagagg

SEQ ID NO: 12471 - DNA, 550 bp, Cannabis sativa
aaaataatttccaacaacatctaagtgtattgagtgattgctattttcttttattattacattattgcacaccattgtttgggtaaatgccaaaaagaattgtgtttctgtgttgatgaatgtgttcacacataatggatattgcgtgaaattagttttcttagttaataactttatgtaatacatcaaacttttatcatccttgagttggagtggttgacagcctttcttcaattggtattttagttgtatttgagttgtttcactgttgcattgtagtttctctatcattatctgcactggtttaacaaaagtgcaatctcttaatattagttctccacttaattcgtaatcagcatagttcttattgtcatctcaataactattgctctgtaccgaaatttgcagaggtttcataactaaaactaatgtaccaatttttcaattttgttaagcaactattttaatacatgagaataatgtataaacaactcttccgtgacattaatcaattaaccttaaatatatcactcatctctctctctctctc

SEQ ID NO: 12472 - DNA, 693 bp, Cannabis sativa
ttattattttaaagcataattagaatatctacaattatactatctattttttttggttaaaataattaaagagttaaaatagagactcattttttaaaaaaataacaacattaagtaaaataataatttaatagttaaattgatcttggtgaatcttaactatgaaaaatatcaaaatattagttatatagactttaagtattttgataatattcgctttcttaagatgcttgatattattggtgagttcttttcacataattatttttcgctagttttaaaaatagttgcatataatatgatcaactataaaatttcaataaaaaaaaattaaaaatatatgtagccttttattaatttaatagatattttattttactcaattattttaagattttaaatttttactctagtagttatgatataatttttacgaattattttataaattagttattttagactattaatataaataatataaaatacgagattttaagtaaaatatatttatttagtccaatattttgtgagatatttattcattattagagttcgtaaaagaatagtgtaaattttaaattaaatttgtataacattgtagatggtcttaaagcatcgatatccttatttattttcattgacttaaatcactcttttaaaaaaatatatttttgtgagataagataatct

SEQ ID NO: 12473 - DNA, 635 bp, Cannabis sativa
ggttaagccagtgtccacaacatggcgatgcttcctctcaactttaccttgctgttggtgagtgtgagggcaagaattcctttgaatgatgccaagatttttaaaaagtttgtacaaaggatcaaattctttcccaagatcactttggacagatttgatttttgtttgaaattgtctttccacataagagttgaattgacagaatagagaagttgcttctgattttgatttcataggaaagatccaagtgaatcttgtaaaatcatcaagaaaacttatataatatttgaaaccatcagcagaagcatagaaagagggtccccaaacatcagtgagaatcaaatcaaatggttgaacagtattattggaagtgcttttaaaactgaactggtgtaattttccagtttgacaagcattacagaaatcaagtgctttgcactttacatttggaacaactttatgtaaaactttattgagtataggttgagatggatgaccaagtctatggtgccaaatattggcaatttgagacttgtcaaggacaggattggaagtagtagtgtgattaagtgctttgggctgaggagggaccaagtcttgaacttcaagcttgtataatccttcactgagatggc

SEQ ID NO: 12474 - DNA, 708 bp, Cannabis sativa
aaaatatgtccttaagcacgacatagcacgagaagcacaaaaaacacgaaaagcatgacatgtaagtacgaataaagtagcccgaaaagtacaacacgcgacaagcccaaaaaacaagacacaacatattaaaaaactttatagtttattaataataataataataataatatatgaatttattaattataaataagttaaaataataataaaatttaaatataataatgaatattataattctataattaaaacatgaaaaattaaaattatatattaatttatttatagggtgggataaaaatttaagtatttataagtaaatatttaaaatttaatgatgttaatattttattttatatcaaaagttatatgaatataattaaaactttaaaatatacatataatttcgtaattgtaacaaaaaaatatatgaaaaagtaaagcacaaatttaagcccggatatgaaaacgagctgacctgtttaagaattacgggctggcatgagcaaagcatgacacaaatctgaacacaacacgaaaataccaggcctatgagttgtatcgggcctaccttttaaaaatattcaaacgacaagacacaattcatatttttctgtggcacgacacgacatgacccgttttttaaaaaagcacaaataaatatgggtgcacgacacttacggcactaggtcagagtctaaaatt

SEQ ID NO: 12475 - DNA, 500 bp, Cannabis sativa
taaatattttattggataagatatgtttttttgagtgttataagataagatattaattattaaatgatcaaataaataaagacatgtttttttgagtgaataaaatacatattcgcttcttctttctctctttcttgccatcacactctttcatgagttaagcacacaccgtaatacaaaataatcgaaagatattctttctcggattcactaatcagagaagtagctacatgtaagcaactcagaagtagttattaatgtccttaggcgtttttcttctaaatgagacattgataactacattattaattatgagtgtgtttagtaagattttttaatcagtttttttattttcttaaaaattttaattacaaaagtaaaaatatttttcaaaaacttattttataaaattgttttcacttttcaattttttatttgagaaattttttgaaaacaactaaaaaagtcacttttaaaattttagactctgacctagtgcc

SEQ ID NO: 12476 - DNA, 533 bp, Cannabis sativa
cctattttgacttttctggtaggcatagtgggatcgatctccacttcttctaattcctccactagtctgatatatgtaatgtgatccccaaagcgaggatctatttcatcgttctcgctttgggtaaattcctattttcttgggctctgttcagcctttgatccttggtcgttcgattcttctttattggtcgtagttaaggcaatgttatagcattggtgcaccatcctctaatctcctttcaaacatccaactccactcctagtcatgaactttatgcactgacatattgaagttattgctttcaaataatatagggtcggtgagcctatcatgacattaaaagaagaagggacatcaattagtaggaatttggccatcaccatgttggtggtcagagattttcccacaataagagggagacaaatgtctcccaatggagcaatgctctgtacgtagaaaccatacactagctgtgtgcaaaggataagatctttgagaagaagtcccatcttttcatattattatcccaa

SEQ ID NO: 12477 - DNA, 654 bp, Cannabis sativa
tatttatcaattatatataccatcctattagtaataataataatgctaattaagatttttatccttgaatatatgcaaattatgtttctaaatttttctgactgttaaaaattttctttaaattattaaaattaatgtcgggtttaaaaacttttgttcaattcctttcaattttactaatttggtgattgtccacatactaaattatgtttctcagactttaaaatctaccaaattatgtcacttaaactttgacatgttaccattttatgcctctgaactttgattcatgttacttttcttactaaaattagttaaaagtctttgaatttaacaatctcaataattcaagagaaatttttaacgtctttaaaagtttaaacaacataatttggtacatgtaaaagttaagggagcaaaaattctaattatcttaataataataaaaatattataaaaatacggatttagtttttttttttttttgaactttctatactatatattattttcatgagcttttgtaaaaatgtaatttaaaataaatcataaaaaaagtcggtataaatgtaaaaaaatatatgcaatttttaaatattttgtgtaaaaaatgtctattatcaattaaacaaccttgaattgtattttgcttgc

SEQ ID NO: 12478 - DNA, 644 bp, Cannabis sativa
tgctacaaaccaaaaagactctacccttaaaactattgagattgactctaaggagaaatttcttactactaaacgaaggtacgcgagttacatgcaacatattacaaaaatcttgtggttgcattgtggtgattcaaattctagctatttcatgctagtgtcaagaaaagaaaagagaagaaaaggattaccaccttcattttgaatggtaaaatcattgatgattatgatagtattattgctcattattttaatcacttcaagaacatcatgctcgccaagagttcttcttctaaaaagctgaatagcaattgtttggttcatggaaacaagctttctttgcaacaataaatccagcttgtcagacctttttcgaataaacaggtttaggatgctatgtttgatataaatcagatcaaaagtaccgatcccgatgggtttggtgttgggttttttatcgggctttggactaagataggggataaaatcacagaggccattctatcttttttgttgaaaaagagtagattccaattgatgttaacaagacttccatctcgctaattctaaaaaatagattatctttcctctgctaccgactatcatcccattgcctacttcaacacattgtacaagtgcatctc

SEQ ID NO: 12479 - DNA, 633 bp, Cannabis sativa
atttccttggggtctaatcatttgtacttgtttatgaaatgtgaatattcctcacgtttcatatttaggcacatgagagaattataaataaccgcataattactctttgtcattatctataaacgatcatgttgaatgtgctttgttgttctcgtcattcaatcaatatttttcttaaacatctccgtggaataatgtctaagtgtataatcatagtacatctcgcactcttccttaaatgttgagtgaagtatatgggagatccttacttcaacacgtcaagaacgagatgaataatgttgaagttgtccttattctggttgcatactcacgagtatgtgggtcaatgagctgcaaaactcattatctacccgttccaaacaattttataatgtattcagtctatcccgaaatggacttgttcacctcgctggtcttatcagtttgtagttattactcatgtttcgccattatctatgtcatggcaagttcaagtaattctatcaattgtatttctcgaggcgagtcatctgaatgcatttattgatgcataatttgagttggctcatattttaactttgttacacgtgttagcttcatattaatgcggctcaaaatatgggtataacaatt

SEQ ID NO: 12480 - DNA, 1068 bp, Cannabis sativa
agatgaagctactagggacttggttttggaaactaaagttatccattttgacaaaaaaccagtggtgaccagaccctggacttctgacctcaattctcttaagcttattaaaacggtacttatttggattcgcctaaatggcttagggcttcaatactgaggtagaaatactctcagtgcccttgtgagcactatgggtaatccgattatgattgacaatgttacaagtgaatgaatgatgataaaatttgctcgagttcttgttgaagttcctatatctgataagcctccgatgagtattaatttcttcaatgagaggggacaactggtgggtcaaccaatcgaatatgaatggcttcctacttcttgtgttgcatatagtcttctggggcataatatcaattcttgtgcaaaagacaatggcctagtttggatgaagaaaataaagacagaccaaggaaagggaaaattgatgttagtaaactggataaagaggatgtaaagccaatttagtctaaacaagttaatgattcgatagaggagaataaggaaaagaggaggataatgatacagaagtggaaaagatgtctgggaatcatagttcatagaatggtggccaatggattactccccgaagaaatggtctcaagaatttgccagttcagaaaaacaatgtgggtaattctggagttggtttgaatgctttaataagtaatatttttgagattttgcaggagcctttggatgagattcgtaataaatctacttctctcccaaatggagtggtgtaatatcttgagttggaatgtgagaggcattaataaagttaataaacaaagattcattcaggatgtttgtcgtttgaataggataggctttgctgctttgttagaaacaaaggtttggggtgataaaataaagagtatgatgtgtagtaatttttctaattgggagtttcatactagtgtgtccattgaggggcacatttttttattttggcaaaagaagtttgtccatgtagaagtgattttgaagatgatcaattgattcattgcaaggtcaaagtca

SEQ ID NO: 12481 - DNA, 537 bp, Cannabis sativa
catctagaacactgttcacttcatcagataaggtctcgatgatttcttcaagtttctcagaagcctcaagatcctttgtcaactcagttattttcttctgggcggtaaagagcttcttgttgacttcacccagctccatccgaacagctccaagttccaccctagcgtcatcagcgtcctcttggccaagtccatctctgccctcatggtgttggacagagccccgttcttggaagcagtagatttggcccggtagtatgtgtaggccaacttcgaactggcatacacagaggaaaaactttagaatttgagcaaagtaaagaggattaaaggaaattatcaagaaagacttacccttgtgaattccttcaagactccacccatcagcaactccagagaagagtcattgttggcgccggctagttgctcactaacctcaggaaccaactggttcatatagtggccgagcatctccttgcctttcttggcctttaaaagcaccggcaaaggtggtgtaagggcctgcatctgctcagg

SEQ ID NO: 12482 - DNA, 597 bp, Cannabis sativa
tgtgttgtggaggtttcgagccgtggtgcaaggagagagcctcgaaggctcgcatgcgagcccatgtgggggcttgcatgcgattcgttgtgttgcttgtgtgtgtgtttgggggttgtaattgtaaggtgagaggtgaatgcgtatcgacaaaatggcattggaggatgaatcaaaggacaaggcgtgcaagacaaaagcgtgcaactacgccttctgaagactctgaaagtgaggaggtacaagtagcggtgacagtgaacctgcaaggtctaaggacctgaccaagggtatgctgcaaccaccctcctgcagcctgcgacctgcaacctgcagcctgcaacctatgaccaggttatcacactcctacaaccggacaccagacaagggtacaaggtgcatggccacctctagcacctaaagtatgcatcatgaaagcgatgttttgtccccttgggaccactttgtactccacgccattagagcctataaatactcattctcagatgtaagagagggttagaaaatcatacttgtaaaaccatattgagaacaacataaatttttctattattctctcaattttaagatagcaat

SEQ ID NO: 12483 - DNA, 547 bp, Cannabis sativa
gtctgcttaatctactgttgcaagtgatttcttcttagtttattcatcttggatcacttgtttttatagaaagcaagtatccttctagttatacatcactgattgactatagaatcgttttacaataaataacaagatttaataaagaacacttcaattcattctataaatttagcaaggtatgcgacctataaggtgcgagtggtctgatcatattcttgcacaagctcgtaggctttaggtgtgttctatattcataaaagggctaatgagcctaacactagcatgtctacattctatctgagttgcattgacagacatcttgtgtgtcgacgacatgagatatgcgagtccctctcgagtcatcgaacacgtttcaacatttggaccaatcatttcttaaagaggcgatctgtacttagtcgtaggagaaggctacttagtcatcgaatatatttttatatatgcatgacttgtataaatccctctcggtcctacttgtcttacattatgcgaagaatatcatgcgactagaccttgtcaaggt

SEQ ID NO: 12484 - DNA, 561 bp, Cannabis sativa
tgctggtgggaatcgatttgggtcgaagatggtgttgcgagggttgaacgctggttgttgggttcgatttgttggctacggaggtggtcgaagttgtgtttggttcgatcggagtcgtggtgcgaacttggtgagttcgactggaggcggctcgggttgagctgggttgctggtcgaatggaggttcggtttgggcaggtgatggcgtgggttcaggtggtcacgactgagtattggaaaggaaatgaagatgatgaagttggatgtaatgtagggttaagagcattgggctgacatgaagtgggctgggtgaatagtgcagaggggcccagttgaataaagtcaaaaacttaaagccccactaaatcatatatgtatactttatttggcatttttgagtacaagagtacatcaatctaaatgattggactgagtaaagagtgttgtgcccaatgattgcatcattaacataattttcacatgttcctcttgatcagaccaagtacccttttttttttcttttcaaaaccccagtcttttgatcaacccaaaaccaaactt

SEQ ID NO: 12485 - DNA, 500 bp, Cannabis sativa
cactctgcattgtcttgcaatagagagggatctacagtagtgagagaagttaaacataatataatagtactataaaatctcatctgaaaatcagtaaattaaacatatgcattgaagtaatgtacaatcaagatctcacaatagttcaaaactaattacagctgcaattaaactatatatgatagtaaattgggtaatttaaatctaggaatatcataccatcatctcagtgccatattatttggaagggtactaatccatggatgaaataaatcaataaatgaaagagaaaaaaaaaacaattggctctaaagaaatgatccattttggggaatagcctttgtagctgtcaaaacttctgcagcaataattaaccaaaacatgaacatgtcaaaatgctaggcaacaaagtagttaagaaatttcttgtcagatactatcagttttatatcaaccctaataaattatatacaatccaacataaaaataaaataatcaca

SEQ ID NO: 12486 - DNA, 535 bp, Cannabis sativa
agttggatgatgttgactatgtctgtcataatattgacttaactgaagtttcaaacatccatcgtgtgaatttggattctcaacggttagatgatttcattatcaatgacgatgataggagttcaaatgaccaagaaaaaaatgatgattacttggaattggaaagtgacagtgatgataatgttgtatatataattgatgatgatgaattgtaattgtaacaatattttattgcaataataatcacatatgttcttatttaatatgttgtgaatatagttgtttattttaaatctgaaaatatattttctatgtatagtatgtctacaccaggttgcagctcttcggaaaaaaaagggtaacaggtaaatacaaaggtaaaaatattaaggaagcgctttctaaagcaaatgattccaaactacacattttatttcatgaagacacgggcaccccatgtggtctaaatggaaaaaaaaaattcaacatgtgtaaaatgatgatctgtaataccatccccatgaataagttcaag

SEQ ID NO: 12487 - DNA, 740 bp, Cannabis sativa
ccaccacccaccaccattaccacccaccattaccgcaacaaccaccaccaccctacttttcaaatccaaatctcacagaaaaaataattaaaacaaaactcaaactaaatttaacaaagttaaatctaacaaacaaacaaacacttttatacacaaaaaatttagatctgagaactccactaccactgcaaagaccaaccccaacaatccacctacaagatcttcacacgaacccataaacacacgaactcgtccatccctgtcgaaccagaatattgtccccgtcaaacccacaaactcatccccatcctcgtcgtaccacgaactgaaaaactccatccctatccttgttaaccacgaacccataaaccccatcctcgtcaaccacgaagttgtccccatccttgttaaaccacgaaaccacagaccccatcctcatccctgtcaaccacgaacccataaacccgtccccatcccagtagagccacaaactccattctcatccccgtcaaccacgaacatagtcctccttaaaaaacttgcaaaaaaaaaaaaaaaatacagggagagagagagagagaaaacgagagggggcgagtttttgggggatctgagttttgggattcgtggatctcgatttcgtggtccaaacacatcaccaatgtgcatctccaccagcaccggcgatttctccgtgcatctccaccaaacatgcgacttctcgcctctaccaaaaaatg

SEQ ID NO: 12488 - DNA, 516 bp, Cannabis sativa
aattaatttggagataattttttgaccttaaatttggacatgaaataaatgattatttttatggcagttaaaaattttacatttttagatttaagaacttttatgtaattttattcaattttactaatttgatgattatttatgtactaaatttggtatctatgtattgtcttctgaactttaacatgttaaatttttttctgacaaaaatcttaaaattcaaccatttcaataatttatgagatatttttaagagtcttaaaatttcaaaaaatataatttagtatgttagaattaaggggtcaaaatattctaattatagtctttttttaaattaaaaaaaatatatataaaaaaattatagcaaatctcactgccaatcttctcatttaaaattattacactttttttttatatcttttttaacaatgataataaaattaaggttttgttcaaaaaagtcttgctactagcagcaaaggtagaaaaactcttcaaccaaccccacatcaatct

SEQ ID NO: 12489 - DNA, 1157 bp, Cannabis sativa
gtaaaataaatttccaacagtattgtcttgcgaataaggttcatgcaaattcacatcaggaacatgaagaattgaggggtgggggatttattacctggtttctgtgctaaaagagacttcgtaacatcaatctaagtagcaaaatcataccttatttctattagaatttattttaccaggatctagatttactaacatgtatatttgattataattctctaatctaacatcctaaatataaattttctaaaaaaataaaataaacacataaaagtgtagaaaactttacattaatggcagctgaataatatgattcattccattcagatctctaacccttaaacatttctactgcagagtatgatcataatctaaacctggattctccttcaattgacaatttgaactatacaatctttcacactatcttgtttattgccttgaaatgtgtgggcaattactcattcacttagggtttgaattaacaagaagaagaagaggaagaatttgaatatgataagtgctctgtatattttctatttgtctgacaaagagagtcaaataaagttatgaaaataagagtcaacatattctatttatatggtagcttttagggttaggttttgaattaaaatagaataaaaaagataaaaatgactttatttaaaccatcttggctgaacccaatatgggtctagtagattttaattttgccatttcactgaaacttatttttcttttcacaaatatcatcttttaattataactctataaatgtcaattttatctgtttaataattataattaattgtcaaataaaattgtcatttaatttatttattaaatagacctttcaaagtctcttaaaaaataaacaaaccctaaattctctttttcttctaaaaaaaaacccttgcttagtgaaactcataaataagacatagtcttattcagaattcgaattgattaattgagtctacaagataatattatctcaagtagtgtgggaaccatgggcctatataatcaagctcccaataagtagttatagaatttaccgagtaaattctctatcttattaattcctcctaactccactatagattcagaatcgtactcctgattacataaacactctattcacctagaatagatat

SEQ ID NO: 12490 - DNA, 604 bp, Cannabis sativa
cattagatgcgtagcaggattcattggagtacaagaaggtgttgctcctaattttttgtctcagttaacgaatcaagtacatatttactttgaggtaaataaatatcttgtctactccgagtgacttcaactcctaagaaatactcgagcacccctaaatctttcgtgtgaaaatgggtatcatctatagtaataacaatatcatccacatacacaaccaacaaaatactaccaatagttgatcttttataaaacacagaatgatctgacttacttttcaacaaacaaaatttctcaatagcctgaataaatttaccaaacaaagcacgaggactttatttcaaaccatataaagacttgcgaagacgagaaactcgttctaactccccctgagcaacaaacccaggaggtttctccatatacacttcttcctcaagatctccatgaagaaaaacatttttaatatcaaattaatgcaaaggccaatgatgagtagctgccatataaatgaacagtcgaacaaatgtcagtttagcaaaatgaaaaaaagtatcacaatagttcactcaataagtttgagcataattgtaacaccctaactaac

SEQ ID NO: 12491 - DNA, 550 bp, Cannabis sativa
tgctacattttatggtgacgaaacagctagagaaactatgggtacgtataaatatataggataattaggattttttccacttaaattttaacatgtaccaaatcatgctcaatgaacttttttggccggtaaaaattttcctgagctattgagattgttagatttaaggatttttgtctaatttcattcagttttattatttcaattattgtttatatattaaaccatctccagactttgatatctaccaaattatgtctctcgaactttgacatatactaaatcatgctccttgaactttcatctatgttagaattttttaactaaaattagacaaaaatccttaaattcatcagtctcaatatagttcaacgagtattttttaacgatcttaaaaattcaaggggcatgatttggtatatgtcaaactaggggaaaaaatactaactaaccaaatatatatatttatagattttacgacttaattatatttttctaagtttgaataatattggcttgtgtctaataattgttatgtatgtatacacag

SEQ ID NO: 12492 - DNA, 996 bp, Cannabis sativa
taagttacctgacaaagctccatcacgttccttctatagactatttggatgaaggttagatcaaatggggtaggaaaaatcaagcctaaggtcgtaatcactattgggcattaggactttaatttttgccattttcttttattaaataaaacaatcttattttttttttcaaaatttataatttaaaattaattttatctatttaataattataaataattattaaaaaaatctcaatttaaatatatttattaattagactctcaaagtgttttaattaaaaaatacttatttctcctttcttcttaaaattgctcaaacttagtgaaaattcttaaataagatatagtctaattttaaaattctaattgacttataaaattaataaattgagtctacaaggtagcattggggatcatggacctatgtaattaagctcccaataagtagatctaaaatttattaagtaaatttcttaacttattaatttcacctgactttactataggtttagaattacactcttgttgacatagaacactctatataccaaatatagatacaatatgaattatccattatttcaatctaaataataaataatcttctatagaaaaaaaaaaaaatattgagtagggacaaatttactattttaccctatgatatattttatctttaaaacacttagcttcttataaataatatttcattaaactaatataattaccgaaataagagctcttccatttatattgtttagccaagctataagaaaatcatcgttttacttcaatatatagattttatatctatgattaacacttctactaaactgtactgctgagttcccaacatgtaagtgtgggctagtcctacgggtaagatggtaacaaacaagtctaagaacccgtacaacataataatctaaaggttaagcatcttaagattgagattaattgacctaagataaactgagtgacattaacttagaaaata

SEQ ID NO: 12493 - DNA, 869 bp, Cannabis sativa
aattctcaaatgcaatccatgcatcgaatcaatcatggtcgtggccaaatctctcacggtggtcgaggaaactcctcttttggccgtggtgcatctcaatcgtggacacaaaaacctcagtgtcaattatgtcacaaattgggacacacggtcaagcaatgtttctatagattcgacaaatcattcacaggtccggagtgttttggtcaattcccagctactgctaaattgttgaaagtcaagcatacattgccacacctgaaactgtccaagatgacagttggtatcctgactctggggcatctcaccatctcacaccagatgctgcaaatattgcttccagcagccactacaatggtcaagaacaagttcttgtgggcaatgggactggtttaggcattgaaaatattggtaactctatccttatatctcctttaacatctaaggctttatctttaactaatcttcttcatgttccttcaattacaaaaaatcttctaagtgtttctcaatttgctaaggacaattcggttttctttgaatttcacccctttatttgctatgtcaaagaacaggtttccaagaagatcttattggttgggaagcttgagaatggattatacaaattctcctccacacaactatcacatctacctattagtatcaatcctacttaagaaccttctcctctttactgccttacaaatcatgtgtctagtgttaattctcaatttgctttatggcacagtaggcttggccaccctactgctagagttgtaaaacaggctttacaatcttgtaatatcactatggataataaaaatactgctgatttttgtaatgcatgttgtcttggtaaacaccacaaa

SEQ ID NO: 12494 - DNA, 591 bp, Cannabis sativa
agggaaggctgagaaagaaagaagatgggctttgatggcccaatggcattttggtcattttgttttgggcctaattcctgtacccaacaaaagtgataatttaaaaaaaaaatacaaaaacaataaaaaaaaaatacaaaaatacgtctacatggaatttttaatattttttatggtttttttagattttatttacataaaatactgtcttttagtatttttatgttatattcttgttattttattgttgttttttttgttatttttatattattattttatgttgctatgttgttgctttgatgttactttcacgtgaatttcttgttattttcttgtgtttttataaaagtgttaaaaaaaaaaacttttaaggtaaaatgtaatttttttacaaaaattggtgtttcatataattattcccaaaaaagtaacaaattattaaggtaacaatatttgttttaaaaaaaaagttccgtaaaattatttttaccttttaattttaaaattaagaattaaaattttgaaaaaaaaaattactttcataaatattttaattttaaacacattatttttagctacaatctattt

SEQ ID NO: 12495 - DNA, 682 bp, Cannabis sativa
aaaaaaaaaaaaaaacaattctccgtaactcaccactgctatcggaaagcccgtactccattgcaaaccctcgaaaattcacagcaaacccacgttcagaaaatcaaaaattgggcgaatttctccaccagctagaacgagccaagaaacctggtgaaaaccacccaaatttgctaaagctaaaaccagaagctccgaggatttgaattcgaaccctagagagcgcagagaagacgatctggattgtcgaatcaagcagaacaaaagaaaaagcgaatgatttcgtggaaattgaggatttgaatttgggaataaagggtaaattagggttaaagttggaatctttgaaattgtaaattaggtataaggaaaattagggatttgggggtggtggagaatggagattgatggaggagagggagtctggtgtggtctggtctggtggggtttcgggagggaagacggacttcaaataagttttatgccgctcttttttttcagttcataatctatttcagttccgtcacggcacaccgtttcgtttcgacaacgcgtttcttttggtacttgttgcatatgacgtttcttttgtggatgtattggaatttggataaatattattttggatattatattttgcaaaacgttattaattgaattctcttttttgttaaattataaa

SEQ ID NO: 12496 - DNA, 556 bp, Cannabis sativa
gggtatttgttatgcatcaaagtttcctgttaaaatatgatacataaatatatatagatgtattttttatggatattcctcataaataggtaaatgggcctgtaaaaataaagaaaagatattgtacacttgatattggtggacttttttacagctaattttttctttttacaaaataaaactgctttaacgcatggtgttggattaattttatgagcttttaaaaaatttatgaattatttataagttttcaaaaattatatatatataatatttcaataacaataatatacacatggaaaactcagattataattattaaagatctgaaaacacaaaaatataccaatattaaatgttgaattacatattttaaattaaaaatacaatttttttaaaaaataataacatttttacccataaatttatgacactattaaatgatgtctcctatggtatacgacctgttaaaaatcttcctgtacagttgtagaattgtgccccttttgttactttttattaaaagattttacaaaatactagattttagggacag

SEQ ID NO: 12497 - DNA, 577 bp, Cannabis sativa
agttagttagggtgttacacacttaatacgctagcatactagtgtttgaagcattggttcatactttctgaattaccaaacacatatattcacaatatcaagatgcaatcatatatacaccaactatagttctaactgatatgtcatacatctagaaaacataaacataaacatgtacatatgtatgtgtgttatactattcttacctaaattttgatttcaagtgtactagtcaacttgagtggaaatagctacggtaatcggaggccctaagtcacaattctagaaaaaccaataagtgttgccctagtacttttggagacttaaatttaaaactaaaatttttcctatagatagatatcatggaaatactctatgtattaataaaacactcaatattggtcccgagaaaagtcttaaaacagatggtttagaaacggacccccaaattctgcctaaatcgaacgatccgaactccattgcctaattttaaaactggcataactcattcaattctaagccaaaccttatcaaatttttcagggtacaaaataatatcataatgaacattaatgat

SEQ ID NO: 12498 - DNA, 741 bp, Cannabis sativa
aaaaccatcaagcacatttaaggggggattatcacccagtatatagcatacaagagatgagttccagaaatttacctcctcatgaatatcatctagagtaattttcacctgactgctagtgttggtatgctcaaaggttgttgagaggtttcttacgacgttcccagatcgcagaactgggggagttacatgaactcctcttgtcatctcttcagaacacctacgattagcctccatgaagaaattgaagtcccgcacaacctcttcgttttgcagaattgttttcagagaggttcagggcgatagagcctcttgaatacaaccctgcaaagtcgatttggcttgttgagattccaaagtacaattttcttcctcatccgagaaatcaattggttcaattcccaaaacctcatccattgactttgttttccttacatcaatggacgacgaagggccttttttcttctttttcgcattcaatttcaccgtcgatggaatcttcccctgcatcttagaccttgttttagccatggcaccagctcagagagagctgcaagaaccgagagagtagaggattccttatccttttttttgcgttagaagagcttaggcatgatgcatatgactattcgaaaagtatgaggaccgaatgaagtttaccatgacaaaaatattttgaaaaaagatttttctccaagtcaaaaagtcttttcataaaattctcgtttgcatctttttccg

SEQ ID NO: 12499 - DNA, 543 bp, Cannabis sativa
aatgagatatgatatatcaaaatcgtatctagcttactcacacaattagatttatagtttaaatataaatttaaattatatataaaaaaaagatttattataataaataattattattccctaaattttacgaataattaattaaaatatcagtcaaataatctctttattttttaaataataataaaaagatttcaaaacttaaatttagcacaaattggtcaccaaaagtaataaaattctaaagccatataaaatggtacaaaattctaaatgagctcatcaaaattaatcttagaatattaacgaggtcattcatctcacaaaatttgagaggtcattaatctcacaaaaatctcaaaaatggtaattttacctaaaaaattaaatagtacactaaaatttaaagccataacaaattaaatggcattccaaaaatgagagttcattcccctcataaaaaattaaaattcgaaactacgtttgacttgattcctataaaatgatatgtaggcaacttagttgtcaagactaagtgcagta

SEQ ID NO: 12500 - DNA, 594 bp, Cannabis sativa
acattcgatccgttagaaaagtcatgattccgtaattgtagatcatgttcccagccatccatattattagattcctaaaataaaaattgtaagaatcatattctctgaaattttaacgagtgaatcaaagaaactaataacataaacaagagtttacgattactcaagatttatgtcgatctactattgatcatctttatcatatatatatatatgaattatatctttataataaacaacatgtgtaataaaaacaacttaattacatatcgatttattgtcatatataatctctattatgtacaaccttgacctagatgtcattttatacatcaacaaattgaattgagattgtttgtaccacataacgggcatcagtgaaccacattaacaaccattgattaaaaaaatttataactttaatatattattgactgctttattcatagttaattaattttaattctctttacaatacaagtcacaacaatatgtatatatatgaataaaaaaatttatgatatttatatataaattatttaatattaaatattaatatatttttttgaagatattaaatattaataatttaac

SEQ ID NO: 12501 - DNA, 563 bp, Cannabis sativa
ctaaacattcctttgtccttactccttatatcgacttacaagtattcttaaacttcactgattgcaggtggcaacgaaacattatacaaacattcatgtactggcaggttagatccaattccttgatcacctgttgagacacggaaagaaaccgtgttatcatgtctgttttggccttttatatttataaatgcagcatggtttgttttcccgtagttgaatctagaaaaacgatcctcattcgggttactttgttgttgcagcttctgaaactgatgtaccaggcccctgtgactgctgggtaccatcaaagtgtatggaataagattggattgactgttaatccactgatccagcggtatgccccattcctaaattctccactttccgctgctcagaggtggtggttcaggtagacaagacactctttgagattaagaagagacggatatctctgaggatttctttggattagttttactatataagcaaaaattacattttcagatatatatatgaatgaccaaatgaccatttttgtttagatatggttacagtttttt

SEQ ID NO: 12502 - DNA, 624 bp, Cannabis sativa
tgatcggatcaaattggaaaatatacatttgaatcagatgagatggtaaatgtggtgtccaaaaatctaatacattcaacatttaatcgaactaattaatatttttttttagtttggatgattaattagattttatattattatacgtaaaatctatatgtatatatgaaaattaacattaaaattttactcttcttaggttggatagatctagtatgaaatattagataatttcaaattaaatcaataaatatatatgaaatatatctaatgaatacaaccgatttaatctaacattcataatgttaaatcgattggataactgaaattaattgaattagacatgatagtaaaatctaacatctattatataattagaataaatctgaatatgcagttcaatcaacaatttttagataaaaaattatatttatttataatttaaagtgaattactttaaataatttctttagttaattaatttaataaaataaaatatctaatcaataattttaataaaacgcatcattcgaacttataatttaaagtgaatgaatgacattgaagtacattgtaaattgataacatatcaattaccttagattaggatcgaataatctcata

SEQ ID NO: 12503 - DNA, 540 bp, Cannabis sativa
acggtattcattgtcttacaaaaagggaaaaacaaaagagaggtgggtgtttccttgtgtgatttgaaagaatagatgttgatgaataaaatatcagcatatggagttttatgattttaagaattatttaaaatttgagattttatcacctgggatattctttttctttcattttgcttattgcaattttgttttgggtgtttcaggaactttcagaaaatttaaggaaaagatggtatcgcaaaacccatcagcatttgaggcaaaagtaagcctttgatgtattgtgttttctgttagcaagctgttctttttattttcgataaatcggatttgtgtaatgctcattaaaaccaattttacaaactaccagcactttttataaaaattaagcctgacaaatgacaattattacagccttcttaaccaaatcaaatcctcttgtttaatattcttaggcataatatgatcaattatatatttaacttctcttttcacactctatacaattgaatttttcattgccactttttgattcca

SEQ ID NO: 12504 - DNA, 550 bp, Cannabis sativa
tattccctatttcatattattgcacacaaatcattgttatatttttgagagtattaatataattttttctctttaaagggattttattatgagttgcttttatgaaattgagctttatattctataacttgtatgcgaatgccgaattatatttatatgtttatcatacttttatgtgtttttatttttagtattgatacaaaatctatggtatattaatctcttcaaagagataatactgcataaatacttatattttaaaattaatgtttatgaatgattattcattcttaagcaattattaagattttatttattaaaagatcttgtgatctgatagggatggaagaagttatggatatatacaattaaaagatcttttacaataatttctagattatatccaaaacaacacagaatctttgtagcacataggggtggaagaagttattaatatatgtagttcaaacaacttttatattgaactctagattatatttaaaacaccacgaaatctctatgacaaacatattttaattagacatagata

SEQ ID NO: 12505 - DNA, 569 bp, Cannabis sativa
ggcaaaagataaagaaaagagaaactcaaaatattcaatccttcttaaaatagagggactaaaaaaaagacaaaaaaatatatatatacaatatcatatttgtctttaaaaaataataaataattatattaggaaggataatattgtaattttagtagttaatttatattattgaaaaatgtatttctaataccaaataatataaagagagctacttttctttccatccttcgaagtagactgacccaagtattggaaagtttgtgccattacacaatacccctattttctaaggccctattttttttttttgaaagaaaatgcctatttttttcattatacataaataaataaaaaaactataattaaaagtttaggaataaatcttaaacaaaaagaagttggtaataaaattgtagtcttaatatataccatttattattattattattacaaatatttgagtccactctatagcatattctctatccttcctatcatttctttccatcctacctacccaaacataaagagttatgctaagtcactcatagtgtaaaagcaccttt

SEQ ID NO: 12506 - DNA, 558 bp, Cannabis sativa
agactttgatcttaaacttcactgtactgtcttttaaaataaaaaaacgacttgtcgattttgacagtgaacattgagcttagtagtacggtaggttttgattcatgtgttcatattgaagttaccggcaatctcttattataatttttgtgcccgaaaatatattggaatatttctttttaaattttttttcatagtggtgctcgttatactcacaacatcctaataaaattttcaaatatttcaaatattaagaattatgtttctgatactgtaaactattccaatttttttaaaatttataaagatgaactgtaattataacaaataccgctatgaaaaaaatattcaggcatgtaatttcgaacatggaggttgactaagaaattataataggaagttataattaacactcttaaatttcactgtattgacggtccataattgtgtatttatttttctataaatcccaaattatctcacatttcgaaaatatttctccaaattctctctgtttttctctctttccctttctctggttcttaccaaactctgtca

SEQ ID NO: 12507 - DNA, 628 bp, Cannabis sativa
ttattcataaaattatgtttcttccgttatctaaactactttctcttattattataaaatctactttcttattaaaatttattgttgaaatagttgctgcagaaaataaaaaggaacaaatttattgaaataaaaactgggttgagtcgcagactaggtagctctctttaatacgtttgcggcactgtctaaaattgtccaagcagactatcaacctcgttgtccttaggataaaacaactcaatcaaactattgtattggagctctattgtacgaaaagaaccgtcgaaataccacacccaacaaaagttactgctcagaatatttattgtaatacaatcatatataactgtatataatattttttttttctttttctatggttttgatgcattatatagagaatgcacaaaaggttgtaacgggaagaaaggcgtttctgattaacgtgagattgtgagaacgatactgaaaattaggacggaaaaacttctttgtttactaattaattaaacatgtttaaaaaatattttaattattaaatataaataataatttaataaacaaattttctaatcgtataaaactgtatataattttttcgatgagaaaaatatttatttctctc

SEQ ID NO: 12508 - DNA, 981 bp, Cannabis sativa
ttctcactttacttgtgaaaaatccaaaaattacttgtgacatcttagttgttcccgttactattgttgcttctgaggtggttttctccactggatggtatattttagatccttttaagagctcattgatttcgacaattgtggaggctttgttatgtttgaaaaattagtggaaccaatcacattaacctatagttgttcatgaatataaagattaaaaaggagatctatcaacaatagaagaccttgtattagtatgcttatactctataattttatattttatattttatatagattataattatttaattaggtcctattaatatttatgctaatagctttgttattaaaaatagatgatactactctctctaccacgggtaccgccaccactacctcaggcacttctaatttattagtgcaatcaactttagttagaggattttaatagtaagaaataagtattaatatatttacttaaacctttaattctttaattattgattaaaaaaaaatgtgaaactttgaaatacagatgtcatgacaaaaagagatgagccaaaacctaagcctaaaggaaagtttgaagtttagaaagccaagccattataaatatttattttataaatataagcatttataagtatggacattaaatttataagtacttttttgtttggagattatagttatgggtatatagtaatattatcgactatggactttagtttttactttggacattatggttatggacatgaaatttgatgaatgacttgtttggttttagaatgacttttatattttagatctaaaactaatatttttttaattattttaatttaaagaataacatgttatatgtttaatttaatataaagaaataatcttatagaatttggagttttttttttaaaaaaaaaaaaaaagagttgactgttcaacttgtgaccagcgaacccagccaacccgcccatt

SEQ ID NO: 12509 - DNA, 585 bp, Cannabis sativa
ctattgccactgatttatcccctgctgttactatatcaccgacctcagttcttgctgaagttacaactcaacgcaacatggtcattggaatgcaacatattggtactggtagtggtctaggaaggtctgtcccaacggcactaacttctacaccagcgaatactctcacaccagcaactgtttctactgctactaataacacaaatttcccactgtctactgctgaaaacctttccataccacggccatcacaaagtgaattggttactgacttatctggggtgtttacaccttttgctgtcataaataaagcaccaaatacttatgctacatatccaccacaaggccctacgtttccagcagcaagctcattccaaattcacactccattaccatcctcacatagtcacataccaatgcctattgtcacaccatatgcaaatcagcaaactgggaaagaaaacttatcaccaaatcgcttcagcaaaaggctttcggatggaccaaacttaaggcaaacactcaaaagatgtagaggttctccctcagcagtgttcgttccacctttgtctggtgaaattgaac

SEQ ID NO: 12510 - DNA, 588 bp, Cannabis sativa
ataaaatactctttaattagggtatagaaacaaaagtgatttgtcaatttttttttttgtatatatataataattatcacaatctcttttaatgattacattaaaaatgtaattatgatggttatatttttttttaataacttgctataacaagttaataacaagtaaaaattctttttttttttcaaaagaaatttaaattaattataattaattacatacttaaaataaattaatttttaaattaaaatattcaataagatatttttcacaactaataattaaaaaatattttttattttttatatatttattaatgatttttatttaatttttaaattaatcataaacgtttaaccatgatccaacaactaaaataaatgtaactaatgtggttacatatttgatataaccattaaaattcatattagtgcgtgttttagtttattatatatatgaataattagttaacaattttataaaccgatcatatttatggtagttattaaacattacaaaaaaatcttatttttaatcacaataaaaattatgactaaaaatgataaagttgtgactaattataattta

SEQ ID NO: 12511 - DNA, 589 bp, Cannabis sativa
gaaaactgattaaaaaagtgttaccaaacggtaccataatttctgactatttatatcttcaacctaaataatatgagaatagacatgtttgtttttttaaacgaaaatataagttaaccacattttttcagataaaaagtacagcagagagctataaaatgggctaaggactaaaaatattattaatagaggcataagcaaaaataaaatttgatacaagaaggatattttaactatctttgaatatattgaactttgtatgaaattttttatatatataaaaaaaaaaatgcctcgactacaatttcactatgaaatttataataaattacacacaaacttaacatattatttggcaagtaatttactattcgaaatttttaaaaatttacagggataatactataattataacgaatatcgttatgaaaaaaaatttaaaagaaaatatttcggcatgtgattttaaacgtagaggttaactaagagattataataggagattgtaattagtatttctatgttgtataattatttggtataaaagaaattgaccatcttcaacaattttggaggcaattaattctat

SEQ ID NO: 12512 - DNA, 656 bp, Cannabis sativa
gtgaataagtctgtaagattatcggttgttcgaatttgttgaacatcgatatcactattctcttgaagattgtgtgtaaagacagaatttggtgaaatatgtttagttctatctcctttaatgtaacatcttttaagttgaacgatgcaaacatcattatcttcatagagaattgttggtatttctttattggatgttatccacgtgttcctcgaatatgttgtgtcagtaatcttaaccatacacattctcgacttgccacatgatgaattgcaagtatctcaacatgatttgaggaagtaggcaccagagtttgctttgttgactgctaggatatagcaacaccactacaagtgatcaaatagcaactttgagatatggctttatgtggattagataaatatcatgcgtctacgtagccaataaattgtgaaccatagttattagaatagaacaatcctttatcaatagtaccctggagatactgaagtatgtgcttaattccttttcaatgtctatatgttggagcagaactaaatcttgctaacaaaattgatagagaaagctatatcaggtcttgtacaatgagtaagatacatcaatgctcttattgcgctaagatatagtatttttggactaaggagctcttcatgttc

SEQ ID NO: 12513 - DNA, 652 bp, Cannabis sativa
catttactttcatgaatctctcttcttattattttttgtgtgatctattccttgcaccatcaacagtaagagttagctcaatcacttgagcataaaacgagacaactcctagttgcttagccattatatttgcattctgagcgacatacttgttccacctaaaaatcttcctagcgttcttagcagccgcttcatctaaaaaaatttgacaaccggtccaacttagtgtcattctccatcaccgcgctgcccggatcaattgtataagttttactaccttgtcactcaaataattccttactttacaacatacatttgctcccagtcttgtggtagtggaagattcatacccacactaccaacttcgagcctgataagctcacaattattcttgctaaattgccccagattcattttccagtacactcgagatcatttctttccatcattaaaatctttcaaaccagaattaatgctaataagcattaccacatatgcataaacatacttaacaatttttataaacacttatcatgcttttctaatagcttacacattttagacaagcaaataatgcaaacaatcaataaataaactacaaatcaactaacaagaagcacttactaagccatgagttgaacgagtcttcgca

SEQ ID NO: 12514 - DNA, 727 bp, Cannabis sativa
tttttatggtgcacctcacactcagaataaactgcacacctggcaattaatagatcgacttggctctactgctcggctccagccgtggctcattatgggcgatttcaatgattatctgtctctttctgacaaaatcggcggtaatatgtctcgtgctccatcagcgcaatttcaatcctttatcgacaatcatgaacttcaccctctcaccccgctaggtaatctcttcacttggactaatcgccaaaagcaaccaaatcatactcaggaacggttggactggtgcctatctaataatgcttgggatgccatctttcctgattcccaactaaatcatggcgatttttttggttccgaccatcggcctctcattctcaccttgcaatatatgaacggtcatcgtaaccaaaaaccccgcttcatttttgacaagctttggatgtccgaaccgggatttgaggattgcctacgcgatgcttggacccagactaacccgaatcctcaccccaatcctttaattggccttaaggaaagactcacaacctgctcctctcgcctcacgctttggaagcaatccttaggacccccgatagctacccaaattcgtaatgttcaatctcagctcaaaattattaactctttgcctcaacctacgaatgatcaattagattagggtaggaagcttgaagaagagttgggtggtttactgcaaagagaggaaatttat

SEQ ID NO: 12515 - DNA, 507 bp, Cannabis sativa
ccaagcttcaacatcaacattcacaagcaacaagccagcaccatcacttgtttcgttcaccactgccgagccaatttctggcttgtgagttatattgaaaatctatttggtttaaatgcatattgggtgatcattgttggtttgtgctatctgaatattttttgtggtggattagtgttggatttgtctcaatctgtgagttgcacgggtgtaaattttgaatggttttgggaagaatattgtggcttaatattattgagcagaaaacaaagatgccgagaaccaagcaaatggcttacaagaagctgctggagctagatgaaaacaaacacttttcgactcctgaagccgaaaccaagtacaaccaatttattcagaacaaagagttctacattgaacgtgggctaacaactaaaatcaacaagtttgggcactttcctggttggctagcggagaccatcaaagcgagaaagtgggagctttttgtatggactccagagctagccc

SEQ ID NO: 12516 - DNA, 670 bp, Cannabis sativa
ggagctcattaaactcacttgaatgtgttagatatatgatataaatactcaaccaacttctatttttgagtaaaaatcgagtttatatagtgttggagtgaaatatagtcgtttatagctgttagcacaattttcaaaaagaatcataagaaaaatgacctgtcgttttctaaatggcttgctgttttctaaacggcctgtcattttgtaaatggcctactatttttgggaaaaattgcctaccttttagaaaacggaaggtcgaaaacagggcaatggcaaatcttatttttttggctctaaaacgtgcataactctttactcgattatctaattttagaaattctaatttttttctcttagttaaatgaaatgtgatttaaaaagtgaattaaatttttttttgaatcattaagtgagaaaacttgtcgcacaagttagggggccaaaatgtgtacttaaaaacttttttaagtgtggacttaaaaatcactatacaagactaaaaaatgcaaataaaccttcatggagtcttgtcttgatttccttgagtcttggaatccacttcgggtaacttttgagaattttggtaaaattactattttgctcttggagttaattttgccttagaaaaattttttttacctataattgtgctacaaaatcaaca

SEQ ID NO: 12517 - DNA, 654 bp, Cannabis sativa
tgcggcattgagcttgaaataatagatcatttattttttgaaatgctatttcagtaacaggtgtttgcaagagatcaaagaatggttgaattggcaaatatctgaccgtcctctagcagtcataatcaggtggacttctcgggttaaaacattcaagttcagaaggaaagtttatacagcagtggtggctgctttgatttatcaaatctggagcaaccgaaatgattgtttgtgttcaccaagtgaaagagaatgtgaagcataaaatcaatagcttattagatacaaaaaataccatagaagaaagagattggttcaattgtttatacatgtgactagagtattattcaggcctttatatggtgctgtttaaattgtaaaaagtctagttttatgcaatacaaagtatctgattccaaaaaaaaaaaatacatatatatttttattatgatttttagtatgtacataatatatttataaaactaattgttttttttttggctaaaaaagttaattttttctttttctttaaatattgtaaatgtaaatttaatttttaaaagataaataaagtatttctaaaaaaaaaaattattaataaccgcgtataacgcagtttctacctgtttaaatatacaaatatataaacttaat

SEQ ID NO: 12518 - DNA, 557 bp, Cannabis sativa
ctccaaatgcacagaattttcagtggaaaagaaaaataaaattgagaatgtaaaaacttccatgctcactaagctcataacctgtgcctgcctagtaaaatgttatgatcaggtgagaccgagcagccatgctcggagcgccgatgacaagaaaagactgaagcaatggagaggagagtaatgacagtctgtcagaggtcgcgcgggagtaccactataaaagaagaagatgggctctgcctctgatgtcagacatgtacccgaaagcccataatcccgcaatggccccatttacattgggctttcttgtctaactggaaaactttccactgggctcataatcccaatatttagtgatttttttttgtttttttgaaaacttatagaaatactgtaaaattgaaaaagttatacaaaaatattgggacagaatttttttatatttttttctgtactaactttacaaatatactgtgtttaaagtttcaaaattataaaaatattgtgtttctaaaaaaaataaacaattcaaaaataaattttgaatagcttaacaa

SEQ ID NO: 12519 - DNA, 867 bp, Cannabis sativa
agtcgccaagaaacgcgttttctcaacacccccactccaccaaaatctacgaaccagggaatccaactggttactaagggtagtcgggatcttaaacgtggacatttaaaccccaatccacctctctgttttggctggcaatgattctcccaattcttagttgctaagaaacgcattgtcttgacacccctagtccaccaaaatctacgaaccagggaatccaactggttacaaagggtagttgggatcttaaacatggacatggattaaagtgggttagcaagagccaccaaattaatagacgcaagtctcccaacatatgacaaagtcttcatctccacccttccaatcttttcttaagtttgtcctttatgaaattaaaatcttgtattttattcttgaaaacacaaaaggattacccaagtactgcccaacctgaacagttgttttattttccagtaggccttcaatcttgagccttttctgtttcgagcaattcttagaaaaaagaaaacctgacttatgcttactacacaattagcccgaccactcttcatactttttgaagcactccccaatagcactagcattttgttgagtagcttgagcaaacaagattgtgtcatccgcgaacgtaagatgagatattaggattgcatttctagtaactttaattccatgaatcttaccctcatcttgtgcctttgaattagtcgagacaaaacattattacacaagaggaataagctttatgcatattaatttttacagccatcaaagattatagccaaaagtttaaagcaaagattttattcatgaatagcgtttcccttacatcaatatcagtgtgatcgtatacaaaagaaa

SEQ ID NO: 12520 - DNA, 625 bp, Cannabis sativa
aaaaaatattatagtgtaagtttgtgtatataaaaaatagtatatattgaccaagctgtgaccgggtattaatttttatttcttttttaaaaaaatgattaaagcatatagttcaaaaagctaaaatagagagacgagtttatatatataaatatatatatatatatattatttttgtacaaaaaattaattttatattacaccctgaaataaagattattctggtgtatattttttatgcttttagttatttttttgttatgatattgtgtatgttatacttatttaggaccattagtaataataaattttcaaaaaaaatttaaatggtttataaatattattttgcgtagcaaataattgaactttatttttattctgataatgtaaaaattattcagaattttctaaaattttacaaataatcttaaatatgtataacacgaaaaataaatgaattaaaaactttccaaaatactaaaacaaacactaatagctctttttgggatgtattatagattttttcaaaaattatatctatgtataaatagtggttattgcttttttttttttctttaaaaggaatagttatttcttctttaaaaaaatattaatttactatatg

SEQ ID NO: 12521 - DNA, 523 bp, Cannabis sativa
gcctcgcactcctcatctacaagcggtgcaccacttgatctgataccttaaaggtagtccaggccagggtcttctttacacagcttcttcaaccttgcaccttagaggattttcagattctgattgggcctcttgccccactactcgaagatcaaccatgggattttgcgttttcttaggggattgtctcatatcatggcgcaccaagaagcagcccactatctccaaaagttcagctgaagctgaataccgagcacttgctgccactagtagcgaattgacatggcttcaatatctccttcaagattttcaaattccccaacatggtccagccttcatatactgtgataatcgctcagccattcacattgccaacaatcctactttccatgaacgcaccaagcacatagaacttgattgtcacttcattcgtgacaaaataaagaactccaccattcggctcattcccgtaaacagctctcttcaacttgctgatgcctttacaaaaccgctgccttctact

SEQ ID NO: 12522 - DNA, 587 bp, Cannabis sativa
tttattatgttttggtaaattatttcatcccattgatatttctgtctctatctttattattatagatctccttttcttaccttacacggtcttaggtgtaatttcaagatatataaaagtataaagtagggttctaaaatttgtacattagtgataattacaatcttctattataattttttattagttaatttttacgctcaaaatcacatgttgaaaatttcaaacctattttcggtattgtaaactattcgaaaattttcaaaaatttacaagaatactataacgaacaccgtcatgaagaaaattttaaaaaaaatatattctaacatgtgtttttgagtacgaaaattgatagtagcactcctcaaattcttattagctatgaattgtaatggtattatttttttcttttttcaaaaaaaaaaaaaaattagattacatccattcaaatacccaaagatcatacatcatcatccatctagtattttagagctaaaacatgagaaaatagttaaactaacaccgtacaatcaaaaatagaagacacgaaaactaaacattagagtagtctacatgacctatcc

SEQ ID NO: 12523 - DNA, 545 bp, Cannabis sativa
  modified_base (362)..(365): a, c, t, g, unknown or other
gtggtccatagttgcttcccacgtatttatacctagcaaaaaaaaaaaaaatcaaatatttatgattaatttttagaataatatgcagggtaaatactcaagtttaattcacgattacagataaatatataagtttaatttttaacggtaataatacctaagttatatttctagaactttcatatatacctaaccgtcaagtgtcaacttaataatcacatgggagctcctgattgattacgtcattaaattttttattttttattaaaaattaatttaaatatattaataaaaaaaacgacacgtagataacttgacatttaacggacaaacacttataaaagttctaaaattataacttnnnnattattactgtcaaaaattaaatttaaatatttatttataatcaaaaattaagtttatgtatttatgcatcaaattattttaatttctatattttaatttttgagtgtagtatcactttttcttcattggttattttttaattttagtgcctagacaaattatattccaacatttctata

SEQ ID NO: 12524 - DNA, 678 bp, Cannabis sativa
gtaggaatcataaggacactagaattgataggtgaccctaagaacgaactaggccctatggtagaattcagcaaaccagtaaacgtatacgattgggccaagaacggatttagcatcctttgattaggagggatagattgcggtggcaattcagagatggataatgcaggaggatgaggatagtcaaaagggccagacttatccatagatttttctttccccctaagaaggatggtataggggctaggtgggggaacaggattttcatcacatttttgtaaataagcttgacaaaaccgtctggtatgatcaagcttaccatagtaaaagcagaaatcagggagtcgttcatatttaaaatccaaccatttggtaaattctctacccatcttaaggaaacgaatgttaatacccctcctaattggtttattaacatccaaaagaaatctaccccttagataaggcccagtgccttccttaatagtatcttcatcgtattggataaggtctcccaaacctgaagctataagcttggcaagatcataagacttgcagcgaaatgggatgccatacacttgaacccagaaaagggatataatgcagaaggtcagaagtaataggaaaagagtgatctggagatgcaaaaatagtcaggctttgagcaaaatgccaaggctg

SEQ ID NO: 12525 - DNA, 1014 bp, Cannabis sativa
aaagtgacgaagaatacaaatcgttcatcattatacaaaatggataaaactcatatcgttatcattcatcaaccattagtaaatgaataaaatttatatctcaacttgcgtgatttttgactttgtacaaaatgatgggattacatctctatttatagtactctatggactaatctaaaaacattattaaatgactagcttctatatttttctacataattcccactactagcacaagtgaaagataattctagacaatttaagagtactcaaataaacaagaaaattctagacactttagtaaatatgagaatagtatagaaactttagtaacaacaagaaaattctagaaattaattatattaaatcaagtttaaaatttcaacactctccataaacttgatttgtgactctaatattcgtagtttgatgaatgtttctctcttgagtggcttcgtaaaaatatttgctacttgatcttgagatttgacatattccactcttacttagtttcttctatgcattctcttatgtaatgatagtgggtgtcaatgtttttgcttcttttgtgaaagattggattctttgctagtgcaattgcttatttgctatgaacacaaatctcagttggctcctcttgtggcacgttcaaattcttcagcaactttcttagtcaaatagtatgacaaacacatgaagttgcagcaacgtattcagcttcacaggttgatagcgtaacgattggttgcttttttggcatccaagtaaatgttgtatttcccatgaagaacacaaatccagtggttctccttctatcgtctaaatctccactccaatcgttatcactatatctaactatctcataattgttagaggatgaataaaatagctcataattagtcatacctttgatgtaccgaagtattctctttgcagttttcaaatgagtttctgttggagcttccataaagcggctagcgattctaacagcatagagaatattcgaccttgtac

SEQ ID NO: 12526 - DNA, 551 bp, Cannabis sativa
ttagtcttatattctagggattgaactattattttttgtaatttaaataatagataaaaaaatgttaatgtccctattttaaaggaatatctttacctattttaatgagaatctcttgtaagccctacactataaaaaggcattagatcactctattgggggcaaagtcattctacatgcactaggggggctccattaagcttctcacacgcctaaagcctccctctctctcaattctcacattctatcaatgttaagtcaagtctcttcataagttcttcacaagatctcaccaattctttatctgtaacacttgttctcacaattgtaatactgaagagagccatagctagaaattataaagtctaggcctgtaatctgcatggtattatctcaagagtcaatataacaaaaaagggaggtcattactcatttatcaagaggaccgaacctctataaattcgtatgttatttttcaatattgttatttacacgtggtgataatcagaaactaataaggctccacaatcagttgaccaaattttgagtca

SEQ ID NO: 12527 - DNA, 664 bp, Cannabis sativa
ttgctaaggctgctatgttatttcttaatcgtcgtttcagtttggaggatgttccaactgatttgctatcttatttggtagctgaagttattggttaataaatcaatttattattcaaaaaaaaaaagtaattgtacaagaaaataatatttttttaatagttaaaaaataatttttttaataattacatggtgtactcatgggggccatgagattcttagagtgtaattgaacccctcaattactcttaattatacaattaaagtgtaattatatacacggtcagacaaacgtactaaattatgcaattacctccaactacactcaaatctgattacaccatgaaaaaataacaagtggaataataaaattcaagaaacaccctgtcatttttagtgatacttatttggtattggagatggtctaataaaaaaataacaacaatatgtgattggtaaagaaatgtttctttttttaattgagaaagtttattgtccatttaaaggcatattcaattaatccatatacattggacttatattgaacttacatgataaatagatgtaaaataaaaatagacaataaaattttcatataacaaaagataatagtaagtctaaattcgaccagttgaaattgggattgcttgtagggttgaaaatat

SEQ ID NO: 12528 - DNA, 615 bp, Cannabis sativa
  modified_base (312)..(315): a, c, t, g, unknown or other
cataaaacccaacagaagccacataagagttagagtccgacatgagggctcaatatccagagttgtttaggttaggttttggggaagaaattcttttaggggggggggataattgtaaagatcgcttaacttcaatttgaaacttaacaaataattagggtttaattatgaaacttgcgtattagttatgaattatcagtttacagagatttatttgaattcagaatgccttttatttgttatatatggaatttcacaattttgcatgttttgtgcccgataacattggaacacggtgtttggctattagannnncatcttagtattttagtatagcagagcaatatagttggccattgggaatgctaggataagttgagattttagaattgacaaaaatacccctaattgattttatgaccttttagttataggaagggcgaaatggtcaatttgcttaaatgactttttgtcgtttagtagtttgtaattaagtttaatattcataatttattttacatttggttgatattttgtaataaaagctttatattttacttcattttacaaaaaatagaaaattcataaaaaagaagaactctctctctctctctc

SEQ ID NO: 12529 - DNA, 545 bp, Cannabis sativa
ttagttaacaacatttaaaagacatattatcaacaccacctcataatcacatatatgaataataaattattctttcccttcaatcactttatctattttttattttttaaagagtcattcagattttatttttatttgttaaaaaatactaatttatagttttaatttaaaataaaatccatttctttacacgatattaatcactaaaatatatttatattttaaaattaaaatgcttaaatttttcaaaaatagaaattaacctacaattgattttatacataaaataaaattactatagcaaagaagagaattcacattgatatttttgataaatatatatatttttaagaagatcgtgttctcaacaatacttaattaaaaatataaaatgaatatatttagagatatttttttattttattttatggtgtttttctttctttcttttttttttttttttgtgaaagatttaatctttagagttctctatctagatttattgtatattttagtctttccacataatggtaaatatgtaatta

SEQ ID NO: 12530 - DNA, 1074 bp, Cannabis sativa
ttgttaatccatccgaagagcatgtgcagccacaatggccaactaatgtacatagatcatggacactccaggaaaactggataacaaacttgttacattttctaacagtgatcctaaatgactgaaaaaaaaatgtctccaagcaaaagtagagacaattgctaaggggaaaaaatcaacaagaacaataaaatttgaaggaaaattcctatccaacgtcattaaaattgcaagaaaatatgcttgaaatgctagaaatctccatcttccacacctaaattttcagtcgatgcttgttctactccctccaaatgttctaaatgaaaataagataatccaactgcataaaatacaaagaaaattagcaactaatataaatcacaaaaaactatttcaaatgagactgaatgtaccaaaagaaaactaatctgctaaaaatgttgttctctagcgaagcaagcatatcatttgaagtcgcgaaactcaaaaatttccattccaataactctataatttcaataactcaatatctttataactctaataaccaaaaattaaaacacttgaaaaacacataaatgttataaatttagaataccattattggacttattaaaaagataccttggagaaaataaaacatacctattcacaatgaaataaaagaaagaacttctaatatagaatcaaaaaaataatcatatatagaaagaataccatgatatacttgttaaaactaagcaacaaaaactgaaaagaaattttccaaaataaatacaataataattaaaaataaaaataattgtcgtaaaccgacagagattaaagtcctagatgatacaccgtaaccaccacacaaccacaaagtccacaacctccgtcgaccaccgcaaccaccgcaaaaccaccaactacaccagatctcctcgcccatctcatcatcatcaccacctttgcacaaactccgtcataccataatctagttctctctctcgatctctcttcccattgtcactatctctctcttgctggcactggaaattctctccagcattaatggcaggccacagatga

SEQ ID NO: 12531 - DNA, 500 bp, Cannabis sativa
accattagcacgggcaggtgggtggcaacgttatagcatttcctcacctccccttgatttcctctcaccgtgcctatcccagcttcctgggttgggaacttcaagcacaagtttcgtattgatgtgactgggccaaagtccaccaaggccggtcggacgaggattgcgttgtacgctgtcgggcagtccaccaacacgaacgtatactacttgaaagtgctctggggcgtgtccgggcacaaggtgactggaagcctcactttccccattgggataagtgtcgttccattaaaccccgtgagttgagaaccacttggtgagaggtctcggtccgtcaggcctattgcagtaaaggcctttttgaacaacaaattcacagaactcccgttgtcgatcaggactctggccaccaccttattggcaatgggggtctctatgatcaacgagtcatggtgaggaaaacgcaccatcctagcttcttcttccgtgaatgtgatggg

SEQ ID NO: 12532 - DNA, 646 bp, Cannabis sativa
tcagtgtatacccgaactcgatgagcctagaaaaaaggccttaacttccttgttattaagattaggcagtaaatagctgggctggtttccttaattggccgaagtccttcagagagttgcagcagcgaagcttccccgccaaacagatttagctgtgcagattctgaatacagtgattgtagccactctctatcatatttggaacagaaatgattgcctgtttaatgctatttgcttgtctgcttcttgtcttagtaaatgtataaaaaaatatggttaagacaagaattatgggctttcattgtactagtacaaagaaaaaagacagctattttataaatgttgtaaatagctggtagatgtttttctttttgagttggttggctgctgcaccttcttttgttttgtattttgttggtattttgaataaaaagtttccttttgttaaaaaaaaaaagattaggcagtaagtaagcttttctatcaatgggtatcgtccttcaactttaatgagtcttttgctgatatagtagactagatgttggatgttgttctcttctcttatcagcacgacactcacagcatattctataacagctaagtatattcttaactatttttcgtccaggggttttgagagtatggg

SEQ ID NO: 12533 - DNA, 682 bp, Cannabis sativa
actatggaaagtgataacagatttgattacaacagattatacataccagtatatcatactctttcaacgtacatttacaattcaacgtctatacgagcaaacttattacaaaattaagagtatttatacctataaataatcaacaacctcagtgtttcataaaacacattaatcatacattatcatatccacacaatttcagtgcttcataaagcactctaatcacgcatcattatcaacctgttttcttacatccctaggccactgagacttcaagaaaagaaaccaatttcatcagcaatataatattcattcaatcataccataacaaaatgtattcaattacaactcatcacataataacacgcttgatcgtttgacaacatcgtaaccacacaatttgggtatttcataaagtacacttaccacttgttaaccacgagctacatatgtcactatcgttgcccaatataggaaacgataagtaagaaacctatctacggtttcaggagtaattactcataacggtaatgaccatttcttttactcgataataatcgagtcacaacgataataatcgtttcatatcattaccctcgattataatcgagtctcaacgatgataatcgtttcctatcatttccctcattcataatagagtcactgttggaaattattttac

SEQ ID NO: 12534 - DNA, 1037 bp, Cannabis sativa
tctagatctgacttgaataaaattaataaataaaaacaaaagttataaaatatacttttattttaagtgtttaaaattaaaaaataaaataattataaattatatttttatatttaaaaacataaatcttacttttactttttatgataaaaaatttaaaaaataaaaatattaacaaacgtccccaaaaaaaacaaaaagtaaatttaatagcatttatatataattccacgtgtcagttattgtcgacgtccacgtgcaagatcagagtccaagtcccattgacagtctactaggaaccggcacctcactcactcactcctttcggaaaactgcaaatttctaaatatcgtctgcttcggtaatggaaggcatcgttttcgcaccatgcaaacctcaccatctccaaaggagtcttggtttctcctcccaaaaccctaattccagcttcctcttccatcaccattccaaatctacttcacttgcccctctatggcctcgccccaaccctggcttgattcgctcctccgtttccgaacccgatcaaaagcgcgtatccagtatcggcagagacaaaggggaattacctccttcaagtagctcagtttacactccaacgccttcgaatcgggagcttagaactcctcacagcgggtacacaacctctattttgtgctcttcttcattgaaatgttttctttttcttactttggctgagttatataggtaccatttcgatggaagtccgcggaaattcttcgagggatggtatttcaaggtctcaattccggagaagaggcagagcttttgcttcatgtactctgtggagaaccctgcgtttaggaagaaactatcgccattggaaatggctcagtatggacccagatttacaggagttggggcgcaaattcttggtgccgatgacaagtatatatgtcaattctctgaagagtctcagcatttttggggaagtaagatttttgtattgttcttcttagctgtttatacaagtgttttggtctgaatttttcggcttt

SEQ ID NO: 12535 - DNA, 754 bp, Cannabis sativa
agttgccatccatgaatggcacttccatcacatggatataaacaatgcattcctgcatggggactcgaatgaagaagtttacatgaaacttcctcaaggttacaaacccaaaaacctttccacacaatgttgtctgcaaactgcagaaaagcatatatggtctcaaacaatcctcacgccaatggtatgctaaattgagttccacactgatacaaaaaaatttcactcaatccccaaatgactattctctgttcatcagaaaccaatcaggtaactttatggctttactcatatacgttgatgacatcgttgttgccaccaacaacacaactaaattacaaaaattcatcaccacactcgataccaggttcaaattaaaagaccttggactccttcattttttccttggtctcgagatagctcgttgttcaaaaagaatatccgtctcacagagacccttcaccatacaactcttacagaattcaggttgtcttggttcaaaaccggtttccactcccatggaacccaacaacaaactcagtagtgactcaggggaattacttcccaacccaactcaatataggagtctcatagggaaactcctttacttgataatcacacggcttgacatcagctttgtcgtgaacatactcagtcagtatcttcaatccccacgactcccacacatgcaagctgcaactagaattctacactacctaaagaactctccaggacaaggccttttcttctatgc

SEQ ID NO: 12536 - DNA, 806 bp, Cannabis sativa
aactataattatatataaatatttaaaaggtgatagtaataagaaaaacttaagataataggatatatataacataattttgtttgtaatactaaaaagctcaaagcgattacacttgaactaactacagttaaatttgacttaataataagaataaatatagtgtaagttataaaagtgagaagacatattcattatttgataaatataatgcctattagaatttttgttttttattaattagttgttgttattaataaatactaaatacaaaaaaaaaatataaaaaaaaaacaaaaaattataaattagataaggtagaacatagaacattagaagaagagaatgccacatcatttcttcaaaaccctcttttatatatattgattgatgattgatgattgatgattgattataaaatagagccagttataacataagtatgtaattgtaatttaattacaacaaaaataaagaatcaataatagattggataatagaactacataagtatataatttatcacttataactacataaatattgataatagatatatacattatatacatacaattatttaaaagacaaacaaaaaagaaaaaaaaatgaagaaattgtaccgtatggaatgaattttttcaataaaactattgtattttgtatctcactcttgtaattattatttctttaactctatatgtgtatatatagtgatgaacatacattaatattcaaaggggttataggtaagtgaaaaaattattttaacttaatttttttatgtttatatctttatatattaa

SEQ ID NO: 12537 - DNA, 509 bp, Cannabis sativa
tatttcaatagaaaaaaaaaataacaaggaaattagactatattgattattggaggtaaaatgtggatgagaaatagaacaatacgaatagaacacttgaacaaacactagatcacatatattagcataaacattaatctaattattatattcataatttggtttattattattattattaataacggttaatattattttaaactctgaattttataaaaattaccaatttaaatttctattttgtaaaataataaattagactttgtattttttaaaataatactaaatagtatactgaatttaattttcgatatttttttttaatataattaatttgaagacaatttttaacacaaacaaatataaaaaatatatattatataacaactctagatcgggttgatattaatttttattttagcgaaaaatcaatttaaggtattattttttactattttaaaaaaatataagaatccaatttgttatttaataagatagattattta

SEQ ID NO: 12538 - DNA, 740 bp, Cannabis sativa
tgactagaggcgccttcaaacaccctaagaagactaaggacattcgaagcttcttgtttagtagctttgcaatacacatagctgtcatcaacaaataacatgtgagaaaccaccggagctcccctagccactttacaaccccgaatagagccattcatctcatatctatgtaaaagggaggaaagcccctctgcacaaataataaacaaataaggcaacaaaggatcaccttgtcgaatatcccgagaaggtatcaaaggaccaatttcccttccaccacgtacaaacttgtaaaagactgtcgacacacaagtcattagaagtttaatccaagtatcactgaaggctatccgttgcaaaactgctcttaagaaggaccattctagacggtcgtaagccttgctcatatcaagttttaaggccatagagctgtttttgccattctgctttcactttagataatgcataatctcaaaagagaccataacattgtcaaagatcaatcttctaggaaagaacgcacttcgactatttgaaatagcggtagacaggacacctttaagacaattagcaacaactttagaaatcacattgtaaaggacattgcaaagagcaatgggtcttaaatcgcccatggttgtaggatgcttctttttgggaataagaacaacattagtatcattcaaccccataggcaaatagcccacgacaaagaactttcaaacttgattgatcacatc

SEQ ID NO: 12539 - DNA, 612 bp, Cannabis sativa
catccgagcaagtgcccatagagcatgcatctggattaaggaacatggcatgcctgctcggccaatgacccctatggagggaaaaggaaatctgtcctggaggagcgggaagactctttggacgatgacgctccatctgtacttgttcgggagaacgctcctgccagcatgtagagtacttcaacttgcatttctttttgctaatttttatgccttcacatattatatgccttcagatattttatgccttcttctgactgtattattttttccgtgcaaaaatgtctcaaaagatgattgaggctctgaagaagagagtaggggggagctcgagcttgtctcctccgaccaagaagtctaagggtggtgagactccgtccaaggagaagattccagttgaagaggtcattgatctctctgaggagaaacctgctgtggacccttctaccttaaaggtcgctaagtcaaaaagttcccggggggagttcatacggacctgagtaagctaagattggaactgagcaagttaagggcggatcttaagaagttagggcccctgccctaactctggtgttgtgcacagagactaggagaggcaaagacatgcttaac

SEQ ID NO: 12540 - DNA, 800 bp, Cannabis sativa
  modified_base (304)..(320): a, c, t, g, unknown or other
acaaattgggccttaactacccacgtaaatagagagaaaatatcagcaaattccctatttttgaggatcaatttagttatttgtatattattagtttattatgtaaataatagttttatttatctatttctaagggatattagggatgtaagcgctcctatataaagggcattaattaattaagccctaaaatcctaagtcttaaaccctaagcctaaagctctaagtctgattactcatctcatctattctcacttgagatttaccaactatggtgtctacattgtaatcttaagagagccannnnnnnnnnnnnnnnnatagtgatctaagtggtattatctttggtctcattataactaaaagaggagtaggtcattacccgataactaagggggctgaacctttataaaatcatgtatctatttacatttctattcaaattgtgtaacacgtggcaagtatcagcattaaattttactctgttatcggttatctaaatttgaggtcaatagtttggtacttttattaagagcgagttattaatttatctaatcaaatatcatgattaacactaggagaataacacaaggagaactccggctacaacttctgccttatcttgtctccacaagactctatgactatggatcctaatgttcatgttctagtcacaattggaatctccacgaacctgacggatgtggccacacctgcaacctctgtaggcaccatgaatctggccaccacagctggccagggcgacacaaccatccctacggatctgaacaatcaaccca

SEQ ID NO: 12541 - DNA, 1000 bp, Cannabis sativa
tctaaatcaaattgggcacaaaaacgatcgatcaatgatggcatcacaagccacacaagttttttatgtggatgatccagcaaacaatcaatggtcagttgtgcttacaacacaaacaagagattggagtaacaaaaatgatgatttgcatgatataccacttgaagaacaacatgtcacattcaccataccaaaaaatgatgatttggttgataatgatagcacttttcgtgaaaatggtgaaggtgtatgggttgattaataaatttttaaggtattaaatatagagttgtggtattagcttgcttattttctatttttgctttgagctatatggctgtattaattgatataatgttgcttgattattgagttatattattttctattatttgcttttagctatattgatgtattatttgtttgttgttctttctattattattaacttagtttcttatcacagatgtatgatcattgcggtgatgatgtggttgatttagaggatgatttggaggatgatttagaagatgatgatggggttggagaagagaacaacagtcagaaaccttctaagggaccttctctattgcctagattaatccaatctagaagtgaaggaaggcgtatttttgttgattacaatgtctacggtcaaccaactggtattggtcgagtagacatgtcttcgatgttagggtctacggtacgcaggcttgtgtcaattctctgcaattgttggaaagaagtccccgctgccaaaaaaaaagagatatgggaggtcatgaatgtaggtattatttgattaattgatttaagtgtttactacttgtatttttctttttcttacatgatttacttttttaatcttgtagaaaacatttgagttagaccctaaccataaaatcaaaatgttgagtcacgccgcggcgcgctttagaaattagaagacttatctaaccaaaaattgggttcaaaaggcataaaagagagaccagat

SEQ ID NO: 12542 - DNA, 551 bp, Cannabis sativa
ctagtcgtggagcaccccggtcgaagctggtagagaaggaagtgcaggtaaagacattctaggagcttgagggtgcgcaaccccctgtgggggatttacagcaccctgctattcgggaagcatcatgtgtccatgaactaccccctgtccgggataaatgattagagtatggaccccattgccccaaatgcccggctcggacccatctcaatctcgtctttcaagtactcacactcatttgtagtgtggcccttttccccgtggtgtttgcattgcttgctttgatcccgcttgttcctcccgccatttgacatgcacggggcttcccgtaatggaccatggtgcatgtcgctttatagacgttctccccagtgtctatcaaacttgtatatttggtgtactttgggtcgtaatctttccttaccttcttcactgaatctttttcattgtggctctttcctcctctctttccccacgaatgccccacgtacactagagtttgggacctcagatttagactgtttgggaaccacactgcacccaatatgtgc

SEQ ID NO: 12543 - DNA, 850 bp, Cannabis sativa
ttagtaattattttggttcttcataattttcctgagtgggagattatctctccacatttttgttgtttatttttctcaattgttgatattttatcttctgtctcgcagacatggatctagatctcgaagaggtgttacgcagtcctacatgtcccatcaagaaatccaagaagcgcgtgacttaaataggagatgccttgggatcaactcaagaacctttaaaaagaatcaagaagactgccaacaagaagcgtgccatgaaacaactcaccattgaacaagaaaagtctctaggcaactctaactgcccccagctattgcgagctcaagtgaacaagccctagggtctgttcatcaagttaaattctcaggatctcaactcgagatggcactactagagccttcttgcccctgcctgtttatggtggcacagaaggctcgcagatatgctccctccatgctacaaacaactggcaccattacaagacttttaggcaaggtgattgggatttaattaacaagggcaactttcaaagtcttgtgacaaggagttatgacctcatgcagtcgcttagttttagtttctcttctatttttcttttttttttactcatttcaccttctatcttgtacgtcttcctctaactttacttttcgcagacatctcttctatcctttatggcacaataaagaggtctccaacacattgagattcttaatgtcgagctttgcaaatccaaggaacattgcaaagttttagctaagcaatggaccaattcacagtcgaagatctcaagagttaagaaagatgttgaggagcaacaaaatatcctcaaggtagatcttgagg

SEQ ID NO: 12544 - DNA, 640 bp, Cannabis sativa
taaccttaaaaattatttttaaaacaaatgagttattatgagatataacaagccatcatttttatatactaattattttatatacttttttgttattttgaaagctaattagttatcgtataatataataattaaattcacacaattctaaaatgaatgttaactaagattaaaaaaaaaaattataaaacagtatttatcactatattagtaactaaatggtttcttttctggaaatagcaaaaaactatatgcttcccacattttgaaatattcacattaaaaagtaaatcacaatggtatttttataggctcctccgagtaatgacaagaccataaattatttttaaattttgagagaagagagagaaataagaaagagagaaagggagtagcattaaagagaagggaaaaggagagagagagagagagagagagagagagagagaagtataaatgagggtattgaaatactcaaagttaaggtgtcaagtgtaaaatatcttaaatcaaaaccactataaatacatacacagcctctgacaactataccctgccctacccacctcacgaaacaccctcatggcaacactttacatgtataaggtagtattttgatttgggtatgaaaataaaacaa

SEQ ID NO: 12545 - DNA, 630 bp, Cannabis sativa
aaatgtggtactcatgcatcttttttatggcgaagtttgatgtggggcaagaaactaattttgaaggggtaccgatggcgggttggagatgggagtaacataagagttttagaggatccatggttacctaggccggttacctttaagatatatgataagccgcctttgccggaacaccttcgggtagttgatttgaaattgggagatggtacttgggatgaaccttttattactgcggtgtttaataaagatgatgccgagatgattcttgcacttccaaactcggggtgggaccttgatgacaaaatcctttggcactatagtaaaaatggtgagtattcggttaagagcggctatcgtatggcatgtgaattgaaggcagaaagacaacaatcggatgaccatcttgctgtccaatggtggcgaaaattgtggcgtttaacaattcccccaaaaatcaaggtgtttgtgtggaaattggctcatggttggcttcctacttctacggtgttggctaaacgtcatgtttctaatactgatgggtgttcgaggtgttcgttccataatgctgaaacaatctttcatgctctttgggagtgcaagaatagcaaggtatgttggaaactttgt

SEQ ID NO: 12546 - DNA, 567 bp, Cannabis sativa
agaactcatacaggcaaaaaaaaaaattctttaatacattacctttattattgatttttaaatagttgcataacagttgatttaaagttacatgtcatttcataaatattatcagaaatgtaaagcattagcaacattatatttgacacattaatgtgaagttccaaaaattttcttattaaattgactaaaatattgaatcttcaactagttgcgtaacatgtgttatacataacacattaatgcaaaagattcaagtaacactactacaaaataaacttttagaggcaattttttttagcaaattaataaaattttaataagaacacctacggagtcagttattttgtaataatcgactccgtaggtgataattttttttaattttaatgaaataaccgtacggggtcagttattttgtaataattgactcagtatgtgatttttttaattttaattaaaaattttaattaagaaacacatatggtgtcggttattttgtaataactgacgccatatgtctttatataatcctctccagctacccttcttcctctcaaacccacg

SEQ ID NO: 12547 - DNA, 647 bp, Cannabis sativa
  modified_base (270)..(277): a, c, t, g, unknown or other
ttcttttgttatgcatgtaacaagtaacaatttaaaatttatattagagttagtctcacattgttagtgtgtagaaataaattgtcatatagaagatgaatatttatcttatcctaaattcatctgtacaacagctaaaataaactaagataaaaagtttttcaaaaaaaaaaagttgagtttgaaatttaaattcaggatagaaatttaaatttctcttttattattcattattattggattaaaatctaataatttaatatttttaannnnnnnntttatagttaaatttatttagtgaccattaataagtgatacttattgaaatgtgttgcccatatgtatcaaaattgatatgagtatactagaagtgtccttttaggaagtcttattatactaattcaaactcattagttctgaagttttatttgttattttgttttggtgagagatgacataattaatgagtaatattttggtggtcgtggaaagatatggcttcattatttggctgctatgattttggtcatgttttactgtgaattattataagttaagtgggaaaaataaatatactatgatgttattttatacttggaataatgatgttcggttgtttatgttcattttctaatatgtattgtttg

SEQ ID NO: 12548 - DNA, 556 bp, Cannabis sativa
aattatttttatttaagataagtctcacttattgaaataacttgtcacatattttttttttaattaattaggtaatatattattattaggctaatttggatttttactcctaaatttttgatatgtagcaaattatgccccgaccctaaattttttagatcgttaaaaatttccttcgaactattgagattattaaatttaaagatttttatttaattttactaaagaaagatacttaattccaacaatctcaatagttcaaaaagaatttttaacgacttgaaaagttcaggagacataattcaatacatgttaaaattcaaaaaacaaaaatcttattaatcttattattatcgttatggtgagtagttgaatttaaaataaaccccacttactataatttgaaattaaaatttaatgatgttgttaatgtgaaaataaaggagtattatatatataacacataccttgagacaccggataaccatgttgtcgtaggagtctaaattcaagagaattggcatacacattattgttggtgttgcacacattattg

SEQ ID NO: 12549 - DNA, 594 bp, Cannabis sativa
ttgagagacagtcattaaacttttcgggtgcattgttccatcagttgttgatgcacaagataaaatctgagaaggacgatgaagtccacttttatatattttgcaaagaatagatgcagattcagtcgaacagagttttctttgttgactgggttgaacttgttacccaaacttactaagagagaaatggaagaaaaagaaaatttaaaccgattgattgtggagtacttcaatgatgatccatccatgagctttagccaactacggagagtttttgagagttgcatagaagctgatgatgtgtacaagttggggatagccttatttgctatgagcgttctcactggtaaagaggagaagactattattctgccttttatgattaaaatggcttacaactttgagttcttttacgagtacttgtggggaaagattgcattcaacaaactgatagaaacttgcaataaatactttatagatgtgaagaatcgtatgaacaagaagattgaaaagggaacttctcagaagcaggcgaagtactcggcatgcagttatgttgtagcgttgcactattgggcatatgagtccgtattt

SEQ ID NO: 12550 - DNA, 741 bp, Cannabis sativa
gctaagaaaaaaaaaagttaacttcaatttccaaatcataatgagttgggttctatgaaactcttccactacgatgtagtattgtgggtttttgatgagaacaagagtggtactctcctctttgttttaatacgaattacactgattcaacaaagagagtgacttcatcatctacacttgtagaagatgatgaaatatatactagaatcaattttgaaagtttatcttctactacaacatttctaaattatttggaatttgaggatatagccatattctataaaattaaaatttttagaagcaaacaatttcttgtttgcttgactattacatagtgcatctcaaatctaattagaatagttaataggcatgcaaatcatagttttatgttcttagctttcattccatatttctaaggacatgagtaagtcacccttagattttgttaatgacataaactaatagaattaaaattgtttaaacattctaaaagtgtttagggaatagactatgggatgatattgaaaatatcatttgatctctctaaggcatattcaagactctagaaatggagtaactaatcattaaccctgccataaatatgcaatactaacgtttaccaggggtataatgtacataattgttaatctaaaaaaatttccctgatgacgtgggcattaatatttgacatgtggcaaaaaagatagcatttcaaaattgagtagtcacgagtcatagtag

SEQ ID NO: 12551 - DNA, 580 bp, Cannabis sativa
ttgcttgacatctagcaaatcattgggctcgatttagtgctttcgagaatgaacaatctgattgccaaaagcaatcataagatctttccatgagtcgatcgatccaaggggaagtttgaggtaccatcgctgatccaagattgttattgtggcaagaaagattctgtacctgacatcatctcttactcctcgcagatcaatctgaacttcgaagtaagcgatgtgtgatagcggatcttccttcctggtgtgccagaatgggttcttgaattttggagggattggtagagccttgattcaattagagaatggtgatcgtcgttctcaaacaactttgaggtcgtgatccctttcactaaggctgctaggttgtcaaactctgtcatgttgacaccatggatggtggtttgcatctcggttggagcctttgttacccgattggggtctcctctaaaagctcccgcttcccccacctgtcttttggttagagtgttgtgcaggtttcttgctcttccaagtcaattatggactcaagtagactttggtcttgtcgttatctcctgaccacggggtcgtgaag

SEQ ID NO: 12552 - DNA, 645 bp, Cannabis sativa
  modified_base (264)..(283): a, c, t, g, unknown or other
aataggctttagggacccagaccttgacttataaagaccctaccacatcaaccaacggtgataggctattatcaggcttagccctgagctaagacgggctaggcccatgcctagggcccacctaaatttagggcccaaaacttttatatagtatacttttagggaaatttacatggtatactaacttttagtatttttttacaaaaatactgccaggcgctattgtttaatttttttactgtgttttttttataagtttcatannnnnnnnnnnnnnnnnnnnttttcactggtgttctactggtgttttttagttgttcttctgttgttttgagttgttctgttttgtattctaatggtgttttataaaacatagtatttttgaaaactttttcgtgtgacagtatttttgttaaagttaacccaaattttagtatttttgtaagttttcctacttttatgtattgaaaaaaatagtgcttttgtaaagcccacctaaatttagggcccaaaacttttatatagtatccttttatatattgaaaaaaatagtatttttgtaaaaaagttgtgaaaagaaacctaataatactcacaatttactttagaacccacagaaaaaattcttggacccattgttactca

SEQ ID NO: 12553 - DNA, 730 bp, Cannabis sativa
ctatgggccttggatgaaggctgagatggctgtctatagctgtttcaataccagaaatcaactggactatttcagagaaattaatggccggtcttcttctccggcaaaggtacctccgactattacttcgaactccaaagcaatgggaaagagaccagtccaagaaagccccagaaagcagtgtctgcaccaatctccttgctctaaaccttcaaggaaagtagtcaggatcaggagcaatgaaccaggttcttctttaggcaaatatttgaaagttgtcaacaaagatacccctaacccgttggacaaaagacctggaggctctaatttagctccacgggcttcaagacaggatggaagaggaagaatggccagatcagtttcacctagagccttgcgtaatcaccaacaaggtaattctcgtacaacctcagacaatgacatattaaatagcttttcatctagaccccctccaaatgaggctgataatggtgttatcacaaccattatggccaatattgggcccacttataaccaaatggtggcaaagcctcatgctgaattgtgtcaatctagacaaccccacaaacaccctgagcccactcatttcccttggcccatttatgctgaggaaattgggttggctgaggaacttatggggctggccaaagtagacaagtttgaacctactcctactttgttccaggacccaagtgatgtatctgaatta

SEQ ID NO: 12554 - DNA, 788 bp, Cannabis sativa
aatacaatttccttttttttttttatcaatgagcatttatttttggggtttatataaaaatattaaattttggacaaaattttacaattttactgtcacacggaattttttataaaaatactatctttttataaaacaatcgtaaaacaacaaaacagaataatagtagaacaactaaaaaccaaccgtgaaacaacagtgaaaacttaacacagtacacaatataaacattacacggttttttttttttaaaaaaaaaaatagtatttttgaagaaaattccgcttcactgtaaaaaagtaaaaaaaattagaaattttaatatgtagtgtaaaaaccccttaaatctttgggagaagtgtaagaataccttttttttttatacattaattaattaaatttacctttaaataaaatttaattcaaatatacctatttttatgagtattgtacccaaattatcctcacacacttacatagctaagacataatttcaaatataataaatttgtgttctttgtagatggatgtgtaagtttgtgggaaaattagagtaaaatttgattagagaagagtgaaaactatcgtgaagtaattaggataaaattgataaaataattaaaagaagaggtaaacataataaactttgaaaatgaaggtaaaaattaaaagcatctagttaaaaaaaatttgtagtctaatttcctctaaatcttttccttatttatttgttgggctgcaccgggcccatggtttgatgcagacccatgaccttagccgaaaggctt

SEQ ID NO: 12555 - DNA, 726 bp, Cannabis sativa
gaatgtgttatctttcaattgtggcttgacataaattttgaaagactacggattgatctcaccaaggaataaaagaccaattagaaataggcttgattaagatcacactgcatgtaatttctagttacacatccattattgatctatgtcattaaacatatttgatatggtgattattgatgagtctagttacgataaatgtaacgaaggccactttggtctcatattggtataggagatggaccagattgtctaaaggagatgttttgagaataattagcaagtttatgcgcacataaaattaccaaatgtacgtaattgtcattggaattttttaacaagtgagagattgttgggttattttgaataatctaatgtggttacaaattaagataatttatttgagttaatattttaaattgggtgaaataagtggtctaattaaatgagcccaataaacatcttatttggtatgaactttgtaatgtgtaatactcaatagtaaacttaattagagtttatggagctctaattagtttcctatataaagaacattagggtttgatctccaatattaatctcaaccactcttcttcctcatttccatcaattgagtgaaaacccatagagagaatattagtttgtagaagagcatatacccatcgtcttatcttatatctaatatcatggaatcagttatgttttccatcttattgattcatatag

SEQ ID NO: 12556 - DNA, 893 bp, Cannabis sativa
gagagagttgctaaagactttaccttggtttgggaaacacttagagctgctggatatcactgaattgaaagaagaaaaatcaagaaccctagcgggtctagggggttcgaaggagagagagcttgaaagagagagggatgagtgttatgtccaacttttctatttttgtaaaaatgaagaataaagtaggttttatttcattaatatcagcttaacatttaattcaaaaatctgatttaaaacttaattaaaattcatataaaacaaaattctaataggcaaaagcccttcccacactataagtcattaaaggtcacttaggggtattctagacaactctaaaatttcgactattcccgatatttctaatgtctaactatattgtcccgctatactaaaaatactaggatgtgattctaatagtcaaacaccgcgtttcaatgttgccgggcacaaaacatgcaaaattatgaaattctaaatatgacatataaaatgcattctgaattcaaataaatcaacatagattaataattcaagttgataaacaatttcataattaaacccaattatctactaattttcaaattaaagctaagcggtctttacagattcattttctatttagtttaatgttcttgattagtgcaatttatctttaatcacaaaaaatattgattcccatttttaccatttattttgttataatttttaattaatttatttcaattttgattactctataatgattgtaccactgcattgacattttagtaatgattagagaaaagctactcctacttgtcttgtcgcatattaagctatttggacgatccaaactaaaaagccaaacactataaattgggacttatgtatgataaaattagttgtaa

SEQ ID NO: 12557 - DNA, 751 bp, Cannabis sativa
  modified_base (233)..(241): a, c, t, g, unknown or other
atttatcttttcagttgtattttggtgatcatcttaattttgaaataattgattgatgtagtcatcatgtgtataattatagtaagaaatttattaactaatttaaattagttgaaactaagtataatcttaaacattctaaaattacgaacatacactctcaaagtttatcattataacacttaggtgacatttggtaatgaaatggaataaaatagaaaggaaacaatttnnnnnnnnntcctttgtttggttgcattttaaactattggaatgacattccaatggaatactctttccaccattttggtggaatgactattccattttaaaaataaaggaaagatcattccaatgtaacaaaagaaaaaatttaatgattttttatatcaattatttttatgcattttaaattttatttcattcaatgcttattctcattctcattcctattcttatattttcatttctctcaaccaaatgctaccttaatttatcattataacactttttatgtaattattttttacccgaactacggtagattagccttggatcaatctaacattgggaaattatttgaaaaaatgaatgaaatacaactgaagggaaagttttattattatttctaaatttcaagaggaatttcttacaaaaaaaaataatttaaaagaaaaaattctacaaatatcataattcggaagtaaaaatcatttttattcttactaattaaatctcttaatatacatat

SEQ ID NO: 12558 - DNA, 820 bp, Cannabis sativa
  modified_base (262)..(279): a, c, t, g, unknown or other
  modified_base (407)..(413): a, c, t, g, unknown or other
attgagatatcatgttacggaatatatagcccatattctatatttttcttttctttatttctttaaattattatggatagttctttgttagaagttttgttattcaatgtcatttcaagagaatgaatttaataactggtaaatgcacaaataaagcattttataaagtgagtagttttagtgtgtatacatatgcatatatcttatatatctttatatattaaaagtgcttatctaactgcatttcttggtttaacagaannnnnnnnnnnnnnnnnnaatattctgttaaatttaacgttaataagtttgatctccgttaataaataaacccaataattaaaccaaaaaattaaacaatattttaaatattattaatctctttttaaattaaaaaaatatcttannnnnnnatctctctaacaaacctatcttaatcgtttcattctcacgccaatctcttcactcttcccttccattctcactcccaatcgtagatcgtcaaaaccaacagtccaacgaacaccaacgaaccaaagcttcctttcaccgactcctccatttcactctcccaatcccaatcggaggtcattcgattttattccctctgttggagtcgacgattgaaaacgatccgtatctgattatgcctttgattcgcttagaaagctcttgaagatcaagggatggcaggtcttggcgattgggaacattaaaacgccgtcggattggagccttaaagatgcgatctttttgtctctagaggagcaagctaaattgggttttagggttgtaaatttccttccttatgattcgtatg

SEQ ID NO: 12559 - DNA, 707 bp, Cannabis sativa
ttttaggtagttcatatattaattaagagatatgttaattataaattacttttattgatgagtaatatttttattttttgaaaaagtattttttcttacaattttagagttcttttttcttatgtttttcaaatcttccactcttcttatattctctttgtatttataaattgatagagtatgcataaatcgatcaaatttaatgacaaccgactaatctaattacaaccggccatcaaacattatatatccaagtatgatcagatcggattggatgttatttttgaatatctaattagatcagatcagatgttaaatgggatgtctaaaaatctaatacatccaacatccaattaaactaattagtgttttcatttagtttagatgagtaattcaattttacattgttacacataaaatatatatgtatattaaaaattaacattaaaattttactcttttttcttagattggatggatccaatccaatccaatacatactggacctaaaatattagatggatacgatccgatccaaaaaaaaaatactaggtctaatagattgaataaagccaaattaaaccaataaatatatatgaaatacatccaacgaataaactgatctaattcaacataaaatagatgttggatcgatttcaatgttcttttggaaactagtcgtacactctcagacgcccttcatacct

SEQ ID NO: 12560 - DNA, 562 bp, Cannabis sativa
tataagtattaaaattttaagtttgtaaggtgcataaatataataattttttttagcggtataagtatttaacgttttcaaaattataaatttctaattttatcagtatattttaaatttattaagaatatttaaaatttgagtctatttaagataataataaaacttctactgaccgaactaaaaaaattagaattttaaaatattaaatacttatactactataaaaagttattatatttatactactatttaatctttttattttattttatttttaacaacgacactattttaagaagagaaaggaataaagtgtttttgttttagaaaatgtcagaattggttaaagctctaattttttgttcgtttacaaagttgatgacgtggcaatctatttgtggagtgtttaatggttttgataatggtcgttaccgtatgtgataataattatcactttgtaaggtgacgcataatatgttgcaaatttttatgcaattttttaagggacacactttttatatcagcggtcctaatttaatgaactctttatttatttatt

SEQ ID NO: 12561 - DNA, 594 bp, Cannabis sativa
taaatgaaattatgtagatcgatattattatacactaattgttgtagtgttcggtatcttaggtgtcatttatatagcacttattcccttttaattttgtggcaaatatcaatacatggttaacttttaataacgaaaatattaataaataaatgtaattaataaatcaacggatattatttatcgtcatgatttacccttttaccttaatcaaaaaagaaaaatacaaaaataatattttaaggtgacaattacctatatataataacataatgcatgccatgatagtgttattttagaccttagatgcaaatagaaatcctcgaaaagaaaaaaaaaaaaaacatcatgcgtatctccattcttaattcaaacttcactaacatagatttatttaagattcacaaattaatgggaggggagaattgattgagttttctattgtactcttttgcaatttttttattatctaatatgatattattaaattaatttattacataaatcattattagaaaacacatcatacctatttaattagtgaataattatcgatcatgttaattatgtaaattatatatgatatttatatat

SEQ ID NO: 12562 - DNA, 552 bp, Cannabis sativa
catgggtccaaagctaactaactatagctcaaccctctcatcaagaaaagaataggtttctctttttattttcattaacctttatgtttctgtcaatatgaagttttatgtttgtaagcgacataagtattcagtatttgtaaaatttgtaattttctttcaatttcattagtacaaatttcgttttgaattgattaaaataatatttaaaagtaactgatattacgtgtttctgtctagatccaatgatatagaatctaagctttatatgtgtcatatttaagacaataacatagtctgtactgactaatgagaaaaattataattttacaagcattgggtacttataccgctaaaaattaaaagttgggtttatgccacttacaaacttaaaattttgtgtacttatgccgctatttacctaaactgtaatttttctctaattttgtcagtacaaacttcgttttgaatttattaaaagaatatttgaaagtaactgatactacatatttatgtctacacctcataatctagaattcgagccttatatgt

SEQ ID NO: 12563 - DNA, 606 bp, Cannabis sativa
acatcacaatcatgtacaattgtaggtgcacttattgttacaattatgttcacagctgcatttacagttccaggtggaaacaatcaagactctggctatccaatatttttaaataaaatcttgttcaagatttttatgtcctcagatgcaatatccctcttttcttcaaccacttcagtgttaatgtttcttagtattcttacctctcgctacacagaagaagattttttatattccttaccaaataaaatgatcatagggttatgtactcttatcctatcccttttaaccatgatgatagccttttgtgctaccctttctatcatgtttcaagcccaatattggattcttgtaccggttacttccttcgcttctattccggttttattttttatatgggttcaatctcgtcctttacgtcaaatgattatgtctacttatggaccaagtattttcgataggaacgtcaagccttggttgtacaacaacgatggctagaaacaacaaccgacctagttctcatatttatatttggtttacttgtaagttttacgaaagtctcattacttttatatattttttagttagaatttagaggtgtgtaat

SEQ ID NO: 12564 - DNA, 874 bp, Cannabis sativa
tacgggttaatggaatccggtaactaaggatcattcaaaatactaaccccacatccagacccaatcgacttccgagcaccttgcctaaccacggtctgagcttcaaatatacttcgccagataaaactaggatttggacctaaagaagcagataagaagctaccattaggataatatctagccttatacatccttccaactagagaattctcattggttagcaagcgccaaccctgtttagcaagaaaggacaagttgtagtcacggagatcccgaaaaccaagaccaccctcatgcttatgcttagacaatctcttccaactcatccaactcacgcctttgctagaagagttagattgagatttccaccagattttagacataagaccctctaaatctgagcaaatttctttagtaagcaagaatacactcatagcatgggcaatgcttgagcaacagatcgaatcagaacttctttgccagctttagataagaaccgactttcccaattgaaaatcttctttttcatcttgtctttgagaaaaccaaggattgcatttttgttacgacccatagtacaaggcaaaccaaggtaaagactatttccaggagcctccaccatttgcaacatattacacaatcgggaacgagtatcagcgttagtatcttgctaaaaaatatagatgatttagcaaaattcaccttttgacccgaagccctttcatataattggaggatttgaagaatactagccgcctcctcatctttagccttgtagaacacatagctatcatccgcgaatagcatataagagacaataggggcacccctcgccactctaatgccagatatgagctggtgtcgttgataatcc

SEQ ID NO: 12565 - DNA, 648 bp, Cannabis sativa
ttatactataattaattaaccatcgatattattattattattcatttatttatttatttttgcagaaaaccatccatatattaattattacattcacatgttatttattagtcacttttcccttttctgttcataattaccattcacgtatttctgatctagaacatgcattatataattaaacaccaaaaataaaatagtcttcaaaatgtataataaagaaaaatagtttttattttatattttacaccaaatgtgcacgtgcaatcaatgatatactatgggccatggattgggtgggattgtaaaaagaataataataattaaaaaaaaaaacattatgcaaaataattttaaattatataaaaaatataaatagtatatcatgtctctatagaaaagctccaaattatatatgtatacattttgatagatttttttttatctattttggcacctagaaagagtttttagtctattttttatgactatatacgtgttgtagttatttatgatcaattataaatttttttaaaatttttaaataatttacaatatcgaaaataaaattaaaacaattacttaccacgagtatacaaaaaaattgttacacgtaacaaaaaattttaacgttatttttaacatcat

SEQ ID NO: 12566 - DNA, 865 bp, Cannabis sativa
cgttggtgatggggttgaacttgtaaccttggtctacaaaataagaaatcagagaaaggacgtttgaatcgattgattgtcaagtacttcaatgacaatttgtccatcaactttagccaattgcggaaagttttcgagagttgcacagaagttgatgatatctacaagttggagatggccttgtttgttttgggcattctcactggtaaggaggagaagattgttgttcctccatttgtgataaggatggttgataaccttgaattcttctacgagtatccatggggaaagatctccttcaacaagttgatggaaacttgtaacaaagattttatagaggttaagaattggatgcataagaagattgagaagggagtttctgagaaggaggcaaaatactcatcatacgactatactgggacgttgcagtattaggcctatgaggccatcttggagttgggcaatgaatatgcagtgaggatgtcgcattgctttccaagaatggttaactgggagagtaaggagaagaccacacttggcaaggatgaagttataagattgtttgcaaaaaatgtaagttttttacgctttgtatttagtcatatttattttattttaatttctttctaatattatattggtttttattttcagttgatagtgtactctatgttatgtccccagaaaaatgaggaatagttcgtgaagactatcaccggcggtgaggggcctttatttgttgacttggagaaactagtgttaggtgacaatgatcaaccaactcaagatgctctgcgtagctaggcccagaagcttgcctcaatattggaagagtaggcagatgtaggctgaatatttagagaca

SEQ ID NO: 12567 - DNA, 757 bp, Cannabis sativa
tgttggatcggtatttgcatgcggttccgggtacgggtatgtgggagtgtgttgatttttacccggtttcaataaacgggtcgaatgggttggatacatcggtgaatggtcctggtgttaagcacgtgctgaaagctagtcttgatgatacgaaagtggatcactacgcgattgggacttactttgtggggaatgatacttggatacccgataacccgaaagaggatgtgggtatcgggttgaagctggattatggaagatattatgcgtcaaagacgttttatgaccagaataaggagagaaggatcctgtggggttggattaatgaaactgatactgaaactgatgatctggcaaaaggatgggcttctgttcaggtagtcaattttgtagttttgtaacttgtaacttgtatttagtaactaaggtttattttatttttggattttgtagacaattccaagaagtgtgttgtttgatgctaagaccggaaccaacttgcttcaatggccagtggaagagattgagagcttgagactaagcagtaatgagttcacagatgtagtggttgagcccggctccgttgtgccacttgatattggctccaccacacaggtacttaataaaaatttatttttatgtcttttactaagaatcttttttaaatgaccattgtaacaaacaacacacatataattcgtactttgcaagtattactgtaaatgaaatttttggtatgaaagagaattgctacatg

SEQ ID NO: 12568 - DNA, 520 bp, Cannabis sativa
caagacaataaggatggtttggccgaccctaaacttctaagaaagattattggaaagcttcaatactagaccttaacttagggtatattcctctcttctagctctaaagtgaagcttgaagcattcacaaattcaaattgggttgcttgctcggacaagaagaggtccacaaatggcttttgtattttccttaagaagtccataatctcatcgaaaagcaaaagcaacacaccatatcaaggtcatcagaagcagaagcatagtacaaagccatggccaacactatgaggttgtttggctacttaccattctaaaagagttaaggatcgagcataaaggtcctgccatcctgcattgcgataacaaggctgcccatgacataacagcaaacccagtctaccatgaaaggacaaaataaatagagattgactgtcaccttgtgatggagaaaatacaagagtgcatcatcaagactgttcatgtttcaaccaaagagcaaataggcagacatactagctaa

SEQ ID NO: 12569 - DNA, 509 bp, Cannabis sativa
tgatattcttgctccgttaacctgcgcaaagggggaggagtggtcggcgatggagacggcggcgctgagatgggcggtggcgaatgccggttgctgggcgaaggtgtcggggtcgaccgcgagctgggaaacggctgcaaaaatctgggcaacggtgatgggcctgtgtgggtccttcccactccagctcgattgctaaaacccaaaccagaaagaaaatgcctctcctcaattctctgggccatgtccataatctgggccaggcccgatggttgtagcacatgcagaggcccgcgaatgtcttccttcaaccccttaatgaaacagccttctaaaacgtgttcaggaactcctaccactcgtgatgccaaggtctcccactgcaatctataagctcggaccgtggtctcttgtttgacggacaacagctcctccgttgacgaccccactggagtagatcggaaacgcagcagcagcaaatgtttcaataatgcccatgaagtaatccg

SEQ ID NO: 12570 - DNA, 836 bp, Cannabis sativa
  modified_base (111)..(111): a, c, t, g, unknown or other
tcctaatagaagggctaaaataactccttaactaagatttcaaaaaagggtaattagaattttttttccccccaaactttgacatatactaaatcatgccccttgaacttntttggccgttaaaaattttccctggactattgagatcattagatttaaagatttttgtctaatgcattgttggttctttccttctttaaccagaaaaaaaggaaagatagaaaagacatatagtgttctccacttctatacttataagaacgaaaaatgttaaaggtattaacactggtggcatactatttttagtgcaatttaatattaggttaacacatttcaatttaataaataatataaaaaaccgctaacaactcacaatgcatcatattgatatggtattagacatttaagcttaaggtgccagcatttctaataactccttagctaacattttaaagaatttggtaaaattacacttttaacaagcgaggtaaatgtgagttaaaatagttcataactattcttataattacatgtagctcaataaatggtggtaagctaaaaatattatatattattttctttttctctcctccttttaattatttttttattatttcattattcttttttgtttttattttattttaattaataaaaactatgtaaaaatataatatttaaataatgaaaaaaaaaatatagaaaactaatctacgtggcaaatgtaaatatatgaggtaaaataaataaaataaaattttggtgagatattttaaaataaagaataggagtgctctaatagcaaaatgatctactgacagaagtagtaatataca

SEQ ID NO: 12571 - DNA, 509 bp, Cannabis sativa
aaaaaaaaaaaaaaaacagagatgtgggcactgatgagggacccaataacacaacccaagtggataggacacatggagatttcataaaaaagatatcttttctctttgaacaattaaaacagatatttttattggtagactctcaatttttataagagttataaattatattttttattttattaaataataatttaaattttgtattttttgaagtaagtaggaaatagaccctaaattaatttttgttaattttcttttcttaatataattaaccctcaaactagtttcttaatataactattttaatcataatattttcaaatcaagttattattgaattttaatttaataataatttttacaaaactcataacttaaaataatctttactatcttttttttttaaaaaaaaaataaatataataaataataaaaaaaatgagtaatactgaaaagttaaagagtgccatgtcatcaatgaaaggagaagatgacctgtaaagacc

SEQ ID NO: 12572 - DNA, 994 bp, Cannabis sativa
atgaatccaccactcctccataatcgccaagtgttaattcagtcaactttgagagtctctgcaaattccattgcatacgacttcctatcaccgtattgcaggattcaatatgtagactttctaaagaaacgggcagtaatcccatttctgaaactaactccaaccttgaacactcctttattttcaaacttttaagggagggatatgcaacatcaatatcagtactactggatggaaatacagtcaccaattcatcacaactgataacatagagcacttccaaagatggaaaattacccataggtaatgccacctttacactcctacaggaatgtaaagcaaagctcttcaaacaggggaaaatgtcaccattttgataatttgtattgatagacgaccaatctaatgcagttatcctttcgagatgtatctcttctaaaactggaaatgaatcatgcgaagaattattacaaaattcattagatacatggattttgcccacaatatcaagctttttcaatgaacgcaggcgctgaaatgatagtaaagacaaacaacaattttgaccgcttagaaaaactacttccaaattagagtacaatggatctactacccactccggcaatttcgtaccttcataacagactatctcgaggctcttcaaatttggatgtggttggagtgcagtaagtatttctctgtccctaatagaatcatttgtttcacaataccatttccattccaatctaagctctgtgagatactctttgtgatttaagttgacttctaaaacatcactcacttctctaacatgctcaagccctgaaatacacaagcgtccatggagattatccaacctacccaactctttgatcttgtacccatcattttcacacaaaacaaaatcacttaacttttgaagatttttcatgttgcatatcctcggcggcatctcttctactgacgaccatttgatgttaagatggcgaaggtt

SEQ ID NO: 12573 - DNA, 508 bp, Cannabis sativa
ttaaaatcaataatataatcacaacatgtaaccataatttcttctagctttattccttataaaccatacttttcttctacctatattttgaaggtaagtctttattgatattttgctataatttttttagtctaatttttatgattggtacgttgtagttatttatgattatttataaatttttaaatttttttttgaataatttacaattttaaaattaaagtttaaatttttattacgactatttaatcctataggtgtagtaaataatgattactttagtaattatttaaatttttttaaaatttataagtaattttaaataaatacaacatataacatcataaaaaataattatattaaaaaattattctgaatattaaaacaaataagaaaatttatgaaaacacccattttgaggggtgtactacaaattttctttattctttatagttttggtttggtaaataggatttatattttaaaagttatataaggatatttataa

SEQ ID NO: 12574 - DNA, 608 bp, Cannabis sativa
aaaaaaccaaaaatataaatataagttatgataaaaaagtcttttattatatttatattatgtaaaaagagtgaaacatatttaatttgtatttctttattatcatttgtactaatttcacaataaaattaaatagaatgtgatagaaagattaagttatcctaaaaattatattttaagaggtactaatattaacaagtctatactataaaaggcatatattattaatcacacataacgtgtcacatcaatatagtattatcgactttaaaatgactaataatatagtaatgctttaagatatatgtaaaattaataaaaatattagaatttagattaatttttacaaaaatactactatatagattttttttccaaaaatattatctttttataaaacaattgtaaaatattaaacagaataattaaaaaataatagtagaataacagaaaaaatttaacataatacacaatataaaaaatatatagtagttttgagaaaaaaatacagtattttgaaaaaaaatttaatcgtatagtaaattaaaaaatatttaaaaatgtgaaaatatatagtcccgcatagtggaccatgagattgaatgtta

SEQ ID NO: 12575 - DNA, 1143 bp, Cannabis sativa
gatcggctcgaaatggctcagaactggcgatgaggaagacaactccttcactggcggtgcgactggtccaggttcattgccctcaatcaacgttcaaggtcaatcttcttctttaggaggagttatgaccaccaatcaaggaatatcaacaggtaagttacctgttattatttcaaatcaatttgaaggagagtgaatattggcaaaagagtcaaaaatatccaaggaatattataatgttgttgctgatcctattcacgtggggactaatatggaaacaagtgaggcttctcctttgcttgtaattgatactaaaagaagaaggacaaatgaggtgggttctaatgggcctgatggagtgggcttgcaaaatagtgacaatatggatattttagtttgtgatgatgatactgaagagggctcaaaaaatgggcttttggtgggtactggttcccaggcccaccgctcattatgaatatactaagcttgaattgtcgggggcttgggaacccacgggcttttcaattcatttcagatcttgttatccagaagcgacccaatcttgtttttctttgtgaaaccttatgtcgaaagaatttggtggaaaagcttagagtggctatcggttttgagggcatggtagctagtgatgctcgtggtcatagtggtggtgttgcgttgttgtggcggtttagtgatgaagttgttttgttgggttattctttgaattatattgatttaaagataaccacggctagagaagctccttggaggcttaccttggtgcattatcggtgatttgaataatgtaacatcccaggcggataaaaaaggtgggcatccgtacccacaatggttacttgatggtttttgcaaagtgttggaggattgtaatcttaacgacttggagctctcaagttatccatttacttgggaaaggggtcgtggttctaataattagattgaggttcgccttgatcgtgttcttgctgctcatgattggactcaacgttttataacgacccagctttttaatcttgaagtgacgatctcggatcattgtcctatccttctccgtactgctgcgatcaatctctaccattcggttgctcagtttcattttgaaaatgcatggctccgtga

SEQ ID NO: 12576 - DNA, 542 bp, Cannabis sativa
atatgtgaagcaactaaataacaagaactaagtaagaaaataactaaatcaaacacactaaataacattagatttgttttttttttatttaaaaaaaaaactgattttttgggcaagtaagcattgaaggagatctctccttaatagttgatcttttctctcttcgacttttatggagatctctcattgttggtagctcttaccatggctaaatattgaagcaaagcttctcattgacatccatggagattgaaaaagcttctcatcagcattcatggtgatcggcaaagcttctacatcgttggtggtggtgttgatttcagatctaggattgtttggagaagctaccgattatggaggagctaacttattttgaaggagaagaaatcattctgggaaggtttgtagataccgtatttttgaaaaagaaagtttttgttttctaattttgtttatttttctaaatagcaataaaaaagtaaactttagacctaataagtgtataatagaaaaaatccccatcaaataagcacataaaccac

SEQ ID NO: 12577 - DNA, 564 bp, Cannabis sativa
accctttcttcaataagaattaatctaacgaactgggggtaaaatggtccaaaccatatccctgaataaatctaacattctaatgtctaactatcttgccctactaattctaagatactctaccctatctatgtaactcaaattggccaaatcgtcgcatttcactgttaccgagcataaaatatgaaaaacctaatatttcacatataacgtacataatacacttaaaatttaaatttatctccataaatgtgaaaataataattaaaagcctatttctaacaataaaccttaattatctactaatttccattataaagttcggtcattacagtaaatcctaaggcttttcaagtctcatcataataatattgacttctcgactaaggctagttaacgccctaaccatgtaaaaactctatcgtttcttttttattttcgaacaattcctttagcttttatacatattttatcggtttctaaaaatttcagtaaacacatgtatatccattggttaaattcaggtttatctagtttttcaaacctagtattaattggatcaga

SEQ ID NO: 12578 - DNA, 591 bp, Cannabis sativa
  modified_base (117)..(120): a, c, t, g, unknown or other
gtatatgaaggaaagaaaaaaaaatatcgaatattaatttaaatttgacgtatatataattttcactacattatatatattatgcattatattatctcattaagaaaacaaataaannnnaaacaaaaaagaaacttataaaaaatttaagctcgtggtatgttaattttacactatagggtatctatttaatctacaaatatatcatttttatgtgctgatgtatacaaagaagaaatataaaaaaaaaaacttaaaaagtagtggttctttaaataaatacatatcttgatatgacgaatgaaataaaaaaaagaaaggaaaaactaaagattgctattctttgattaaaaatatatgtataccatacaacaaaattaatatacaatctaagtttttttattttattttctaaatggtatactatagtacacaaaatgtatataccataatacaaaatgtatataccaccgacagaaaaatttaactgagacttttgtcgttatttgtgagcaattgttataatttggagatgtgataaaactaggaaaagaaaaaaaatgagcagttgttttcaattgtgagaaatta

SEQ ID NO: 12579 - DNA, 584 bp, Cannabis sativa
tcctaaacttgggccatttaacatagggttttttaggaattctttcgagcatcttatccatctttagaaattattgagattcaactatttttggggaccaaacagaatttttgaaggggaaaaagtaggacccagcagccaggttgacattttgtcaacctaggctatttccgatcaagttcagtaaaaagtgttttgggtatttttttgtcataaaaaaagattcaagtaaactcaatgagaaaatcacagtgtcaagtccctaaaaatagggcccaacacccaggttaaccaagggctaggcctagcgcccaagttgacctaaggctgggcccagcacctaggttgacaatcaacctaggacgctatcttcaattgctcaaatgccaattctgatgcaaccattcaatctagaatagtcagaaagagggtaagagacattgtcctcaagtttagaagccttggaagtatcaaaaacaaaatccaagaagctcggttgaaagggcctagtacccaggtcaacaaatggcctggcgcactgggttcttcttatctgaatctgatgttatttcgaccgtctatct

SEQ ID NO: 12580 - DNA, 665 bp, Cannabis sativa
tacaatatttttaatttgtagttaagattctgtggttataataataaagtatgcaaattattagaaatatatatcattaatcatttttaaaacaaaaaggttgtcgtgaaattaaagtttaaatatatacattttatatagatgtgattatatagatgtaatttttatttttaaatatataaattaaattaaatttttgtatataaaatatttatataatttttattttaaaaaatatataataatatcaaatctatacttttaatatatttttctcccaaaaatatccttacatttaaaaaaaaaaaaacctctcttactcttccactctacaacgttgaaccctgacccataacccttgccatcgaacccagacctagaaccccagtcataagcccctgttgttgtcttctctcattgtctctctctaaattccatcgtctccatctcgaagttccaaaatctacgagcttaattaccttgaaactcccgaaatctccacccatcgccgaagttctcaacccattgcttgttttatgtgtgttatattctgattttcattattttacgatatttagtgatgtatttgcaaatgatagagcaaatttgaaattagggatggagtttagcgatattctacttatttaacgatgtatttgcgatat

SEQ ID NO: 12581 - DNA, 509 bp, Cannabis sativa
tttgtacatactaaaaattgcctacttttcttttttatccaatcacatttagcaaaagtgaaaatttagtaaaaaataaataaataacgacctaaatactgtaattttgaatttataaacaatataaatttaataatttttttagcaaatgaataagtatttaatatttataaaactgtaaatttttttaatttaattagtttagatcatgttattatcttaaacaggatacatataaaactcaaatttattgagtacggacgaagacgaaacttttaaaaaattgatttttttataaaaattagatacttatactgttaaaagtaatcattgaatttatttaatattcaaacttaatactttaaatacttatattgttatttttccataaaaaatagtaaatattttacaaaataaacttcaaaaatagcaaaatagggtgttcatgtgtaatttgttaagtgtgatatgatgtattgtgtaagattattttgtaaaacattatttag

SEQ ID NO: 12582 - DNA, 702 bp, Cannabis sativa
aatattaaataatttatatataatatcgaaatatttcttattaatacatgaagttaagacttgtattgtacggagaattaagatcacttagccatggataaaattgtctgcaacatattaaaattatagaatttttaatcaacgcttgctagtgtgcttcactgatacctgttattctgtgcaagcaatctcgattcagattgctgatgtagtataatatctaagtgaaggcgttgtatatgatagatattatatatgacatggatcgatatgtaattaagttatttttgcaaatatgtcatttactataaagacttaatttatattataaggatgatcaatgatccgcctaaatcctaagtaatcatgaactcctactcatgttattagtttgttggattcatttgttaaagtttctcaaagaagatgattcttagagcttctattttgggaatctaataatatgaatggatataacatgctctacaattatagatcctaactttcctaacgaattgaatgttggttccctttaagtgttaattctggaactgaaaatttgtgcacaaatttaaattgcatctaaattatacttttactagtgaattaatgtacttaaggataaagatgaaattacaagggtaaaatagtaaattgaccaaaactaattacgaacggagacagaaaatgctaatcactaga

SEQ ID NO: 12583 - DNA, 682 bp, Cannabis sativa
tgtaatttaatataaattagtcctatcaatactttttacaaaacataatacaaaataggataatgcttcaataaaggtattgaaaatgattttttatagagtcatttttttaatagtgtcattgcttcattttatgtccatatttaattttatttattatttatttatttttataattatttgtcaaaaatatttgaatttttggtggatatgatctgagagaagagataagtacaaaaaaaattttttgcatttttttttaacttcgccattaaagaatttttgagtctcaacctctatttttctttaaaaaaaaaaatcaaagttcttagttttggtttttttataagtaacttttaagaacttttagagaaaaaaaaagaggagaagaagaagagagaagtgaatgataattttttttttaagggaatgatattgtttttaacaaataattatatataaataaaataaataaaaaaataatatttaatggacataaaataaaaataatgacatatattaaaaaaagactaattaggatttttgctctctgagctttcacatgtactaaatcatgcctcctgaacttttaaggtcgttaaaaataccgctaaactattaagattgttaaattcaaatatggtatatgtcaaaatttagtggacaaataaactccacatac

SEQ ID NO: 12584 - DNA, 998 bp, Cannabis sativa
tttaattctaatttatgatgacaaagtatttctctaaaaaaaatgatatacgtaatatgtaggcaatattcactagtgtataacaaagtttatacttgcaacaacaaaaaaacgtgaggacgggaaaagagtagttttcatttttggataaagaaaaaaagatgtagtccagcctcagaaaagaaataggataaaccaagaacttttgtatcatattttgaaaagaaaaaaaaaaaaaagaaaaaaagaaactttctgtgaaagtacaacttttggctttcggaaatttcaaaggacggtttttaattttcatttatttatttatttttggtattaattataaatatagctttctggttttcttagggacaaattgatgaaaaaaactagatggagctataatgacaattaaaaggggatctcatatctgagttctcctacacgacatcgttcaattattccatagagatagataagttttggcctctacttatttttcggtttgatagatgtacatgtccatagtcgacacaacggaaaattgttttatgataatgacattcacatagataattagcctgaaacttttatatcatttcagtttcataacacactaaattattgactaaattagtatgcattaaattttatattatcactagtgatagattttgaatctacaccaatttagtgtagattttttttttttacatttaattcttattttattttattttaaaaaataatattacattttagttttcaaattaaaatttatcacaaaaataataattgatttataacactaacatatttgaaagtataaaataacaataaaaaaaatactaatattaaataaaataaaaataacacaacataaaactaaaaaaataacattaaattataaaaatattgactatatgaactttaagtattttaataatcttgatattgttagtgaattttttttggcgaagctcttgttttcccattttgaa

SEQ ID NO: 12585 - DNA, 520 bp, Cannabis sativa
gcaacaaatcgctactagtcgctaaattttattctctacttcaccaaacactacttctaaaaactatcgacacatatcgcaaacaatatcgatagacatcactaaaattgtaagtagataacaaatctttcctagtgtcgtaaatttcatcgctacatgtcgttaaaagtcattcctggcctctagcactttctcatgtcgctagatatcgataacgacatcactaaaaatcgttaaaactaaaaaaaaaaaactaaaaaatgcagaattcgagcaaatcaagttttaggaacaaaacaaccaaataagaagaaatatatgtgtagatttatttatatcaacttaaatacaataaaatctaacaataattactaaataaattacatacttaatatttttttcaagaattatatcgataagggagtttgggttgttcctacacacttggttgtcaagctaagttgatggattccgacaaatggtgctctagcaaaaggtgtgtgaccttctagagagagag

SEQ ID NO: 12586 - DNA, 867 bp, Cannabis sativa
gcatacttaaattacatttttttttacatacataagtaatatgtctagcacattatttctcagcgtcatattattattcatataattaagtattgggtttcatataacttaaagtaataatttttaaaaaatatcactaactaattgtagagtaccacttttaggtggtgctagacaccattagtgtccaataataatgctcttttgtttaaggaactaaatgttaaaatgctctttgtaactaagctacactcctttcctttggttgaaggttattaattaacaaagagaaaatgaaaattaacaaaccaaaacaataagatagtaatatgaaagaatgattttttattttttattttttatctctaaattattataattaatttggtgtgctcctgtgtaacttattatttaaattttgttttgcgtatcataaattatccataatttttcaaaaactggaaaattttaaatttataactaactatactatacatcacataaaaagtgaaaaatcataatttttctcagtgccaaaaatataaaaaacaatcttaaaatatataaaaaaacactcaagcaacatacataatccaaaaatctaatcatgttactaaaagtgttgtaatgtaaaaaatcttaattcatttatataacttctgttaaattaaagaagaaaaaaaaaacatgagagtggatcgatggtgattgctcgaaaagttttaattttttaagaacacacttttttcttatatatttctttgatgaaaaaagaaaatacaaaaatcctaatattttttaaaaatcactacttatttataaaattaataataatttagtttgtcattatattataaattaacttat

SEQ ID NO: 12587 - DNA, 687 bp, Cannabis sativa
aattactaaccttggagtaaccaaaatcgcatattttaagacgaggtgttggacttccatccagcagcgtgttttcgagcttcagatccctatggcaaatttgctgcaatgaagattttgatcagtttttcatttggaaaagagagtctaaaatactatgccaaacaaagcaacaaacaatgtaccattgaatgacagtaactgactccagaaagtagctgctggaagaaaaaccttgcctgcccaaaatatcaaaatttttcaatcatcaaacatattttgtgataccaagagccaagaatctatcaattactaacctcatcttcactaaatcttccagcactgcatatcctttcgaaaagttcgccaccagctgcatattccatcacaatggctaggtgtgttggagtcaagcaaacctgcagggtgggaaacagtttcttcaacattatcctgataaccaacatagcttgatgttctgtttttttacttgtttttatcttcttttaagtttgatcagacgggttttcgatgaacagaactaagacttgttctttcaatctatttcaattgaattatttattccttacctccttgaatctgacaatgttaggatgcctcaaggacctatggtttatgatttctctttgtacattctcatcaatctgaaaccgaaatgggaatcat

SEQ ID NO: 12588 - DNA, 885 bp, Cannabis sativa
aggtctacatgtctataccacaaggattaactcttccttcttctcttaatgcaggttgcaacatggtatgcaagctacataagtccatctatggcctcaaacaatcctcaagacaatggtataaaaagctgtccgaagccttactacaagaaggatttaaacaatctcaagccgactacaccttgttcaccaaaggaactgaagacaacttcattgctcttcttgtgtacgtagatgacatcataatcaccggacccaacatcgccatcctacagcagctgcaagattccctagatcacagattcaaacttaaagcactcggcaaccttaagtactttcttggctttgaagtagctcgtgctcaagatggattgtttctctctcaaaggaaatatacaatccaattactagaggaatatggatacatcaacagtaagcctagcaaaacaccaatggatcccaagctaagacttgacaatgaagatggagaagccttgaaaaatccttcccattatcgccaactagttgggaaacttctacttgactttatctagacccgacatcaccttcgctgtgaattccctcagtcaattcatggccaatcctcggacaactcatctccaagcagttcaccatctacttcgttacctgaaaaacagccccgggcaaggccttctctactccaaaacatctacattacatctacggggattctcagattccgattgggcatcatgccccgtcacaagacgatccacaaccggcttttgcatttttctaggagattgtctcatctcctggcgcacgaagaaacagcccaccatttcaaaaagctcagccgaagctgaatatcgcgcactagctgcaaccactagcgaaattaca

SEQ ID NO: 12589 - DNA, 813 bp, Cannabis sativa
ttcgaccccgaacgcagttcggccgaaaatatctggttgtgactactgcgccgacttgttagaaaatacctgcagagggaaaaaacaagtatactatataataatatagtccataagcatgcaacaatattaaaattaaaaagttaccgtcaaaaaattacgaaaataccccctggctcaccaacagggtcttagcatatcattaatcaatttaattcacatatattaaattatataataatataattccatattaatacatatttaactagttagggtttgctaatccgttttcttaatcttaggatattacaattatcccctccttatagaaatttcgtcttgaaatttactggaacaactccggatatttctactgcatatccgtctcgagttcccacgttgcctcttatactttaatgttcctccataatacttttatcagtgcaattgtcttgtttctcaagactttttctctcttatcaagtacttccactggttgttcctcatatgatagatctggttgaagttccaagcttcgtaaatcaaaatataggacgggtctgagacatattttcgaagcatcaaaatgtggaacacatcatgtacagctgccagggctgggagcatagccaacctgtacgctacttgccctatcctcttaaggatctcaaaaggtccaatgaacctcgggctaagttttcctttcttaccaaagcgtttaatgcctttcataggtgatactcggagaaataccatatccccgatctgaaaatcaatatcgacaccttgaatctacataactcttctgtc

SEQ ID NO: 12590 - DNA, 583 bp, Cannabis sativa
attccccttcatttgtagtgggctagttagtagtcgattggtctacagtgggcaggttagtagtggattggtctgtagtgggctggtttgtagtgggttggtttgtagtgggttggtatgtagtggactagtctataggttttgtgacatgtgtttgactttgtatttcatttgggtgatatggttgactttgtatttcaattgggggtgcatcatcccctgcatcttgaacctctagatcatcccacccttcattctcccgaaaagtaatatagtcatcagtgcaatacccatcttcatcttcatacccttcgccctcctctatagaaccaccctgatgatcttcaaaatcatcctcatcatcttcaaaatcattctcagatgaatcgtcatcactgagaataacaacctcaggttccttacatgttttattaacatgttttcccttattcatgtttactgggatccctaccacatcaggcacaacatcacaatttggtgggagttcctcaatcacacagtgcttgagctttggggctgttggtacatgaggaacaatagttggatcaactttccattctag

SEQ ID NO: 12591 - DNA, 559 bp, Cannabis sativa
  modified_base (441)..(443): a, c, t, g, unknown or other
atttattttaattatcaaaatttttttatatataaattatgatttggtagctatgagtgaaatacaaatcactcacatatgagtgattgaaatatattaaaaaaaaataattttatacatagacaaatataaaagttttcaaagtaaataataataataataataataataataatacataaggacttgtgaagaaaaaaacgtgtggctctttgcctctttcaatgcttcaatagttcctattagtagaaaatctacaaaaatccatgaatgagacactaaagttagattttagaagtttgttaattcttaacaaattaaatatgattgactagtaatagttacctttttttttttaaacatgaaatatcaactttattaaaataaaacattcaaattataaattggcatgaaagtctgccagaacatcaacatcatgannnctacgatcagaatagaaacaagaacgcctagctacgaagtgggcaattttgtttgctgatcgtctaacaaaacggaaactgacattaggtaaagaggataatagaattttacaatc

SEQ ID NO: 12592 - DNA, 601 bp, Cannabis sativa
taggacctacatattttactaattgataatcaattataaaataaggagtactatcgtcaacctacaatctctttagtcaacctccaccctcgaaaacacatgtcgaaatatttattttttaatttactgtgcagaaaatacgtttgaagttttttgaacgcgcgtggtaaattagaatatcaaaaattatattttcggtactgtaaactattcggaatttttcaaaaatttacaaggatgataatgtaactatatcgaataccgttataaaaaaaattgaaaaaaaaaatatttcaatatgtgatttcagacgtaaaaattaactaaaaggttgtaataagatgttgtaattaacatctatcttataaaatattaagaatgctgaaattttaatcattggtttgtgtgaaaatagttaccattggtccatggtaataatctataacgtcacgtgtaaagacaacttatataattatggcttttttggaaaaatgttggatgaaagcaaagatagacaggcatgcgtaaaaaattttgttgtttttattttttcttcatatatataaaaaaaacaagagcaggtttgtttggtcttgaaaca

SEQ ID NO: 12593 - DNA, 570 bp, Cannabis sativa
  modified_base (416)..(417): a, c, t, g, unknown or other
aaaaataatagaaaaatctataagattgcgtgtatcacaaaatatttaaatcttatttttaataatataaattattcaaattttttcaaattttttagagataactctaaataactacaattatactaaaaaaactttcataaatactaaaataaataaataaaaaaaaggctaattaagatttttgcccccaaactttaacatgtaccaaatgatgcccactgaacttttaaggtcgttaaaaatgcctcataaattatcgagatggttggatttaatgacttttgtctaattttaataaaaaaaaactaatatgaatgaaagttcaggggacatgatttagtacatgtcaaagttcgagagacataatttagtagatatcaaaatttgtggagtatagtttagtacataaacanncactaaaatagtaaaattgaataaaattagacaaaaatcattaaatctaacaattaaaatacaaattttttaacggaaaaaaatattcaaaaaatatgatttacatattaaaatttaaacgataaaattcttaactagcctaaaaaaaaaaaa

SEQ ID NO: 12594 - DNA, 530 bp, Cannabis sativa
aaaaattatactaaaattttatatggtttgaatttactctttattattttatttattttaatttattattagagacataaaatagcaataattaatttttttattactagttatttgaaaaaaaattatttcataaataataaataatttagtattaaaaaataaccaatctaatccgcactgttgcaaattagattagatttgaactattgtgcgaattagattggatccaaaatatgaaatttgcacttaagtgacatttggttggaagtaataaaatggaatagaatataaaaggaaataattttcattctatttctttgttttgttgcatatttaaatattgaaatgtcattataatgaaataacctttgtactattttagtagaatgactattctatgaaaaaaaaaaaaattaataatttttttatttgtttttaagtattttaaattttattccattcttattctcattcttatttttattctcatatttttattctttttaatcaaaggccactttaataca

SEQ ID NO: 12595 - DNA, 700 bp, Cannabis sativa
accacaacaaaagaccaaggctgagagtatattcttgccaactcctatgatgacgaaaagggtagcataagtgctagtatgaatcaaaaagtaaaggaagacctatttcttgatttgaaccaaactcagcaaagcgatttaaagatgtgtcccagaccaacatttcaccatctagtatacacctgacaacattccaaggaaacatatgaacagcaagcaaagtaagactttaagacagtaaatttcattgcatatgtttcctttactttaccagtatgcataaaagcatataatttactaatgtgtatgcccacttgatcatcctccaaagaaaacaatcaaatgggaaaaacaaagaatgaaggatctcagactcctataattcataattcatttttctggcatcctctgtctcttaggcaccaataccatcattcttttacataaataaataaaaaattgtttgcatctgatatgcaccttgaaatatgcaacagccaagcaaccataaatgtataatcacaacattatttgataagactgtaagtatcataatttcaatatttcttctagtgttaatttctttcagcaaatcaagggtgcgcaaatattgttagttctacctaagctttcaaatcaggttccaaacagtcatctagaaaaacgatatatgcatatgtttatatataaatatatatat

SEQ ID NO: 12596 - DNA, 695 bp, Cannabis sativa
cgacacttaggtcattagatttgaaaagacaataatgttatagcatgtgatatctcaccccaacacaacacctaccaaagtattcactcacttaattacataataaatacttggcctcacaagtgtcgagcattgctataaggcaccagtagtgcctagcatcttctcgatatgtcgcgttgcgattgactagcgatactcactaaaagctattatattaaattatatatgacctgatacttagttggaccaataacgatattgacacataagaaagtgctaggcaccactggtaccctttaacatttctccacaagtgccataatagtattttatacctcaatttgtatttaagagatgctaaaagatattggggaagatattgacattcacgattggttagcgatattgggaaagatattatttttttaagttatacgagatttgatatttaattacaccaatagcagtatgacaccgatgagagtgttaggtatcagtggtgccttttaataattctaaatatttttttaggtatcatattactattgttacaatcggtagaattcaatattaagcctctcctttttttataaaaaaaattatcaagcataaataaataaataattatgctcagctccctagtgactagtattttatgccttaaattgtgtttatgaggttcttactttatt

SEQ ID NO: 12597 - DNA, 1120 bp, Cannabis sativa
aatattctccatttgctatgtattttgacaaacaacttgtaaaaccctaattctatataaagggccttaacccaatgtgaaagggacttgatttcatccattctacacatgcacttaagagctcagaagcactaagacattaaactctcttttttttctcatcacttcgtaagtctctaacacacattctcatcattgtaatactgaagagagccataattagaaattacaaggtttcagcttgtaatctgtatggtattatctcaagagtgaatacaataaaaggggagtaggtcattacctggtcaaaggggacgaatctctataaaatcttgtatctttcatatttattatcattttgcacgtgacagtcataaacgatattagattctagtcagactctgcgtcaattggctaaattcacagtcaataactacttttctataatccatcttgtgagaaataaaactcgaagttgacgtagctccattatagtcacgatacagagagtgaactactataaattgttgtgtctctcttatttatagttaacttttaataccttctcaccaatctagcaaatgagtgtggccaaatatctgtgtcaacagttatgaagttctataaatacatcgaacattcactggagtaatatgtatggagttttccacctttcaaagattctatctaatggagtataagttttaaattattgtatatgactcaattgtcaagaaaagaaataattcttactgccttatttcattacgtccataaaggtttacttgttattgtttgtttctagtttgtgtagaatttcggcgacatttacttggttcctacaaaaataagaactggcctttggcatctccaactccaactagacgactatgggacaaaatttcatgccagctagggggagattcaacaacacaacaatttttatatttatattgatatgcttaatattattattttacaatttattatattttttattttaataattttatttaatttttaaataataatattaagtgtacgaatataaacgctacaagaatgcacataaaaacagtctatattaataattgattaaatgacaccttaaatttattaa

SEQ ID NO: 12598 - DNA, 657 bp, Cannabis sativa
aaaaaaaaaaaaaaaacacactttgaaatatgattagatatgtgattatttatatttttttgagtgttctataaatcttaacacctatctctccatttatgcttaactttatttaccaaaacttgacagtctaactccaccaatgcaataggaaattttactgtagaacaccaaactaaagctttatacaaggataaggcccctacataaattagagctagtctgtttgaaataaaaactaactcttgatttgtttttgtcaactaaggcatccacatttaatttatatttacttggaggaggaaaattgttcatttgacttgaaaactcatctcgtgatgttgagtgatgttaagctccttgatcattagctaagagtgaataatttataccaaaattttgaaccatgaacctaattcttcacatttgataaatgaagatttttatttgcaaaaattaggtagatttttttttgataacctgtataaggcagaaattagattatgagaaatagaaggaaaagttagcaaaaagagaaataaaaagaaatctcttatatttttttaaagaaattttttaaataaatagaaaatgggttgctcatttcagaaaataaagaaaaaaaaagggggaattttttataaatatagtttttta

SEQ ID NO: 12599 - DNA, 738 bp, Cannabis sativa
aaattgtaacctatgaagacgctgacacactacaccaatggtagccgttttctatggcagcgtatcctcttcataactgcgaattacaaagttccagcttactcaaaagacgactttcacacactgatgcaaataactctattcttgcataggagcttgaaacaatcctacacaaggatgctcaaatattaaccattgattgattaactcgaatatgcctaggaggaattgattgtttttctctcaagaaaaaaacttctaaaatcacaaaaacacaagtcaatttatctttcaaaacacagaacacaattttcaaaagattgctagatttcttaaactagaaataaacatatttgatcaggcaacaaaaataaacttttgataattaaagagaacaaatccccaaaaaatttcgaaggaaatcaaagcgaaccgaatcaaaagccttagtgaaaatgtcagcaatttgtttatgtgtttcaatgtattctaagacaagaactttattttcaactaattctcttataaaatgatgacgaatgtcaatatgtttagttcgtgaatgttgcacatggtttttggaaatattgattgcaatgatattatcacaaaagataataaaagtgtcaagatcaaactcataattcatcatcatttgctttatccacaaaagctgagcacaacaacttccaacaacaatgtattcggcctcagctgttgagagagagagagagagag

SEQ ID NO: 12600 - DNA, 911 bp, Cannabis sativa
gataatagagtgtgaagcttctgtattaactatttactctgatatttggttatctcatctcttctaactagatcaataaattgaaacacaaataagaaaaaacaaaagaaactggctttgctgcattacagaaatccagtacttgttatctggtgctcattgttgtcttgtttcaggtggagaggatgattccaatgaaacgactcaatgtgtttactccatcaacccgaggttgaagcatttctctgactggttgctggacattatagctaccggagatttggatgcattcttccctgcagcaacacgtgagtatgctccattagttgaagaggtgtggaaggatcctgctatccaggaaacatttagaagaagtgatgagctccatttcctccctgacgtggcagagtactttttaagcagggtactttttttttataacattttagctagctcctcattcactttctgcattttaggtaaccttttcggttgatctagggtaactaaaaagttactttagtttaatgatagcaataattgcatggcgtcttctgatgttaattgcatgtttctgtaagcatgatattttctacaactgaatgcaacttattttatttagttgagtccaaagtgtattctccttgcatggtcttgtgtgaatgcaatgtctcaatatcctttataaataatgcagtgaagaaatttactcaatgatcatacagtacccggtattaaagaaatatgcagcctctttctatttatttatttttcagtttttactgatgatggaactaatttttaattaaagaacttggatgacatattctaagattaacatagagaaacttattggtgcatgcatagctatttctgttacaaggctaacattttctagtcatcctatggag

SEQ ID NO: 12601 - DNA, 623 bp, Cannabis sativa
attttaatacataaaaattaattggacattaacacattgtgttagctttaataactaaaaatatactcgtttttttcttatttcaacaactaaataacaatatgaaaacaattagacaacaacccaggccatataatatataaaaaagttattgggcatcaacaaatctttgtgttaacttaaaaaaaaaataaaataaaaaacaaactcacacacacaaaaagaatcttaaaaaataaattaaatttaaaaacaactctaaatcacttgtacatcaactcaaaaataaataaatatatactcatttactataatttgatttgatatataaacttggttatattttaggattatttcataaagaggggtgttaattatgatctcctattgcaacctctttagtcaacctcaatacctaaaatcacatgtcggaatcttttcttacgaatctgtgtagtttttttttaacaaaaatacagaaggttattttttttctttattttcaaaatatattgttttcacatttctattataagaaagtcacgtgaaaaaatagtttttttaaaaaaaaaatgaaaaaaactaattaaaagaaaaatagaataaccaaaaaaaaaaaaaaa

SEQ ID NO: 12602 - DNA, 590 bp, Cannabis sativa
ctcaaatagaaaaagaagcaaggtgtatggtagattcttcaacaaaagaagatgatatggtggtcgttcgattgacaaaaactcctctttttgacacggtgcatagaacagtatatctagatttgttaactggttctataggttgtgaatgtgaatatttcccaacctatggcatcctatgccgacatatattctgtgtcatgaaaaaattcaaagtgacttcaatcccaaagtctttggtcattacacagtggaaaatacatgcacgagaggtacaagaaataccagacgaaagttctacctgatgcagcttcacatgtcgtaaagacaaaattcgttttggtattatttcaacccagctttaccaaatttctttccttgcatgtacgagtgacaatcttttgaagttggcaaagaaggaacttgagcaattaatgtataggctaaaaaaaacttcattagaagaagatggatacgaagaaccaagacaatgtgacaagaacatggaatacgatttgaacaacccccgatttagtaaaaatgaagggaccgaaaaagttgctggtacctcgaggcaaatgaggaaaaga

SEQ ID NO: 12603 - DNA, 541 bp, Cannabis sativa
ccactcaaataatttacatacataaattttgaatatccaattatttttcgtcagggtttagggacactaaaattttaaaaataatgagtttagatacaaaattatttcaatagaatactaaatgctatcttatttatgtgagagtttataatatctcactgtttttagtgtgacactatagattacaccaaactttctttttctttttttaacagtaaaataatatgtttataattaaattttatatttatatacatattatagtgtgagataatttaataaaataatataataataaagaataaattttagtgtaatttttagtgttgttgttagaattagaaaaaaaattaatgttgaaatggtattcttttagtgttgatttaacactaaatttaaatttttccattagagttgcccttaaaaactattattattgttgttaaattgagattttttttaaaaaaaatagttaaattgtaaaattgacacgtaactaattattttagattttacgaagtatcattattgaattgtgccc

SEQ ID NO: 12604 - DNA, 761 bp, Cannabis sativa
agtacaccatctcttaaaaagtcaattagcagaattttttatcttttcgttgttcaggaaaaaatttagtgtatttttattttaatcatatacgttgtagttatttaagacattttgtaaattttagaaaaacttatatgaatagtcttcaagcctcttttaggcttcccccaacagatttatagttcttatacacgaatacatcgtattttagctgcttcctgaattgaagactagttctgcaaaccaacacaagtatttgtagaatattttgtcatttcttgcacactttccaaaagttcactgatcctaaaattactctaagtcaaggatgcttaactttggagttcttaagtgatagactaccataaaataaaatgcattttgttgatataggtagtactcatcaatctatttaagtcttttttaattgtgtagtctcatacgtacacagtcttagaatcatcacacttgaccttctttaagtaatatagaattgcacagtttactcgatatttcttcttatagatcatgagactacatactgtcataaagaaaaagcagttatctatgcaacaaaatatttgaactttatttcgcacaataaattatttaaaagattttgaaaacttaaaagtactcctaaataaccacaatgaatgcaaaaaaaaaataattaaattaaaaattctcttaaataccaaaacagattaaaaatgtttcaaaactacctattgagggtatactataaaactacccta

SEQ ID NO: 12605 - DNA, 506 bp, Cannabis sativa
gatgtgttagtcctagcatgttgagatacatggtttgctgctaaagtacttgcactcatgttatcacaccaaataataggtgcacttggaagattgactttcatctctttgagtaaaccctgcaaccataatcgttcggcggcaagttgagctagagctttatattctgactcagtgctcgatcgttccactactgtttgctttttagaggaccaaagagtctctcatgaacacacataataccctgtaattaatttgttgttattttaacaagatgcccaatctgcattagagaattcagtattaaaatttgtgtcctaatagcaagcatttaatggataatatattatagaatatataaaacacaattataagataaataaatacataaattattattagagatggtataatcttgtaaggttgtacaagagaatcaagattatacaatatgaataaaacaaattgatagtgtattaaatggatctttaatatagaattatcaa

SEQ ID NO: 12606 - DNA, 615 bp, Cannabis sativa
acaggtctgggaggatatctctatggatttcatcgaaggcctccccatttctaatgggtttgactctattatggtggtggttgatcgactcactaaatatggtcactttgtccctctccgccatccttacacagcccctacggtggccaacacctttgtcaaagagattgttaagcttcatggtattccgcgctctattgtttctgatcgggataagattttcatcagcttattttggaaggaattatttcgtttacagggcacaacgctgaaacatagtaccgcctatcatccacaaaccgatgggcaaacggaagtggtgaatcggtgccttgagacatacttacgctgctttgtgagtttcaaacccaatcagtgggtcaaatggttaccatgggctgaatactggtacaatacttctcaccattcttcggctggcatgaccccttttcgcgccttatacaaccgtgatccgcccccatactctgttttgaggcggccagcaccaaagtttcagcagttgaagaagtgcttcaagctcgtgattctgtgtaggagttgctgaaacaaaatctgactcgagctcaacaacaaatgaaggcccaggccgatcgc

SEQ ID NO: 12607 - DNA, 556 bp, Cannabis sativa
cttgtcggtcgtgggtcgtcttggtcgtgggttgtgggtagtcttggtcctgggcgaaggaatttggtcgtgggtcgtcttggtcggtcggagctcgtgaacagtcggggctgggaataacaaagagaggggggagggggggaagttagacagagagagtgggagaagagaatttttgaattgtaagggtaattttgggttttagggtgtttggagaatatttaaaatatttgcttaaaggtagaatattaaaagaatagtggaaatttttaagtatgttttaacaaattttgcttatgaaatattgttcttaactaggagatcatacataatgtctttgttttgtctatgtataaatatgtatatatacaaaaagtatatatatttaattaaacactaataatatgttatttttgtatggtagagattttttttttacattatatatataaaaaaatttatatcttatataattttgaataaattataatgttaaaaacataaatttttttgagacagtgcatgttattattatatcttataggaaataattttt

SEQ ID NO: 12608 - DNA, 1062 bp, Cannabis sativa
tagctgaactgaaattactacaaacctaattcttatttagtttgaatacacaatccaatcaaacataatcaaaccaataatcatcaaatttcatagacatcgacttcagcaaggacgagcgaataagaacggccagcgtctggcctggctttgcggctcgacagagaagagaggaaaacgagagagagagagagagagagaagagagattgggagtgggagtgggattttttggggttcctagggtcgcagaccaccatggtggtggtcgtttcggaagcacgtggctgggacgaggccagtgaggcctggccatggctgtcgcgaaggagcatagcgagatgagagaaagagggtattcggagagagtgagaagggaagagagggatccataattagggtttccaaatgttgtttctataccctttttctaattatttttttattatgaaactttttttttaattttcctgtaagtgtcggttcataaccgagactaaaagtccaaatgatcttttagtctcggttatgaactgacacttatactcaatttctatgtatatttttttaaaaaaaaaaattggtcttagttatacttttagtgtcggttaattaaagtcattataagtgtcagttataaactgagaccaaagagttggagtagtctttagtgtcagttttttttaaaaaaaatagtcacttgaaccgacaccaaaagtctattttgtagtagtgtgataagtttaatttccagtaaaataaaaaaaaaattgagccattttttttccttctaaatatataaaaaaaaaaaaaatggaagttcattaattttatttttaattatgtaattcttttattaatgttagttatgtatgtatgcgttttatggaccttttgcacgtattaatgagctccacatggttatttgtttttgttacatttatttttggatgttagacgatgagttatttttgtttgaagaggttctgagctaattactgatgtctattcttaagtgattcctattactttttcaacaacacaaataaataaataaatatat

SEQ ID NO: 12609 - DNA, 966 bp, Cannabis sativa
tgtgtatacaactgtgccaccgcaatagatatcacattccttcatatatatgatgcaacttcatctaatatttatataaaataaatctacgtgttacgctcacacgtctcttttacatttaagaccttattggagtttatctcatttttggttatcgagtccaacctacttatgccttactcgcataactctgatcacttattcactaacatattattcggtatttatcatagcacatacttaaaacaacaatcctaattcatgatttcacaatagtaatcaaataatatataactgcgacactgtgctatactctatgtgcttagttttgctatcttacctaatttttagtgcatgtggagaaatctcaattgaaaggtgatctttaccaagtgctggtgtttctagtcacaattcttgggtttcacacaatagcattaatctcaaaataacatttatgaataattcacaattagggctccaacactggaccatgtaatagggcttaaaatgagattttcaatgatttaaataacgtttaaatcaggattcagagccaaaagtcatgtctgaaacaaaacaagaaaaattacactatcgatgtggggtcgtcgcgacaagatcaatggttgccgcttcgagattggccaggggcattcttgtgtttttggttcaagcttcgccacgacgaccatacttttggtcgcagcgaatgggcttgaaaaattcaaaaatgtcaattttacacacctaagaacattaccaaatcactcaaacttcatatagctcatatagattaattcatagcatcaaataacatatacaagccaacatacataccctaatggagttcaaaatcacacaacttatgccataacttccaaagagaacaaagtaaaactcctttttactcaaactcaaaatattagcagtaaacttagaataagaaaaattgacctaatattc

SEQ ID NO: 12610 - DNA, 569 bp, Cannabis sativa
aatattaacttaatatagaatatggggtgtctacacatttggtatggtgtgtttcatctaaatacaaattaggtaccatgtattttcaataatatttatttggcaccctgtattttaaaatcatacatattttgttccctaaatttaaatttttttgataaattttatcaatacaatcaaactgtctaaaattttatgaattttgaattcaaatttaattatttaattacatataactaagatctgtttggctaaattgataaaactgtattgattaaattttactttagggtactaaatatgtacaaacttcatatttggtgtcaattttaaacagacacttatacctatagtgccaattcatagaatggagacctattctacagtaacaaaaagtcaaaatttaagtataggttataaatcgagactaatgagttttgctatcgttttaaaatcgacacttatagtgtacatatatatttttccctttttgtctcggtttaaaatttaaactaataggtataagtgtctgttttaaaccgacaataaaaatatatttcgaaaaaaaa

SEQ ID NO: 12611 - DNA, 660 bp, Cannabis sativa
  modified_base (336)..(358): a, c, t, g, unknown or other
tgaagacgtgccacacccctagtggtctttcttacacaaaaaacaacatgcatgcaagagtcatgttaaatttttatgaagaaagcttcggcttctgcgaaggaaggttgaagttacataaaaattcaagcttagccttcaatagaaaagaccaaagggagaaagcatcacggggagtaaaacagatttcaagtagtccttccattttgggaaggagggttgaagatgtgtcgtacccccagtgatctttcttgcacgaaaataatgtgcacgcgatagtcatgttgaatttttatgaagcaagcttcagctttcgcgaaggaaggctgaagttgnnnnnnnnnnnnnnnnnnnnnnntgcttgaaaagatcaaagggaaaaagcatcacaaggagtaagacaaacttcaagtgatctttccattttgggatcgagggttgaagacatgccacacccccagtgatctttcttgcgcaaaaacaacgtgcacaagagagtcatgttgaatttttatgaagcaagcttcggcttctgtgaaggaaggctgaagttgcataaaaattcaagcttagacttttcttgaaaagatcaaagtgagaaagcatcacagggagtaaggcaaatttcaaggattccttctattttgggaaggagggttg

SEQ ID NO: 12612 - DNA, 679 bp, Cannabis sativa
ccagcaggaaaaataaaaggaagatcacaataatttgattttgaagttcccctcaaaatgaagggtacatctccgtcaagcttcccttaaagatgcttgatgctccactatccatgtcaaaacaattacaaggtgttggagattcctagccacaaattttagcaggtaatctctaagcttttgttcttttcttcctttattttttctagtatgaattataatggaactctaactttctctctctggtttttctctctttttctgcggttatctctttatgaaaaggggtgctgctgctattttctatctcagacccgaaaaaccacacaccaaaaaatggataggttgcttcccttacatatagtgtcgttgttgactgtgatgtgttgtgttttgagctgagaaaaacagttataaaaacgttaattgattttctttgagttgctcaaagtttgttggagtcttgaaatattgttatttacttcttgagttgttattgtaaagagcttataagatttaagcctatgaaactgaaccgactactctaagagttataatactttatttccttgtaaccttgtttaaggtatttttctcatgtgacagttagtatggagatttatccaacacttcggtcatcgtttgatacaaagtcttttacttcacttcataactaatt

SEQ ID NO: 12613 - DNA, 559 bp, Cannabis sativa
acattgcagacaccagaggtgcttttgttcaggtacgtatcgcatcatgcaacacatttctcttagtcaatcttcgtgcccgaaaatatatgctggaacactttttttttcaaattttctttcgtagtggtgttaattatagttacaacattattcctgtaaatttttggaaaatttcgaatcgtttaccgtactgaaaataagtttgaaattttttgaacactagtggtagactgaaatatcaacaactctattttcagtactataaactattcgaattttttaaaaataaatattttaacatgtgatttcgagcgtgaaaattgactaaaaaattgtaataaaaagttgtaattagcacttttctttttctattcttcaaaatacatcactaaaactcaactttctatattttatattaaattttttacattatacttatatttgagcactattgggagactctccttctcaattttagcactaaataagtaatggtgaaaatcattgaacattactaaagatgagagttataaatggatgcagccggcgttttatg

SEQ ID NO: 12614 - DNA, 607 bp, Cannabis sativa
ctactaggttagaatattcatgggatattttatcggattttgcgcgtgtgatacatgttccttctatttctccaagttcaatgtcaaaaaaatctcatattaaatatatataatagtttattcaactcttaaatttgctaggttattctcttgtgtgataaccaaagagattttgaaatcgtatattaatgctgtatatttttttagataaatttggatttgttcataaaagtaatttattaattataaaatttgtagttttataaattaatatatatttatatatatgtatgggagtattgaagaacatacttttcgtgattagtttaatttaatgatttattgagtttattttagtggtaccctaaatactaaaagatgtgacatattattataagtataattttataatactgaatcttaaataatttaatttaataaataatataaaaaatcacaacgcgccacgtgaaaagaataataaagagaaaactataacattttaaaaggtttttaatttttttttaatttgaattatccacatcacattactacctttattatggggaaaatggcagcacaatatcaatctgctaaagaaaataaa

SEQ ID NO: 12615 - DNA, 562 bp, Cannabis sativa
aaggcccccgctctttcccagcctctacccaaagagtcctcccggcagcggcgtgagccttaatgtaagctagctgttgttccctcctaaagaggtacttctggtaccggtcctctgcagaggcgataatgtctgctcggagtaccttttcgacatccggggtgcgaatgttggggcaaaggacctcggagaagttgaagtcgtccaccgattggctctccgtgataagattagccttcctgcagttcaccgtcgtgactaagtcccccacattaagaccatctttgtcatatgtggagaagaccttcgagagctgaaggaagagttgggtaggagcagtgcggtgcatcgggagaatcctgacccactccatgagcagctctgggcgttccacggcttgaaaacctggagagaaacaaaatcggtgacgatactctttgacattcttttggaaattataagggaatgaaccctcattggcaggatgggcccggagtgtgaaaaaaccgtctttaaatttatctcctttcttggggacagactgttggatatattttaccag

SEQ ID NO: 12616 - DNA, 1402 bp, Cannabis sativa
attatttgaacataatttatctctgttctatcagacacagaatctgacagaacataaatatactgcacaaagtaaaatgcagaaatttaaaatgacacacaacattttatatgtggtatcatcaacttttttgaattgctcctaatccacagagccacgcctagagaataaaatttattagatgaatctcaagtgtttacaaaagaaaattgacttatacaaataaagactccctctttgaatttgctgcaactgttgtaatctattcttctaatcaaatttttgaagtgtcgagactgtgaactcctttcaaatcgtaacacttgcacacttcatcctgaagagtgtttcacatgcaatttttctctcgaaaagtgtctaacttgccatcttcctcccgaagagtgactcacttgcaatcttactcctgaagagtgactaacttgcaatcttcctcccaaagagtgactaacttgcaatcttcctcctaaagagtgactcacatgcacttttcctcctgaaaggtaactcacgaacaagacttctctcgaagcttgattaacaatatctaaagtgttcgacctgcacaatttcaacaagaaataatagagagtaacacaacaatagaatactaagaacttgttgactcgagttcttcacacaacaaagaaaacactctctaactttgaaaagtaatttagaattgatacaccaagaaagctaaccaataccagcgacttaagagtgtatttatatactttaaaaaccctctaggtcgtggtcaagcaaccaagaaacaatcaggacagtaaatgaaaatcttcccaaaaaaggaaagtcaaaatttgtttaaacagatagtcagtccgttcaaacagatacagtgaacctagacagtttttcaacaaaaattctataaacaatttaggcagctttgacaacattaatacccatagttgtacacggtttcttgatcaagaaatcatatcaaaagaaataaaatatgaattagaatttccttaaaaagcaaaggataaaatcatatattctataaaaaggaaaactcatatttaattcacaataagtcaaaaatgaataggatctgattttaaaaagcattttcacacaagaaaaggaaactatattttcgaatttaaagaatcaataattagacacaatttcgaaaataccacaagtattatttttctctattttatcaaatatgtcaataaaggattttacaatctccccctgtggcaatttaatagacaaaaataaaacaaaacctacaacacacatgttagaaataagtaaagagaagaactccctctacaagcatgcataacttaaaccacacatgaaaaagaaaccaaaacttaactccccctcaaaaataagaagg

SEQ ID NO: 12617 - DNA, 682 bp, Cannabis sativa
cgatcttgccttgtccaggaggggcagatggccatatgaaacaccctactagtttaggcgtgttaacgttatttttaacttaactgttcagctcgttgttaatcaacgagtttatcgaaaatcgtgaatatttaaaactttaataaactaattacaaatactaaaataacatacttggattaaactgggatcccatttacagaaatatttaccaaaagttttactgtacatattacaaaagtttaccgcccagcgactatacaaaagtagcccagttgtcccaaagaccgtatgctccaggcctaaccacctcgacatgtacaatctccatctgctcactctcacagctgctcaaccttggtcttgcccttacctacacatgcaaacaatatctgtgattcgccagacttagtaagaaaagcataaacaataacatagcattaacctggattataatcaggcgctcataagcccaatcataaccctaaccccatgtccaacacggtgctgagtcaagaacaatcgtacgacaatactactgactataatatcagcctatactcggtacgccagttgtaccgatgggatactatcaagtagtacagtactatcgactataatatcagcctatactcagtacgctagtcgtaccctagtcgtagcgatgtgatattatcgagta

SEQ ID NO: 12618 - DNA, 521 bp, Cannabis sativa
gatgaaaagagaggaatgtacaatactgatgagatattttacaggaattggatggccatccttgtgtataccaagttcccatttatagggcctaaacccaataatgtcaagtgtcttaaattaagtccccacacagtaacacaaagaaatcaactgtcataatcaagtcaactgtattgtattattaaaatagtagccattgctggtaatgtagcttcattactctactgatttgtcaactttagtcagttggttggtatttgacacaatacaagacgtgtacccataaatattttgcttaactccacaagatttaatttaaccattatttgaccttattataaggacaacaaaataaaaatagtttaatgggatatttcatagccagtggaaaaatgagagaccagatcagatcaactcagttgatcattttattagtagcagtatgcattcattgattgattactttagccttgggccatacatagaatcttcagggaagatgtacttgacattttatc

SEQ ID NO: 12619 - DNA, 701 bp, Cannabis sativa
gatatgtacaatcttcattagctctagcttactattgatcaattttagctttgcctctacctacacatgtaaacaatatttgagagacgataaactagattataactaggcgctcatacatccaataataacaatcatatcttgcgttccacacgtcctgagtctgaaacgtttgtacgacatagcttagtatatatctattgatatctcaatgcaactatatgtacacatcactaatatattgatatgctaatttaatggctactgatatccctaacatatatctgttggtatctcagtgcatctctatacctcactaatacactaatatgttattctaatagaaactaacatgcacgataaacatgtattcataaatgaaattaatataccaatcttatcttgattctgaattcaagtatgctggtcaacttgagtggaaattgttgcttattaatttataggcccctaagtcacaacatatgtaaaattaatgtgtgagttagttccacatttctaatgtgtaaaaataaattgtcatatataatatgaatgtgctactcttcttattgccaattaattttgagatggaacctcattcaccttagccactttcattcttaaattatcaataataattattaaattaaataatatgagattcaataattatattaatagttatataatacattataata

SEQ ID NO: 12620 - DNA, 617 bp, Cannabis sativa
gccataactcactcaatattgatcatattgacacgatttaacttgagtttcaaagctaattcaatgatctatcaagtcatatctcacatttcaaactcattttgaagctatcatcttcaaattacaccccaagggagttataaaaataagctctgggttacccgcaaagagatctgctaggctaattttcattgttagaaaaatcaaatttgtatttttttttatttttgtagacctccttcacctatagcaggagagctccataagcctatttttaaagttaggaaaactacccaaggtctaagcttttctctctagaaattggagcttttgacacttattatttttctttaattcccatcccgtgagaaatagaaattcgatttagacgtagctctattgtcgcgataaggagtgaattactataaatttaatgtgtctcttatacttactcaactactttttcattctcgtcaatctagcgagatttctgagtcaacaaactctattggccaaattatcgcattctactgttatcggacataaaaatatgaaaaacataaaattttagatgtaaaatatttaataaatctaaagttcaaatatatatccgtaat

SEQ ID NO: 12621 - DNA, 554 bp, Cannabis sativa
gatttaccaatcttaccatcaataatgcttcatttaattggctggtgaactccctttttctcattaccaccatcaagtctagaaaggtggtccactacttgattcttgttcccttttctatcataaatttccaaattgaattcctgaagaagcaacacctaatgaatgagtctcggtttggcatccttcttggcaatgagatacttgattgcagaatgattggtgtaaacgatcacgttgcttccaacaagataagatcagaattcatcaaaggaaaacactacacccaacaactctttttctatggttgtgtagtggatttaagcattaaggagggtttttcttccataatcgatagagtgaaaattgtttcctctctactgcccaagcactactccaatagcaaaatcactagcatcacacatcaactcgaaaggcaaagaccaatatggagctacaatgattgaggcagttgctaaagccttctttagagtcacgaaagcattttggcactccttggtgaattcaattgggcagttttattccaacaaaga

SEQ ID NO: 12622 - DNA, 519 bp, Cannabis sativa
ggataatagctaaattcaccaggatcgacaaatttaacaagacactttcatttctgatcaatgccacaagtccttaaaacactaccaacatagtcccctatgacccttatcctcgactcaataagttcagcctcgaaggtgacgttgggatcttggggagtctttcaaatacgttgcttggaagacattatttcaaagtccgggtcacctggtgaaaaagtaattgtgactctaggtaaaaataaggacttagccaaaggaaaagatgataaaattgagggtttaggcaaggcagcatctcacaagaaacgacgtttaccctttgttgtttcttgaaggaaacgcctataacaactaacaacatcatcctagtttttttttaatcaatggcctctaatttttgaatcatttatctccaatttggactggggtttaagaattctgggtttgtacgggatggcaagttcactaggataccctgtttctaaggattttggagaataaacatctgaaccagat

SEQ ID NO: 12623 - DNA, 660 bp, Cannabis sativa
tccctttgaggaaaaatgagggtttataatcatatatataatataggggtttttttcactattttaattaattagtaattaaatttaaaaaattatcatttgattcaatttaattagaccttaaaatctaatctaattactaattattaattagattaaattggttttttaatttgatatccaattacacacctaaattttaatattaatttaaaaatatgaaaaaaaatacatataaattaaatatcaccctttatttacgtttagtacgccataaacatacaatcgttacaagtgtaatgcaactaaaaattaaaataattaaaacaacaatattgctaaataataaaatagagcaaaacatcataaaaataaatacacaaaataatcaagtgttacaaattcagcacagaaaaaatctaataaaattataattaatatatattatatttttcttcatattttttatcatataaattatgttttaacatatataaatgtaattaaactgaatcggttattaattagattttgatattgacatttaataaatgatctaatccaatttttagcatttaatccaatccaattgtaattgaatatttaattttttataattagattaatagattcttccaattaaattagattgatacccac

SEQ ID NO: 12624 - DNA, 537 bp, Cannabis sativa
aaaaaaaaaaaaaaaaaccctagtaaggtttaagatttacaatgcaaccaatcaagcaaggaagctagctaccattaaaaaagttttatatgatggttctaggaaaggatccaaagattttaaatattatcaatcaaattcttattgtgaattatatatccaaattgataaggtggctatctgcttttgaaatataaaacaaaatgtgattagttaatctaccactactacaccaaaacactattaagttaaagctctttaataaagggttaaaattaaagtagagaagaaaaaaaaaacttcctcagtcttttttaatatattaataatttccttatatgattaactaataactgtacatgtgccattatattatttattaaaatattacaaaaaatgtgactcggttagaaattctttaattataaatgtcacactagattttatataaattgtgcaaattgatttgtatgagtaacaaacccaatatattatagggtctctaccgtacaattttttttttgggtgtttattgta

SEQ ID NO: 12625 - DNA, 689 bp, Cannabis sativa
tgtgtgaaagatcagtggtgatatgatacgtcttcaaccctcgttctcgaaagagaaggactccttggagtctttcacacgaatagtcatgtttcaccctttggtcatttaaagtgaagtcatcgcttaaatttttattcagctttagccattcctcacagaagtcgaagtctaccacataataattcaacatgactcttccatgaatgtagttttttttagcgtgaaagatcactagggttatgatacgtcttcaaccctccttcccggaaaaactactagaagtctgtcacacgcctagtgatgtttcaccctttggttttttgaagcatagtcatcgcttgaatttttatgcaactttagccttttctcacggaacccaaagtctgccacataagaattcaacatgactctcgtgcgtgaaagatcactaggaatatgatacgtcttcaaccatccttcccagaagggaaggactgtttaaagtctgccacacgcccagtgatgttttaccctttagtctttttaagcgaagtcatcgtttgattttttttgcaaatttagtctttccccgtgaaagttgaagtatgccacatgaaaattcaacatgactcttgcatgcacgtaatatttcgtgcttgaaagatcactagcaatatgatacgttttcaaccctcattcccggaaca

SEQ ID NO: 12626 - DNA, 514 bp, Cannabis sativa
acaagttgtaaatacttatgataccaaaacaagttgtagtaacaagacaatgtttaatcttgaaagtatgtatagtttttacaattggattcttgaaattgaaagaggattttagttagttctaatttgatgataatagtaatcagctaaaataatagtttgagatgtctcgttggagacatgataaggattagaattagaaaaacgagtcaaataattagtcacctaattcctagatcgtttgacaaacaaattaaaaattaaataagatgaaaataattacagcattacaattaactttaagaacacctatattcaattttaattatcgctcagaatacataacagtagaaactatttagcaagttcattcaacctcgtagcttgaagcactcaactattgtgcaaggtaagtaacttcactactaacaaccctttctgtcaaatttgttaatcttaaccactaacaacgatttgatgacgagatattgaagaataaaaaagaaccaacaac

SEQ ID NO: 12627 - DNA, 525 bp, Cannabis sativa
gtactcgtgttggtagggccaattcgtactctcgggagttatcgagtgttgtaccacatgcactagagtaccaattttgtacttgtattggtaataccgtaactactctaaaactctacactgtactaacacccttaaaactatattttcattggtgttattagtatattcaattaataacaagcatacattcacatatatataatttatgctatcttacctcgttttcgtattcaggtgtgccggtcagcctgagtggaattacagcttgacgctttacaaggccctaaaccaaaatattctaatgagagacacgctaaaacacttctcggggactttaatataaaatttggaataaccatatcgatgaaatatatggcaatactctaaatatgaataatttggggcaaactagggttaccaatttcccaactggttgatcggttcactgggtttcctaagggacaaaacccgttaaccggtttattgcaccgaaacccaataatcgaccccctaaacacaaat

SEQ ID NO: 12628 - DNA, 541 bp, Cannabis sativa
atatatatacataaacttaactgataagttattacttattaattatatgtataataataatataaatattataaataaattttttataaataataattattttactatttcttaaccactaagaaatctttaaccttagggtatttggtcaactccgagtaccccaaaatactccagtaattctaaaatcaacttatctcaataattctatcaatattattaactaaaacttttgtgacatttttggcctccgatcaggtctaagggttgccaaacttgaaattatttttatttcacaaataacttacattatatcttcatattccaaataaatctccgtaattaataaattacgcctagttgttcacttataacaaaatttataatttatgctaaattaagttagtaggattataatcctactcattactatttaattaacctataatatataataaatcttaattattcataattggttttcacgatattacatgcaggttgattgctagccagtaaacgaagtagatcccatgagctt

SEQ ID NO: 12629 - DNA, 622 bp, Cannabis sativa
acacaatgcataattagcgccaccattttccaaggaaaacccaattgtgtcatcattcgctcaaggaaactccactccaccctatcatacgccttgctcatatctagcttgagcgccgttgtaccagtcttacccaatcttttccgctttagataatgcattacctcaaaggctaccataatgttgtcagagattagtcttccttgtatgaaggcactttgtgtttcagaaatgacagaagggagcaccactttgattctattagctagcacctttgctatgatcttataagcaacgttacagagtgatataggtcgcagatcacccatgctttccggatgtttcttcttagggatcagaactatattagtttcatttaaaacaggagaaaagaaacctgtatcaaagaattccttgacctgagaaataacatcatggcctaccacatgccaatacttctgaaagaatcctagtgtcataccatcaggcccaggagacttatcaggatgcatttgaaaaagtgctttttttaccttatcatccacaataggttcaaccataacattagcttgagcatcagatacaagtttgggaatagcattagttacctcagcaatatcag

SEQ ID NO: 12630 - DNA, 733 bp, Cannabis sativa
cagatttcttgaggagacccatatgaaaatttttggagaatatgaattcaagaattgagttagtagggccaaagaaatttaaggagaatttaggtcgtaaggatcaatatagatggatgagtggtagagaactttcttttcgataccttatttctaagcttcccaactactacaatggtggaatgatgttcgtctcttcacaccaagaaatagagaaatgttgacatggaagatcattgttggcgtaaggaaaagataaaggaaaaaaactgttgacattttgcataccaatcgtattctatatcattgtcaaacataaatattgaatctccattgctataccattggccaaaaaacagaggataccaatttccatcttttttcgcacttgtttattgctacttttgacaatccttttcaaaattgcaaaaatatggaagagaagaaaatggaacataaagtgaagaatctttctctttttttcttaaaatataaaatcgataatggcacaaaataatgtcagttgctatttttcttttatattttacctttacttggccatggtcatttcctaaccattagattccaaaaattcacattttttttatcatccaatggcccaaaatgttttgaggtgttaaaaacttctaccccaactgaggtactacataattggcctataaatatttacatatatatacaaaaaggatattaaaattgttgttgggggggg

SEQ ID NO: 12631 - DNA, 507 bp, Cannabis sativa
aaagaagaagaatcaccattagcacagttgagataagtaggaatgtggaagaactcccgttaaggagggttaccatattctttgtaggatggcgaggaaggattatagtattcactaaactccctagaccccgtaatcttgaatatgtcaaagggctcgactagtcttaactcccagctcccgtctatgtgacctgccctatctgtcatggtaccatattgctcggcaataccatagaatgactcattacaactaatctggacgtggaatctagggtaccaactatcgagtctatggaaaatacgatctacgagaagggggttccaaataaaaaagttataccgactatctcaaaaggagactaaggtattacgttcagttctaaacaccgtgggcgaccacccacattgattatctcggggtcttacgtctacccgaggagaaactctctcgagataagatgcgtgagccacatagatgtcattttcctctcctttagggacggga

SEQ ID NO: 12632 - DNA, 611 bp, Cannabis sativa
taatctttgagatgaaaaggtgaaatactttaatattgcatattttaaataggctattgttgtgtcatttttgaattaggcgtgtcaatttaaaaaataacttgattaataaatggattacccctatcgacctaaaaataattcaaactcatttaaagcaaacctaaacccatttcttttattcgaatttcaaatcaacccaatttaccaccactctctgaataaatattacaaaataccataattgaataactatcaaaattacataatcatattataaatgaaaacctattgaaaaacaaaaaataaagctctaccaaaacaaattttaatcaattttttgttttcaaaattagaaaagtgaaaatattttccaaaatcatgttctataaacttgttttatttttttaattttttaattgagaatcaaaattttaaaaattttgaaaacaaaaaaaaagtcactttcaaaattttttaaaagtgatttttttatcaatattttggactacgaccccagcctagaccttggagcccggaccccagatccgatctggaccccagacccggacctgaaccgaacctcaaccccaaacttgacccgaacccta

SEQ ID NO: 12633 - DNA, 549 bp, Cannabis sativa
aagataaggattaaattaattaataatgaaataaataaactatatctatctatgtatgtagctatatacttgtatagaaatatataggagtagttttaattaattaatttatgatatgttgaagtattaatagccgacatgagatgataatttagtgggtttaattgtaagtgcattacagccttaatttgcaaagatgagttagacgaccataagtttggcttacactttttctcttctttaaaagtttttgacatcgaattcgacagcgatagttatataaatataaattggactagatctcatatatgaaaatattaatggatatggatgatatatacatgtgatgatcatgttgtttggctttcaatgaagaacaaaaattaataataataataataataataataaaagaagaagaagctaataattctatcatttgagtttgataaagaagagaagtgaagagtagtaactagtaagtatcattttgagtagtaactagtaattagtaagtatcattttgaatagtaactatcatgtacggtt

SEQ ID NO: 12634 - DNA, 702 bp, Cannabis sativa
atagtgtcaaattgaacctaacaatttggtaaacttgaaataataagaagatgaacccctcaaggactacgttcaacggttcttagaggcagccgttaagaaaaaaaatacttagcgagaatacaagggttatgaaacatgcagccgagctcaaggagatcagtcctttgttgtttgaccttcgtctcaagtcagtctacactatgaatgacttctttgatggagcaggtggctttatcaagcttgaagaagctgtcacttgagccaaaggctcaaaaaataaaaagaagaaatcaatagactccccaaaacctgacattggagcgcaaggtaatggggaaagagaggttaaaatagaggaaaaagagctaacaacagagggaaacaaggtaactcccctggcagatagaaagccaaaactgaaggcaagcccatgcgagagtatgaacctcacttcacaacctattatatactcttggccccaagagaagagatctatacgaccacccaatcaatggtgtcgtaccaaaaacctcttcctttcaaataattagggaggaaggatatgaataaattctatcactatcacaaaaattacagtcatgatacaaataagtgtaatcaattgggagatgagataaaattcctgatcagacggaagcatgctacttttgaacagtatgtacgacctgaagctccaac

SEQ ID NO: 12635 - DNA, 799 bp, Cannabis sativa
ctcatggggcctcggtatgcctattgtagccaagtctgatctttccaccggaaacttctctcatgcctcttatctcctccgttccggtgaccttcaattcctcttcaccgctccttattctccctccataaccacagattcaaactcttccgcttccatacccaccttccaccgctccactttcctttccttctccgccgcccatggtcttgccgttcgtgctgtagctgtcgaggtagacgacgtcgatttcgccttctccactagcgttgctaatggagctattccctcctctcctccgttaaccctcggtgacggcgccgtcattgctgaggtaaggctttacggcgacgtcgttttgcgttacgtcagtttcaaaacccagaatccgaatttctgttttcttcctggttttgagtccgcgattggcgaatcggtgcccttagatttcggaatccgaaggctggaccacgctgtgggaaacgtgcacgaattggtggcagcggtttcgtacgtgaagggattcacgggttttcatgagttcgctgagttcactgcggaggacgttgggacgagtgagagcggactcaattcggttgttctggctaacaataacgagacggtacttattccgatgaacgagccggtgtacggaacgaaaaggaagagtcagattcagacatttctggagcacaacgaagggcctggggttcagcacttggctctggctagcgatgacatatttaatacgcttagggagatgaggaagcgaagtgggttgggtgggttcgagttcatg

SEQ ID NO: 12636 - DNA, 668 bp, Cannabis sativa
agtgagcagagaccagagattgctattcactgaaccacatgttagggatggaattaagattgctcaagtagatgtagatgaagttagagaacaagtgagttgctggaattctgctgttattttttaagttttgggtgctaaccctcctatcacagtttttgaaagttttattaagagaatttggagtcatttaggggttgttcaggtagcaaaatgactatggggttggtaatggttggatttaatgatgaagccactcgagatcttgttgtagaagcaggtgtgatacagtttgatcgcaaaccagtgatagttaggccatggtcaactgatttgaatgccctgaatatggttcataccgtgccactttggataagacttcatgatttaggactccaatattggggaaataaaagtttgagtgctttagtgagcacactagggaaaccgatcatggtggatcaatacaccaaggatagaactcgtattcaatatgctagagttttggtggagatggcgataacagaagcacctcctagatttatcccttttgtggatgaatatggtcagttataagaacaaaaagttgagtatgaatggttgccgacaaagtgttcgaattgttcaaagtatgggcacacaagtgccacttgccgccatgaagagat

SEQ ID NO: 12637 - DNA, 623 bp, Cannabis sativa
gacccatttataaacgagttggcatgatacggcccgtataacccgtttataagcatattttgttcaaacatgtcaaccaataacacgtttataattcatttatgatatgttaaagtactaaaataactttaaataggtcattaacaaattaatttcgtattagtcgtgtcaatctgaatacgacccatttattaaataggttagacgagtcaactcgaacacgatctgaacccatttaatgtaaatccaaacccgctaactctcgtgcgggcttcaagtcgtattatcgtgtctaacccattttaccgatcctagaggtgttcgttataattacaacatcatcccttcaaaattttaaaattttcgaataatttacagtgctgaaaatacgtttgaaattttttaaacgcgcatggtaaactggaatatcagtaactctgtttttagcattgtaaactattcaaaaaatttcaagaatttacatgaatgatactgtaactataacgaatactgctatgaaaaaaaaaatatttcggcatgtgattttagacatagagattgactaagaagttgtaattagcactcctcacttttataactgccatctcactcatctcaaatgg

SEQ ID NO: 12638 - DNA, 503 bp, Cannabis sativa
ttaaaaaataaaaaataaaatgaacgaggataaatattattttagattttatattttaaaataattatcaattaaactttatattttattaaattacaaattagattctatattttttaaaatagtaaaataggattctaagctcaatttttaacaattttattttttaatatagccaattataagacaatttctaacacgaacaaatatagaaaaatgtaaccagttttgccataacatttttagattagattattatttagttttattttgacaaaaaaatcagctcaatgtcctatttgtacaattttagaaaatacatgattcattttattatttaacaaaataaaaggtccaattaataacttttacaaaacacaaaatctaaaatgatatttaccattctttttaaaataaataaataaaaataaaatgtatatagtgttatgagccaagtatgcattttgagctactcaactcttgtcatactagttgatctcatt

SEQ ID NO: 12639 - DNA, 524 bp, Cannabis sativa
tttttttttttttttgagaagatcttataaactatttagtactttagtatcttattcttttgataacatctcataattttaaatataattttttttgttaacaacattcaataaactaaaattttgctttttattttgaaatatatatattttccatatattaaaatagctacatccaaaaataaattggaatggtactatatataagcccaccaaattaacggtgtagtttgaaaaaatggtaaaaataaatattaaaaaagaaaaagaaagaataaatttatgttaaaataacaaaacaaaagaaaaacaaaagagagaaaaaaaaaagtcacaaaaaaaaatatcaacaaaagtggccgataatcacacaatataaaaaatatgagtaattagtatattatttatattttggtacaactaacactgttgtaaccaattaaaattacttttgttattttcataaataattatatagggcatggctattgttgcgcatgggtttcttgagtgactagtgccgc

SEQ ID NO: 12640 - DNA, 540 bp, Cannabis sativa
atgaggatatgttgaaaagttgaaaagggaggaatgggattggattggttgatatttgtttgtacacaaatcacaacttccttctccttcctgacgtgtgcatgtaaattttagtgtttagattggagtgaatatgggttttatataacttaaataataatttttaaaaaatattatttaccaatagtaagacattctaaatggtgtcagtggtacccaatgacaacactctactctgtatataattaggaaggactaaaatactaaactaactaaatcccaataaacattattattgactgaaaatatcactttcttggaggagctggtgtgtgtgtttatgattgggttgggatttaattacaagctttgttttactacagacatcttccatggcttttttgaccaatttcgatcataaattcttagtcagatcggttcaacatcaacctctcaacttaaatcttatcaatttaagtgcgtttactcaattttgtttaccaattatatattatgtgttgatgtgtaatgtaaatctga

SEQ ID NO: 12641 - DNA, 1134 bp, Cannabis sativa
gatatgctcaatttgtattcgggattaaatttgatggaaaaggcaaagattttcattgcccagatgagaaaagataaagtacacttcgacgagcagctttgcaagacagttatcaaaatttattgcaaggagggaatgattacagatgttagacagttgatagaagagatgggtatgaatgaagtattgaagaataataaatttatccaaacagttagctctgtatgtaaacataagggagatgaacaacttgatggaaaattattggcgtttgaccaacccgacatggtagctctcggtcttgtgattgatatgtatatggcagatgggaatgttaaggatacaaaaaatgttttggcagggttggttgagaatcccgatggtgtatcgattgctaatcagcttgttggtaacttcattagagaaggcaagaagaacatgctttttcttcgagcttttatcgtgttgaaatttgttgttgtttactgatatttgatttactgcaggtgatgcatttaaagctagaacactcatttatcaatttaacgagctagactgcagaccggaagatgccacagtttgttcgttgattagtttgtatgcaaagcaacacaagttgaaacaggccgaagaagtctttcacgagtttgctgattcacctgcaacgaaaaattcattatgcaagtctatgcttgatgcatatgtcaaatgtggtaaagcagagaaggcgttctcactttacaaacaagctattaccgagacagggaattgtcttgacgcggtttctatcagcattctcgtgaattctttatcgagcaatggtatggccaatagggaaattcctaagctgaatcaaagtattgttgttgttgagaattatatttgaaaaccgtgctcacgaaaatgaatctatttgcaggcaatcatcaagaagctgagattgtcatccgccaaagtcttgaaggacacaaggagcttgataccgtggcattcaataccttcatcaaggctatgttggatgcaggttgacatgggctatttcgatttccatattcaagaattttgcttatcgaagaagtcttaaataattctattttgtattacaggtagattgcatttcgcgtcctgtattca

SEQ ID NO: 12642 - DNA, 511 bp, Cannabis sativa
gctagtcggccatagcagtccgaaagaggggctagctcgccagtgttgtaatttgacactaatgttgtcttattttgcttttaggccttcatgaagctaagctcagtatgtgatggctcctaggggtcctcgaatgcttttgaaaagtaggtgaagaccctagaggcttcccttctagcaaaggacaaagccatgtctgagatggaagccctccttactgagagacagagcatgatttctagcttggagaccatgcttggtgataaaaacaatgagaaaaccacacaagctgcctttatctctaggctaaactttgaacttgcaaagcatgaggagagactgagggcgggtcttgatggccaacaagccataagggaggagtatgttgacttatcctctgcactcacttatgagttcaagttgcgtaaccccagagctaatatatcatacatggacaatgagggtttcatggagttcacatacacacgaggaaaagtgttattcgagagtt

SEQ ID NO: 12643 - DNA, 808 bp, Cannabis sativa
ggttactaattccatgttccattacctcctccaaaaagtctcttctagattaaattcctggaatgaaaaattcttctctcgggctagcaaggaaactttaattaaggctgtggtccaagccattccttcttttgcgatgtcttgctttaaagtgaccaaatcgatatgccagaaaattcaaagcttgatagcgaggttttggtggggatttcagggcactaaaaaagtccattggaaaaattgggatgatatctctgtctctaagttctttgggggcctgggttttcgtatcttgtcctcccataaccaagcccttctagctaagcaagcttggcgtgtttggaatgataggaactcccttctccattctattcttaaagcccggtatttcaaacattctgatttcttgaatgctcctgttggcaacaattcttcctttacttggaagagtattctttggggccgccaattgcttaaaaaaggcatggtttggaagattggtactggtaacaatgtccccttatctgcacccaattggatatttaatattcaaagtcccactctcttacatcctttggatcagtcccaagcattcgtttcttcctttattaatcatgattctacttggaacgtccctaaacttcagcatttctttcctacttaccaagtagaaagtatcctcaaaatcccccttgacccaatttcccctgattctctcatttggggatttcactcctctggcactataactgtcaaatctgcttaccaccttgcctcttcactcgcatccgtggatgttccctcctct

SEQ ID NO: 12644 - DNA, 524 bp, Cannabis sativa
tagaattttttttatgatggatactattattgtacgtagtgagagcaagtccaatgtgactgcaaaattgaggatgcagtagtatcttcattccaacgtagcactataagtgcaacatattaagcgtgttcgcagtgcgggtggtgcaggtggtagaggttgtaaattttttcaaatcaaactatatatgcgatttttataatttcttaaactacaaccgcgctttgagatcttaaactgcaaaatctacattgcaaaaatgtagtatgatggagtgcagtttgagcgatttacactatcatcattattaaacattataatgaaattcaaaaccaatttaataaagttttaacaatacaaaaaaatttgtaatatataatgtagtgcggtttgaaatacaattattaaatttaaaattgcaaaccatattgcaccgcgcggtttggtaaaagtgcaaaccacaactacactgcaaaggattttaaactgtatttttttgaagtgtggtgcagtccagacagttt

SEQ ID NO: 12645 - DNA, 690 bp, Cannabis sativa
tttcagcaactgaatgaataatgtaatagtgagagcttaggaataattaatgcaggtaatttttatgtggttcgggcattaatgagtcgtagttcacgagtctctgttaataatgagagagtatttcttacagagaatgtttctgtgtcttttttcaaatcccctcactaattcttgtgagggggtatttatagtgattggtgggaagaataaaaggggtgacttgtctttaagtgccaactatgggcatgcagaagttcccagaaagtacaaaatagagcatgcattacctacgtagtaggctgcttaggtattaggtgagattagccttcatcccttcttgattgatgtgattcttcataatggagtcgtcacttgcttccttgattattgtgtaatcaccctaaataaggtttatgacgtctaacattaaatgtgaagtgactattcaactccagccttactggcccggagaagcccatccgtgctttaactccggaagaagaagatgggcctttttgctcatgtctgggagctatccctttgaatcatacttattatttcttaaggtggttttgttaaatttacaactcatctttgggtgacgtgcccatgtcagccacatgttgcacttaaccgctgccacatatattgggagaaaagaggagcaacaagtatgaggccttacaa

SEQ ID NO: 12646 - DNA, 698 bp, Cannabis sativa
tcctttctatcatacaactcccatatatcactgtttaggatgttgttccattccttctttttctgcctccctcttaagagacaacccattgatgttattgctaaaggaaggcccttgcatttgtccactattttttccccaacttgtttgagatccaagtaatcatttgagtccacaacaagtgaagcatgttttgcaaataattgccaactagcagcctcatttattcttcctagtttataagttgaccctgttttcataatcgttgcaacagctacactccgagttgtcacaatgatcctgcttccatgcaaccctgatttgaaacagttgttcaagacatcccacttggaaggatcctcatcccagacatcgtcaacaacaaacaaaaacttcttcactctcagaaccttctttacttcttcttgaagatcatatggctcctcaatctcacattttttagaagttaccttctcgataaccagtttcatcactttcaaacagtcaactttgtcatcccccactgtaatccattctttcgtatcgaacgttttgttgactctcttgtccttgaaaacaagttgagcaagagtagtctttccaataccacccatcccaactatgggaatcacagataatttgtcagcacccccagtcgtgttgtcattcgacataagcaacttaataatctcttcttt

SEQ ID NO: 12647 - DNA, 696 bp, Cannabis sativa
atatataggctaaaaaattaatcctataatatatatttatgtggtggaaaaaatattatcctaatgattcagtggaggtgtaaatttaaaattataataaatatagttataaatattaatttttttttaccatcacctgttaacttcttaaatggattataaatactttcgcatgaataccgcaactttatcgaaaaataccataaatatattattaacaaaaaaaatgaactatccagttaatgcgaacccagacagaataaaaagttcaaggagtttttacaaaaatactagattttgaataaaagtttacaattttactattacgcggaattttttacaaaaatactgtctttttataaaataaccgtaaaataacaaaacagaataattgaaacaacagtggaacaactaaaaaacaaccatagaacaatcgtgaaaaattaacacagtacgcaacatgtttaaaaaaaattccatcccacagtaaaaaagtaaaaaaattaaaaatttcagtatgtagtgtaaaaactctaaaattcaaaatacaagcattacattattctctctttcgaagcaaaagatgattagaacccactcattatatgattactcttactttttttgtctacaatttttatgcgaatgttttcttcagttttcaacacttaattttttttttctttcttctatttt

SEQ ID NO: 12648 - DNA, 512 bp, Cannabis sativa
tacccacatgtatgcctataaataacctcattttttatgtacaaaggatgaacaattttatactagtcaaacttctactaaaattcctataagctttcttcttcttcaagagaaataaaaggagtgtagagctaaggtttatactgtaaacatttgtattattcaaacactcgcagtaaggccaatacaactgacttgtggactagggattattaacgctcgaaccacataaaaattacctgtccattatttattattttattctttcctaagctctattttactagttttcaaaaatctcggtaaatattttggtgctttcattgagggctgaagaaagtttgctaatcgccatactacctcaaccatggtgcaattcggaagaacataggcaagaaaactcctctggatactgttatggaagaggtggactcccccgcctccaatctccaaccaggtggggtaagagaagagattgttgtcaatgatgagaaccaaaaagaggacgctaa

SEQ ID NO: 12649 - DNA, 570 bp, Cannabis sativa
taactatttaattacacaaatagatataattaaaggatctcaactacactttccaatattcattgcaatcattgaaattattattatccgatcagaattgagtgtaattacactgtataattactaaaacatacaaaattactaattatttcgccaaacaagacaatagaaattcaaatataattacctcctcacattcaaacaacacattgtattttaaaatatagtttaactacatgacctagtgaaaaaacagtgacttccaaacacgccccagtgaaaatattactgagattgcaatgactccctttcaaaaacaataaaaaatacaatctattcagcaaaacatgagataaattttggggttctcttttctgttttatcctcaaaaacaataaatttcttacaatatattcagctaaacattgatcagctccactcagagtatcaaacaattccaacaacaacaaaaaactgaattcaagcaattcaagcaaaaaaaaaaaaaaaacaacaacaaaaaattgagtcttgtattgaatgaactgttcaatatataatcaataatag

SEQ ID NO: 12650 - DNA, 677 bp, Cannabis sativa
gcgatgtcaaggaccaaatgcaagagtgcttgttgaacctgaaatagagattacttatagacagaccagaagaaacaagaggtcaaaaagagttgcttctagaggggttgaattagaagaaatgggggtgcaatggatcaagataatgcccataattcagctgacagaagccagagggattatcttctacgcgcaatgacagaggtctaatcttgtataaggccatctgctgttgatgcaaataactttgtaatcaaggcagccattcttcagatggttctatcaacagtccagtttgggagacttcctttggaggacctaaacatgcattaagctaacttcatggacctttgtgagaaatttaagatgaatggagttagtgagaatacaattcgcttgggattattcccattctcactaagggaacgagtcaagagttggttccatctacttaatcaacacttggaatgaacttgcactgaagtttctctcaaaattctttcctccagcaaaagcagccaagttgaggggagagatcaatagtttttatcaacttgacaatgagtctctctatgctgcttgtgagagattcaaagatttgatcagaaagtgtcctcaccaaggaattcaaaattagatgctggaccacaatctttacaatgggttgtgtggtacta

SEQ ID NO: 12651 - DNA, 515 bp, Cannabis sativa
gttgggtgctctctttggagctttcgggaagcctttttgatacttcttaggttcttgaaatcgaggacgaggtctcctatcccgttttttaccatgctagagagaatgcttgaaacataatttgcatttggatgatagatgccagtgcactaggttaattataaacctgagcgctaggctcagttttctaaccctcatgattctcattttttcctcgaacttcattatatcttcattgttctaaaaaaaatgcctggaacactttttcgaaaacatgattggaaacagcctaggttgacaaaatatcaacctgggcgctgggtctagttttaggccaccaaatggttccatttgattcctgaaaaacacttgtatcttaatctttgacaaaaatgaaggatatgcacagaagacttattaaaaaactctttggaattagcccaggttgacatctgggccctctttctggcctccaagtcggtctatttcttccctgaacatatttgtttccttgt

SEQ ID NO: 12652 - DNA, 852 bp, Cannabis sativa
gaaatctaactaggtaggcacctacgtcacccattttgactaatttctttgtttttctaaataatttactgttaccttttttatcaaattaaattatgttaaattagttggagcatgggtactagttcccactacttttttaagtggggttttgtgattgttcagtaatattttttaaaaattatttttttaaaattatatggaactagatttttaattatactaatattgtgacaccaaaaaaaatattaagtactaataatatcttttagtaattcttatttagttgaaagcaacacatcattcaatgctcccaaccagggtgatgttcaatgtagttgaatgaagagagaatgaagctactaaggctagtttagtggtgaggagggatggaaaaaagggagagattatgtgttcaaacctaggaccttaaaactattaagctattaattgattgtaaaataccattacgctacactaaaaaaacaaaaaaaaaaaagaaaattgtgagatgaaacaaaatattttcctttcataatttaaggttaggtattcacaaaaacacaaagtgaaagatattttttttttctttaaaaaataattattaacaaatagccacactagttcaatcccatctcaaaaaagaaaataatcacatctactcacatctactcatgttggtcccacagttactaactctaatcaatctaaaagcaatacatttactgaagaaatggggtctatgttactatgtatgtacccctcttaaggggatatactttagaattgttttcatatctatgtgttgtaaatgcaaccacccaatattaaaacttaaattatatattttcc

SEQ ID NO: 12653 - DNA, 526 bp, Cannabis sativa
agcttgttacataaaaattcaagatgactcttgagtgcacgttgctttttgctgcaggaaagatcactcggggtacgaaacatcttcaactctccttccaggacatggaagaattgcttgaggtctgccctacccctcgtgatgcttttcctcttagtcttatcaagcaaactctaagcttgaatttttatacaacttcagccttccttcccgaaagtcaaagcttgttaaataaaaactcaatgcaactcttacatgcacgttgtttttcatgcaagaaagatcactgaggatacaatacgtcttcaaccctccttcccggactttgaaggattgcttaaagtctatcctaccccttgtgatgctttttcccttgatcatttcaagcaaagtctaagcttgaatttttatacaactttaaccttctttcctagaagtcgaagcttgttacataaaaattcaacatgactctcacatgcacgtttttttcgtgcaggaaagctcactgggggtatgatatgtcttc

SEQ ID NO: 12654 - DNA, 634 bp, Cannabis sativa
taaacttttagattttcgttgaatatgttaagtatcctgttagaccatttctaatgaaaaatataaaatttgtgttaaatttgacataaatttaagttatatttaacctactatttataattgtgctccaatatacaagatgtaaaatacataaacaaataattaattatattaatagtcatttgcagtgaggaagctagaaatttggctttgtgagggcttcaataaatattaagtcaaaactaataaaaataactgataaatgtatcctttcaaattttcattttcaacaaaataaaataaaacattgtcaatagtattatcttattttttaataaagtgttattttttttattatttgtatttggctactttaaaaaatgggcttgattagaatgaggatagactcataaatcgtgattaagatattgagtgaggacttttatgaattggactttaataaattaagtgaagtgaatttcaagataaaattacatctagaaacgaaaatttgaaaaatatattacaactaacgttaatggttttaagtgttaaatatacttttagttttacaattttttttagcaggtatatacttaggtataggtacgctgcttttttttttttttttttt

SEQ ID NO: 12655 - DNA, 517 bp, Cannabis sativa
ccacagatatattcttggaccaactttttgtgccaccactatgtgataacaacttttgaactcaccattgtttatgagctgcatcaaaataatcacaaattaattaattaatacactatatattaatagaactttattatgagaaatgctaattaaagaacatcttaaaatacatttcgaatgaaagatgtaaaatttgtgttaattttcacataaaaaataaatttgtactatatttgatccattatttataattcaatataaagtaaaacttcgaaaacagtacagcaataatccaattaatatttaacagtgatatccaactaacattttacatttgcaaaaaaaagtaaatattaaaggagttttgccactaaaaaataagataattaaatgtataaaatcataacataagaagtttcgccgtaaataacccttataaatttgcatcaccctcaactacaacaaagtacacataattaattacatacctaacactaaaacacacctaaattaa

SEQ ID NO: 12656 - DNA, 634 bp, Cannabis sativa
gatattatttattatatatagtgcatggatctaggagataatatcttccaccaatcttcagcagactttgatagagttaatgagaaataaaagcattttgcatcatctcttgtctttgccacttgcattagtcaaacatatttagatagctggggcctggggtttgtcctacctacatatagttctattggaggtattctattatgttccggtaagggtgtctctattattcttcttacacacggttctatatcttcttctttcgaatcagatactatcccactttgcttccagacaatatgttttgtgaactttttcaatccagctatttgatcttccaaacgtttagtagtgttaacttagattttgtgcccatgaactctatcattaatataatttctgagattatttccacgtggccttgttttctcgcctctagctcgttcttttttgtcgtttaagcattccaagaggtcctctttgagaaactaccttctatatggtaaacagaattactagaacaatttctccatccccaaatggtaggcgtttgtaccgagcaccaagcatatcatttcgcataactttggctcatggatcaattaggtggctttgccctgaagcatcagccacc

SEQ ID NO: 12657 - DNA, 530 bp, Cannabis sativa
cctaatgcctctctaattaatttggagcactcaacatcagatcactgtcctttgtggctggagccgactgtgcaaagtaagtttcctccttatcatcgttttagatttgaaaatgcgtggctcaaagaacctatgtgttatcaaattattgaagattgttggggtagagatggtaatatgggtatcatggataagctgaatttgtgtgctactaatcttgctagttggggaaaggagattactgggtgttttaagaaaagaatcaaaagatgtaaggaagagcttaatcggttgaaaaatatgagggatgcttcttcggtccttcgctatgatgaagtcaaaaatcaactttcatctatccttgaccaaagagagaccttttggaagcagagagccaaacaattttggctcaaagaaggtgaccacaatagcaaatattttcatcttatggctagtaaaagaaagaggaataataacatctcaaagctcaaaaatgaccatggcatttgggttgactgggatcacggttt

SEQ ID NO: 12658 - DNA, 696 bp, Cannabis sativa
agaaaaagtgcggtttaattaaaaactttgagattaagtaaaatgtaacttttattcaaaagattgctaagtacggggatcccctgttcaaaaaattttacaatttagttcaaaaccagattacaaaataggattacatttccataaaaataatcaaaaggatggatcctatgcactggcagtcgaaacaccgcggttgatatgtacatcgccaagaggcctctgactcatggccgaaccacaatttcttttccttttacctacaccacgaagcacccgtgagtcacaaagactcatcaagaagagccaataaatacaaacacatatattgcgcattacaagaaaatcgtagcaaaccatggctaacaacttatcattgtactaaataaataaatattcacccattacataattacacattacacaatcaagtaattacacattaagcatatatcttcgtgtgtctagacaggtttcccagtcagcattagagaaggcgtgaagttggaatggatttggtgttgatgcagaggagctgaagaagagaccttggccaggtacacctttcaaatattgtaagatccttgtggcaactttcatgtgaggttgtcgagggtcactgagaaattggctgaggcagttgacaacataggtgatgtcaagtcgtgttagtgttaagtataatagttttccaat

SEQ ID NO: 12659 - DNA, 639 bp, Cannabis sativa
actggagctggactttttgtaatccggtgctgttggatacgtggtaacatttagtcagtgtgtggggattatgtgactcccacaagcaagtgatgcctacagtaatggaatggtagtaggcatatgtcaatgctcttatcgaggcaaattttaccattatgaggataccctttgattttaatatttgcattaaatgaacctgttaatatgctcagacagttagatcaatgggaagtgtgaattttaaaagaacatggatcactctccttctttataattaccattcaaaggaacaattcgacatgttttctattttcatttgagttttagagcttttatgaaagataaattcccaaataacctataaaaaatattttttaagtggatgtctaatcctggctctgagctcatcaacaaacttctcggccttcaaactcgtctatttcctaaatatagacctttaatcgtcactaactatgtcttcatatttcttgggagatttcaacgaggttacaaggaggttcctcacttttcagatgagagtctcactatcgactcagagtttacaaccaccacccctaggtttccgctaatataactatgtatgatatcccttagtctctttgcactttattttta

SEQ ID NO: 12660 - DNA, 984 bp, Cannabis sativa
agaagattaacaataatatgaaacaaccgttttcagaaaactcaatattttgttttcgtaactcctctccaacttaaatcttaagtctttgaaaaatttacataatagatcaaaaatatataaaaaaaaatatatattataaaaatacatcagaaaaaaattatttttactttttaaacttttttatttacaaaatatttcttcaataaaaatagcaaattgcttttttgattattttataggttgtatcatagttgtcataaaattattttttctagttgtttttaattgttttataaattatttatagttaatatataattgttgtgagatctatttcttgttattttttatttactgagcaaaatgtatttttataatcttaaaattttataagtgtatttctacaattaaaatttttttactgtaaaattataaataaaacataaaataaaagtatttttcaaattaccccaaatctttaagggattatttcacgaaaatataaaaacaacaaaaaaaatacaaaaatacggttttatggaattttaaatatttttacgatttttttattttatttacaaaaaatacggtatttttatgttgtaatcttgttaatttgttgtttattttttgttatctgtatgttattttttgttataatattgatattatttgatgttacttttatgtagttttcttgttgattttatgttattttcgtgttattttttaaaaaactgtaaaaatgtaaatattttataaaaaaaatagtgtcttatataattattccaatctttaatatactatttgaatgaatgtatatactattcaaagtaagttaacaaatttgaatgaatgtatatactattcaaagtaagtaagtacaatgatttttttagtgtctatatatatgacacatatacacaatctacatatgtattatgtatatatatgatgatatatcatggttggtacatggaa

SEQ ID NO: 12661 - DNA, 562 bp, Cannabis sativa
tagtaccatttagatacccatccagtcgatgaccacgaacaatagcagacaccatggtcttccacaaggtataattgtttctatccagtttcaaagcaaagggttgagtgagagtagtacctacatgaggtccgactatgcttgttgctggagctgaagtctgagcaacaccactggttatgctccttgctgtcgatccttgttctccatgcactggggtctgatctgccatagcttctacaggaacggacacaccaccggtgttgacgagctctgataccaagtttgaatacagagataaagcagagcagaggagaaaaatatgacagcagtgaaatgaaagaatcagctcaatgaattcattggcttaatgttgtatttataatcatcagtgtaccgtacaagtataatgacctaataatatttacacaatcacaaggtaatcattacaatcattacaagggaatattctaacaataattggttacaacagtgggaccacacaatcctcaaatgccagcacacaccttctagaacaataggaaatttcatttcttcacag

SEQ ID NO: 12662 - DNA, 505 bp, Cannabis sativa
tattactggtgtcaaatattttcttttgttcattgatgacttcactcgtttttcttggttttatttacttaatactaaaggcaaagcattcaatacttttcttattttcaaaaatctagtttccacacaatttaacagcactattcaatttgttcgcactgattggggtggcgaataccgctctctttctcattttttcaccaaccacagcatccgccacgacattttttgcccacatactccccagcaaaatggtcgtgttgagcacaaaaattgacatatcatagaaattgacttaactttgttagcccatgctcatttactgctctcctattggccatacactttctctacagccatttatctgatcaatcgcctattaactcgtgttcttcgttattcaagtccctaccaacttctttatcacaaagtcccaaattactctttactttgagtctttggatgtcagtgctttccatgcattcgtccttataacaaccacaaa

SEQ ID NO: 12663 - DNA, 795 bp, Cannabis sativa
taaatctacgtctgcattgaccaattaaaagcagttaaatcacagttctatgattttcatataataatcgcatttatttatgtggggcgtaattaaggcccataattttggggagatattgttgtgggattcatatctgattgtaattaactgccaccctatgtcactataaatagggacaaaatgtacagaaaaatggacgaaaaatccttgagagaaaagaaccctagtttgtatcagaagaatctgaataagattgactcgtggactatgcagaattaactgcaaaaccacgtaaaaacttggtgttgtttttgctttattattcttcttagaatttaactaattcgtaggcggatcctatcatgaaataggcttattatcgttaacgaaaatcttcattaatagtttggtgctttcattgagagcctacgtgaaaaaagctcagaaaaaatccctcctgaccaaaagaaaaacttttctccatggctaaaaacggggaagatgacaatattcaatatgaagagactactcaccatcctagaaaagagccggcgagctcacggaggcctcataactcacaaacaacacgatctacacgatcaacatgttcaaggaggaactaacctaaaggtggccaaaacccagaaactgggaatgaagtacccaacaatgacggtggtggaactcctagaagttggggtttttatgaccccaacaggtttgtttcattagttgacttggaaaatttccaactcaattgatagttggaggaggcaaaccgaataaacgcag

SEQ ID NO: 12664 - DNA, 827 bp, Cannabis sativa
aggtgggccctaggtataagcctaactcacttatgcctagggctgggcgtactttcaacatacgtcaaattgcttaatgttaaatttaacacaattaatacatatttttatctcaatttgcatcttaattttctattattagagcagtattacaaaaaagtgtactaaatatagcattcactaactttttatgttaaatttagcacttttttttacctcacgcattagagatgggtttagagcatccaatggagagatacaaattagtgatttattactcattttgagaaatatttgcttcaaaagttgattcaattttagatcacaatatgatgatacaaaatttacaacacaacaattacactatttttatgtttacttttaagtcatttctagtattttattattaaataaagttgatgcattaaattataaactttttgtatttattttttgttgttttacatgataaaatatagagcatcgccattaggcatcagtggtgcctagcactttctcggcatgtcgcgttgcgattggctagcgatactttctaaaagctattatattaaattatgtgagacccgatacttagttgaaccaatagcgatattaacacataggagagtgctaggcaccagtggtgccctttagcatttcttttatatataatgataaaggtattattttttatacttttgatgaaaatatttttatttttttgaggctattaattaaatattaaattttgcattaacttttccaattatgtattagacacaatactaaaagttgatttcaatatatcacaaaaatattttttgtgt

SEQ ID NO: 12665 - DNA, 647 bp, Cannabis sativa
  modified_base (93)..(97): a, c, t, g, unknown or other
gtcgtagttataccatttgatgtaacacactggtagcttgtttaagctttagaatcttcgattccattcttcactacaaaaaatcttactttnnnnnacaacaaaacttgtgactaaaagttaaaaaattgtgactaattataaatcataattcttacgttgcgactaaaaggtccgtagataaaagtattagtcataaaaattacaatttgttgtgacttataaatgtatttttagtcacaaaacttgttgtgactaaaactaaattagtgacaacttgtaactaaatactatattgttttagtcacaaataacattttcttgtgactaatagtcacatttagtcacaaaaaaaattatgttgtggctaaaaaattatcactaaaaataacattttttttgtagtgcttacataaaggcatcatctcacactgttttacacgtattctatgggtttatgtaaataaagaaaagtagaaagatagaaaattctcttttaaagagtattttgagcatttataaccattctctctaaatacattttatagtaaaaataatgagtgagacttgaaaaaataaacttcaagtactgatcacatttttaccgagtttgacccgaacttcggtcaacccgcccgggctcgacc

SEQ ID NO: 12666 - DNA, 1267 bp, Cannabis sativa
gtggctagccaatccggtgttggtacctaaactgaacggaacatggcgagtctacatagacttcactgaccttaataaggcctgcccaagggattgcttttctttgccccaaattgatcaaatagtggacgccacctcaggttttaagttgttatccttcatggatgcctactctgagtacaaccagattaaaatgcatattgcggatcaggaatgtactagctttaggaccgacaagggggtatactgctacctggtcatgcctttcagattaaaaaatactagagcaacctatcaacgtatggttaaccagatgtttaaatgcctcctgggaagaaacatggaggtatacgtagacgagatgctagttaaatccaaaactaacatgagccatgcagatgaactcacagagtgcttcgaagtagttcggagatatgggatgaagcttaatcccaaaaaatgcaccttcagcatcgaattagggaaatttctaggatttaacgagagtcaacacggaatagaggcaaacccttaaaaaatacaggccttgttgaacatgccttccctaaaaaaacacaaggatgtacagagcttgactgggaaagttaccgccctaagtcggttcatctcccgatcgaccgacaagtgcatccctttcttcaatattttgaagaaatgtcaaaaattcgaatgttctaaagaatgcgaggaggcattcagaaaattgaaagaacacatggccaaaccaccaatactgtcaaagccggatcaaggagaagacttgtttttgtatttggccgtctttgagaacgctctcagtgcggccttggtctgggaagaagaaaaagtacaacactaagtatactatgttagcaaacgcatgataggggtcgaaactcggtatccttggatcaaaaagttagctttttgcctcctgatggcctcaagaaagctaaggccatacttccaggcccattccgtcaaagtacttacaaatcacccactccggtaggtcttgcagaaacttgaggcctcagggagactcctcaaatgggccatggagttgaactagttcgatatacactatgttctgcgcatctccataaaggttcatgcactagcagacttcatcgtagaatgtaacgaagcaaaggccaacaccagtacaccagcccagaagatgtcgacatggaaagtgtacgtcgataggacgtcaaatgaaagtggatctggcgccaaaatagttatgatatcactagatgggcta

SEQ ID NO: 12667 - DNA, 658 bp, Cannabis sativa
  modified_base (338)..(347): a, c, t, g, unknown or other
agattattattgttgttggtggtggtgtgtttagtttaatttataattaattagtttttaattttaatcacaaattttattgtaatataattttttatagtctaaatgtaattgatttcttataaaataagaaagaaagaaagaaacgaggttgagaataatcttatacattactgtgtttgttgtctccggtgggacttttaatttcggattgtgttgctcttatgcaatcctctcttttgtttcctatttcaattaattttgttaaagggttcgggaagtagacggttaactttttaactcgttcttctagttctattcctggctgtgtttcccgnnnnnnnnnntccctgctggtttggaagctatcttgatagctgatttcttttaataaagtttaagtttttggttcaaaaaaaaaaacattcaatccgcataagtacagatttttgattttccaatccaattcaattcgcacaagtagggatatatacactttgcaaattgaattagatcgttgaattgattattttataaacactcctaatcaaaatatagcacaacttttatatgtctccttaaaaatgatcttaaataatatataattattcatgatgtacgtttgttacataacattaataaagttgttgatgagttc

SEQ ID NO: 12668 - DNA, 1134 bp, Cannabis sativa
tcgtgtattcagttactaacatatcctcactctgcaccaattcgataaattctttctgcttagcactgcgaactgtctcattatagtacttggcattgaataaatctcaaaactcttccgaagtcataatagtgacgtctcgggtgagggacatcaattcccaccacatgagggcgtcttcttggaactgaaaagtagcacaggtcacctaatcatttacaacgacccccatgaaattcaaaattctttctatcactgtgagccactgctcagccttcattacatcagacctccgaagaacactggaggtgcttgcttgcaagacttcttgtataacggctccatatgcttgccagcaacaggttgttatgctactggcaccgcaggactaaaacaacctgagcttgtagtgggggcactacaggaggaccctgctaccttaatctcagaatttcttcatcttgctggcagatacgatcttacattttcgtgaatctttgctcccaatctagaggagcttgaggtgggttcacatatcgaccaccctggaacctttcatggcctctaccgcgacacggggattctgggaaatttgatttccctaatcgcctccggtcttaaccctattaccatgactccttgtattttgttgggcgtccatttaataagacttagcttgcgaacccataagtcaggcaggtcagacagcgatcaaaaaaagtaaatcccgctcttatggatttaaggcatcgcatcaaaataaacaattataaactaatatgcttcctaacatgctttaccaattacatacaatactaaacaagtaaaggcttattgaaccgtgagccgagcttttctctaatgatgattgtacatgtcttggcgatcttcagtagataaacctggcagctctgataccaaaattgtaatgccctaatactaaggcacggtacagtgattttttaattacagtgctatctttgctaatcaaagaaattttcttaaaaatcttgtcgaattaagactttataattaactatgaaactttataaactttgtatatatatttacaaaagtcgggatcccattgttaaactattttacaaagtattccaaaatacaaaagttaggtcg

SEQ ID NO: 12669 - DNA, 963 bp, Cannabis sativa
atactaccgaagaggcctatactactgaagttcctagacgcataatcatggtaccttgtcgtagtgggagggtttctaagaactcaccttattatgacttggatgacactagtgttgacgattcattacttgttcaaacaagcaacggatagtcaaaataaggaacaaagaatcaaagctaagagaactatggtttaaccattcacattgagcaacctagagtttttagaatacaaggataagatagaaaaccatgcttagtctattcaatggacttaaacaaactttccattcctagtaccaagggtttgatgagaacatcaaagcctatgacttgcagtatacatggtaatttacatagatggtatcctagtcattggaaacaatgattgagcaattgtcaagacatgttaaataaagtaacttgctctctcacaagcagcttacattagtaaagagctaaagagtttttcaaatggttaactctaatggaggtcacctaatttctagacatggactttatttatctaaggagttatttccaactactctagaaagataaaggtcaagaaaaggattcactaagcaccaatagtaagaggtcttatgtatgctattgtatgcactaggccagacatctgctattgagtgggagctgtgagtaagtatcaatcaaaaccagaaaagaaacattggaagataatcaaacataacctgaaatacaagaagatgaactatttgttagtcgataagggtggtattttaaaacccttaggctacaccaaatcaaatttctagacttgcgtcagtgctagaatttctacttatgagatggtaattactctagggtggagcagtgagttttggagaagtgtaaaagcctatttgaaattactaactctatctatcagtaaggctaagtaataaggatgccctgatggaaatttaggaattattcagact

SEQ ID NO: 12670 - DNA, 639 bp, Cannabis sativa
ctataagttttacttttgtttatagtactactacttagtagtaatagataagtattttgaattatttttactatttagaatgactattatataaagatattttaatatcattaaaaaaatttcttttaattatgagtaaataagaaattatgtatattttaattttaaaaataacttctcaaaaatcttttaaaaaaaagttacaaatcataatttcttccaaaaaagacttttaaattaaaaaaaaaaaaaaatcttcatttcttatccaaacatacctagaaagaatttacttctaaaagctacaaaaagagcttatagaagctaacccgaatggagctatagctagcctcaatgaattcttgcgtttggttgggaagtaatgaaacgaaatagaatgaaaaataattaacttttattatattatattttattttattacattttaaagtattgaaatgtcatttcaatagaatgattttttttatcattttggtagaatgactattctattttaaaataataagaaaaaccattccaataaaaggttaatttttttattttttattccattcaattttctattctaatatttctcattcccattcgtgaggtaagataccttaatttgttctttga

SEQ ID NO: 12671 - DNA, 746 bp, Cannabis sativa
aaacatgtaatcacatatgcatctaattatactgatctgaccttatttttcaatttaggtgtgctggtcaacctgagtggaacaactgctcgacgattgacaggcctctatgtcacaatattcgtgaaactgatgagtgacatgttaaattactttcaaaactaaaagtttccctatcgaaggataacatggcaataccttaaatatcgcaaaaacatgaaaatctagggtaccctaaatttccctaaccagtagaccagttcccaactggaaaattggtttttttggggtctacctagggaggaacgggaagaccggttctatagtaccaaacttaaccggtcgaccaattcagtgcatgtaccacaaaaaaccccaaaaacacctcaatttaaccccaaatcgtgtataactctccataccacctatacatatcaaaaagaacattatacatgtaaaagaactcaacattagtctcaaaaacaaaaaataccatgagagagaaaagtttgagcttaaactcgctaaattcatccaatataaacataaaaaaactctaacatatttaaacaatttgcacagtattctaattcaagaaaacaagccacaagcttaacttacaacctaagaaaactaagagaaaagagtttgggaattttaccttagattggaatcactgaaatcttgctaagacacgaagaatagagttgaaaaccctggcttttgtgctggtttttcctaagggg

SEQ ID NO: 12672 - DNA, 583 bp, Cannabis sativa
tagtatagattatatcagcagcttgacatgctgctattaacttcaactttgttcagataatgtttttcattaacattttcatagaagatcatttctctttacagggaaagctaaaggtgttctatatgaagatgatgacgatggatatgaattcaccgaaggtcaatttttgttgacacattatgttgctgaacttcaatcctcagttgttacaattagagtttccaaaactgaaggatcttggaagaggccaagtcgtcgtctgcatgtgcaactattacttggtggaggagcaattgtatgtcttttttattaaaaagctgttaggttgggagtagcaaaaacagagaggattgagaatagagtaaaatttaatatacataaaaaaagttgataagaaattttttttttattttttcaatcttgtattgaaaggacctctcccattttcggaaggaataatcattttaccatacaggtggaaaagtcattcctttacattcattctatttcattatttccaaccaaactcactctaagggtatgtttggttgggaggactgaaacaacagaaatggaaatg

SEQ ID NO: 12673 - DNA, 757 bp, Cannabis sativa
cttccaatgaatgcccgaaccagatgagttcgaatcccaccagaatttattcatcatcacttcaatttggttaatcagtgacttagagaggcggaagcaactcattgcatatgtcggaatagattgagcaacggcttttaagagaacttccttaccaccaatagaaaataattgttcttgccaagccgaaaaatttttccatagcttttccttaatctcagcaaacaagatttttttatcccatcctgaatatgatggtagacccaaatagcgctcatgacacggttgtattggcattaaaaaaatctgttgtagacacatttggattgaagggagagtatttggggagaaagataatacagacttgtccacattcagcttttgatccgaagctcggcaatataaatcaatggatgatttaatggcagctgcagaacgttggttagcacggcatagaaccaaactatcgtccgcgaagaacaagtgagaaacacttggagcaaaacgtgaaacccgtaaaccttgtaaattaccaatagcctcatcatgttggaaaagtcttgataagccttccgcacatataatgaaaagataaggggataagggatccccttgtctaataccacggcttggatgaacagtcccttgaaccgagccatttataagaaacgagtaagatacactctgaatacatcgctgaacaaggtcgaccacagttggatgaaaacccaaagcaagcatcatgtgttgaataaaa

SEQ ID NO: 12674 - DNA, 587 bp, Cannabis sativa
tttaagataccaaaacttcatttttataagaaaagaatatcgagataagcctgtaagagcaattcaataaagatgccgaattcaactagtgaattgaaagtgaaatctataatagatctcacttgaattgccctcatctattttttgaaaaaaagtttggtttcaaactccgattttcgaataagagaagtacgccatgttaatgcattctgattatttacatctcagggtcaaatatttatgagcacattaaagtatctatgtagctttattcaagcacaactgactcaaaagattatgtaaatttgtattactataatgcattattttttttaatgatatttttattattttattagtttattattacatttacctataatattaaattatagatttatgtatttttttttattttgtttacctataaaattaataataaaattattttttatattaaaaatattaatcaatcaccaaatttaacaattatcaattaatattatttctaggggcgaatattaattttagatggttaaacgacgtcgtgtttcttttttatgtttttgccgtaaaatcaagacgac

SEQ ID NO: 12675 - DNA, 890 bp, Cannabis sativa
tattcgttatccatgtccttcaagttattacacgtagttagtataatgtatatcatacgctaagtgttctaacaaccagtttgcctcgccaacacatctctacatattgcgaggtagatgcctcgctatatattatcgatgtcctccttgcggttatgtcttctgacactaaatagtttctcgttaatacgtaagtcaatagttcttatatacttgtctcgctaaaaactgtgcagcctgtgaattataaatataccctaccaacttctgcatttaaagagttattccatttaatatttatcaatataattgctattatatttgttggttcatattccccgagattgacacgtgttgccttctgaggtaccagctgaatttcaggtataacaattacccttaaaaagtccctttttagtaaaaggtgctttttaagtaattaccaagggtatatttgtcataattctttttgaaaatgtgcatgcatttgattttggcagttttatggttccaatgcacatcaatagcatcaatgaaccatcttttccagttctcttctatttttatccattggatcttttgtattctgatctaatggttactaaattcagggtataaaacggtaagaatccatttatccaccattttcatcttcttcaaatactcaagccttctgaaaaaatttcatgtcaattccctgagaccttgcatgccatctttatctttgacattcttcctgcgaatctattcacagttgatctttgactccaggtgttcaaaaacctcatcacaccgttcatcacgtcttcgtttacagaattttccaacacctgactactcgacttcacacagtaagtgtctcatacccttttttttttctttttgttttt

SEQ ID NO: 12676 - DNA, 1197 bp, Cannabis sativa
tcacaacatataagcatgcatataaactaaacataaacatatgaatcactcagtatccatatcacacattatatatagttcttaccttcttttccagattcaagtgtgtaggctgacctgaacggaaagtcttgtgctaaatgaatgccctaatcacataataaaaccgggtaaatcacataatcaaaaaccctaatctgggtaaatcgcacattacgtgcggttggattttgtttaaaatattttttaataatagtaattaaaaaattctcccaaaacataaacatctaagaaggaaaaaataattaataaaggaaaatttacaactttatgtatattttagtacttaattacattatacgtgcataaaaatttattttcaatttatcatacattttattaactatgagaaacatatttttaattttatatataaactgtgtataataaaaataaatgataaacatataaaaatatataaaaaaacaaataataagcatacatattttaattataaatttgtttttaaattttaataaacatgttatatcaacatatcatcacaaacttggtaaaaaaaacatatcatcacaaacattatcataataaatatgttagattaattattaataaatattattatcaataataagataaacatagataaacatagtgtttatacataaggtcacatttaattataattttatttatttttttaaacatatctttcaatatctaataagcgtaagtgttacattttaaattgtttatgatcttttaataaacaaaaaaatatttatttaaataaataaataaacttacgcgttttatttttaaaattgttttattttttttaataaataaattatatctattatcatactaaacaaactagatgaataatagcattataaacattatataaataaattaaaagttggaaatgtgtttgtatatttttttttaaaatttcatattaaattttagtaaacttagtaatatatcaaatataaatattaacttttatatttacatatttaactttatgtgttttttttagaaagtaatcaaataatttaaattgtaaatatatttatttataaatattaataaaattgtatagaactatgtcattatgtttttttgcacattttttctgtaaagttgtatatttagttgtatataaatgaaaat

SEQ ID NO: 12677 - DNA, 550 bp, Cannabis sativa
ttgctattgagtttttgtttatttagaggtaagacttaatattacctctagtaaaaatatttaggatatcataaattttaatttaaaaaacaataaaaaaaaactgttaaataattatgaagtgctacatcaatatgggtgtagtattgagcactgtaaatgtgccatatatcaaagcatctctaatgaagtgctaaaagtgtggtacacatgtatattttagtcgagaaatgctaaaaggcaccagtggtgtctaataccctcctacgtgtcaatattagtattggtgcaattaagtatcagatctaatataatttaatgtaataaattttaggaaatacaattacaagatgatacgttttgctaggcaccactgatgcccaataacaatactctattttagcctatctttataaaagtgaactctctataaagtaggggccaagatgcaaaatggccctaaatctaacaattaagttaataaatgtccctttttataaaaaattaacaaaatatccatttagtaaaaaaattgatgatgaaattacaa

SEQ ID NO: 12678 - DNA, 531 bp, Cannabis sativa
  modified_base (308)..(317): a, c, t, g, unknown or other
aggtttgtgcattcctttatatatcgatatattgatttttataaatcatctaaagcaaatccaaaaaattgacgaaaaatgtaaactgaaaagaccaacaaaaatataaccggctctcaattggtatattaggcgggttgaaaataaaactaatccgaccatttcattggacaagttaagtctattgattttttctttagtttggtaagttgcacttatatttttgtaaagtactctttgtagtataaattgaccaaatctactatcatacacccctacttaaagcctttctctctctctctctctcnnnnnnnnnntctctctctctctctcttttgtgtcgttatacaaacttgctacggtagtgaaaccttcttttttctcattgtggtcacatgcttcccggtgatggcctcctcaagtggtagaaagagaaatcgcaaccttcatcagagtggcaaagtgtcggccaaaatttggggtcgtagccttctttagagtacttgcttcgcaagctcgtgttgcagctac

SEQ ID NO: 12679 - DNA, 518 bp, Cannabis sativa
acactggagagaggctgacgcaaatatctcctagcgcaggatagggtcttgagttggttggtttctctgatacaaaccacgccaacttcctccccagatttacctgaaaccataccaatcttcctctgggatgcttcatcagccgtaggaggatctttgagatcgctcactagattaataccctctgggaacacttgtgaggatcagccatgccaggtcacggggttcccatgggttggattagtcggaagctcctcagccttggaatccatcgtttctagtcccaattgaggcttgaggtgtgtaggaacgaatgaaaatcggttggtgcatctgtgtattacgagtatgggagaataaaattctgaagttagaagagacattttgacaggaaggaagtaatccattctgaaaatggatttcactaaagagctagaaggtttatgaaaaatgacaagcttgagccgtccttttatacacgaagtacaatgacaagaaagccaatgattgagaaatct

SEQ ID NO: 12680 - DNA, 515 bp, Cannabis sativa
ttttttttttttttttcctaacaaacactaaacaatattttcattatccaaaaaaaaaaaaatgatataatagaaaattataaagtttaggcattttgtttattttgttcttaatttttaaataaatatcaaggacataggttatttgttaatgttctattattagttattgtaattttacaaggtaaaattatttaatacaaaataagatacaagacatgtttttggtatttaattacaagacaagttaaaatgttaaaagagattggcaaaattctttttacatatcttgttttcgttttttttttttttttatgagaaatatctcttagtattttgcttgcaaaataattagaccaaatatgttggcttctataagaatttttttatttaattactattatcattcttaacctagttgcttgtttttcatgaattcattaagacatgcttaaaaataaatttctaaacaagattttaagtgacacaaacaataaacaatacccaaaaaaaaa

SEQ ID NO: 12681 - DNA, 641 bp, Cannabis sativa
atatatatataccataaaataaaatgataaataatgatcaacttgtaaaagaatatgaaaatatctatatttaaaaaatatcaaaaaaattcacatatacattagcatatttaattaaatataattattattagtgttattaaattcccatggcagagaactttttttcttttatttttggtactaagaggaattatattctaatttttttttatatatataagaattgtgtataatattgttatataatagacatcttacatgtttttaatttttttaaataatttcaaatataaaaataaagtttaaataaaatagtaagttgcttatgtattatattttcaaaaactttaattattccgaattttttaaaaacgtaccatatgtgtttatgaaaaaaaattaatatacacatcaagcaattctaagatttttcctataaatatttacttaccaaaatactcctactattaattttgcactctctctgtaacgttttcactttaatttttattctttgtctctctatcggacgaaaattaaacctcgtcgagtcgagagaactccgcctcgactatgtccatttcaagttatatttgaaaaaatatatatatcaaaatataattcttcctaaaataaaa

SEQ ID NO: 12682 - DNA, 560 bp, Cannabis sativa
gaactatgtttgtatgtttaatgtcaatacactaagtagcttaaagttattaaataaaataatagtatcttcaaccatgttctctaaacacactccttaacagaaataaagagtgagagttgaaaaaaataaacttcaattatacaaaaatgactttctatacttttttaatactattattttttcattgtgttataaaattaatttatatttgataaatttaaattataaaatattattaaagtaatcaaatactataaaatagaaagcatgattagagcaacaataataaaaataatcatattttagctttttaacttgaaaaataaaatagagagtaccattagagatgttctaagtatttatactgcaattatacctataacttatagtcacataagtgaattattttaaaacggttacaaataaatttttaattttaatttttaacggtaataatacatatgttatatttctgtaacttcgtaggtatctcgctgttaaatatcaagtaccagaaattttaaaattataactatatattattatcgcaaaaaatt

SEQ ID NO: 12683 - DNA, 859 bp, Cannabis sativa
agctttgggaaggcaaactttctcccaagaggtcatgtgatacttgtttctctcatctttagtgccccacaaaaaccctctacacaatctttgcacttcttttgtaacactctgagggaggacgaagatattcatctagtagtttctaagcccaagcaaaactgtatgaataagttgggctctacctgcatgtgaaagatgtttactagcccaagtgtgtaagctttgcttgattttagatatgacaataccacaatcttcgattttccacttcgttaattgcagagggactcccaaatatttgagagggaatgtcccttcaataagagtcaaatctgtcgtgatatcatctttttctctatctttcactccaccaaagtaaatgtgagacttttgggagtttatggagagccctgtggtgttactgaactcatctaaaacagatttaatcacaagaagagactctctagtcccttttctcaagataattaaatcatcagcaaagcacaaattaacaagctttaaacatttgcacataggatggtacctgaattttgagttttgagttgcagcttgaagtaactaagtcaggtattccatgatcaaaacaaatataagaggggaaatggggtctccctgtcgaagacctttagccccattaaacctgccttgcatccgaccattcataagtaaggtgtaagaagtgtttcgcacacaaatcaacaccctatccacaaatttccttggcaacttgaaggcattgaggagatcttcaagaaaatcccagtacaccatgtcataggctttactaatgtcaatcttcaaagcacacttgggagaggaattcttccttctatag

SEQ ID NO: 12684 - DNA, 646 bp, Cannabis sativa
agctaagtatttattttgctgacagaccgcacattctgtcacaatctgttgaacgattttcctcataccctgccaatagaactcagaagccagacgttgaaatgtcttaaacacactagaatgtcccccgacattactacaatgatactcatggaggagtaggggaatgaaggatgatgtgacatgtagaaccaatcgccctttgaacttgagacacccctgaaccatagtgaatcctccactatcctgtccccgagcaaggtccttggtcacttgagagagaaaggggtcggctgtaatttgtcgctgtaaatccggtatggacagcaaggtgggtactgagatggccacaagagaaacgtccccattgacccgagagagtgcatcgaccgccctattttcaaggtcgggtttgtattgtatttcgaagtcataaccaaggagcttggtaagccacttctgatgctccatggaaaccaaacgctgctccaataaatatttgaggcttcgttggtccgtgcgcaccacaaacttgcgacccaaaagataaggacaccacttttggattgccaaaataatagccatcaactctcgctcataaaccaaaatcatgcgcgcacgagtagacaaaaccttgctgaaatag

SEQ ID NO: 12685 - DNA, 544 bp, Cannabis sativa
gagattttgaagattaggagtgcagtgattggaagcacctgagtcgggataccagttgctatcatccacaggattgatgtgagctacattagcttgagcagtaggagagtttgatgggggaaaaactcctgtaaagcttttatcaaatcgataaaagcaatcaagaacagtgtgtccaagcttgtgacaaagctggcactgtactcgattggaagaattgggaagcctgcctcctctactgaaattagaaaaaccagtagaaccacgattgttagcatagtttggaataggagagagattggtgaaattacctccactgttattattgctaactcgattgttgaatcctcgtccattgatccttgctgaaccagaataggatgatgttggaaattgccttgattggtaaatctgttgccacgattggaatagttttgataggcaatgttggcttcagataattgatcaaagtcagcagtagcaacattaacactcatgtcagtttcttgatcaatatcaatcttttcgattcgagactcggagg

SEQ ID NO: 12686 - DNA, 735 bp, Cannabis sativa
cttttcataaaagtagtcatctttttttatttttttcttcccatgttttatactctagtattgatataatgctaagaattttatgtaatatattattttttagatttctttgtaagtttcaagagatttcttttttttatgcgtgagttttgcactctttttatgcctgcagcctgttatgtgtttttagctcaatgaaaaaggatttttgtccatttcttatggacaacattgatttttttccctcgttcgatctctctatttttaatctggtattgcatttttctttcaggtttgcggttagagtagtggtggtgccgtggtggtggtgttgcggcacgcggtggtgctctctcgtctctaaaaaatatctggttataattaccagattttattattttttttttcaagtttttttttgcttcagtttataaccgaagcaaaaaaaaaatcagcattggtgcactagttttttgcttcggttatgaaccgaagcaagaaatttttttttgcttcggtttataaatgagttaaataatcaattagcgtcggttcataactgaagcaaaaaatatcactatttgcgtctgtggacatagcatcggttacaccaaccgaagaaaattctttatatgtcacttaaaaaccgaagcaaaaaaccctttttgtagtagtggtagttagagttgttaagcattttcttgacgtatttcctgcggagttaccgggattgcc

SEQ ID NO: 12687 - DNA, 964 bp, Cannabis sativa
aacttggaccattgtacaagactctcatttttaaagggctatttttttttttttttttttgaaaggaaaggtttttattattattatacatacataaaaacaactataattaaaagtttaagaacatatcttaaaataaataaataaataaataaattagtaatggaattgtgatcttaatgtaaatgtctttcttttttttaataaaaaagctcaattttaatctttcgtacacggttctcaaaatgcttgggcgggccttgttctcagcccaccaagcaaaaccgatagtttcttggtaagctggttggagctattgtttcaaacagtttcaatcaataccatgtgtagcattgccatgacatgttggttaatgtagaaggcaaggaacaaaactgtttgaaagaagaaaaattcctctgttatggaagtaattgaatctgccaatatagctcttgatcaatgaaaaaaaaacttaagataaaatcactctaacatccttgtgtctcgacaacaagggtgagggctctgagttatggtctaaaccagaagaaaatacaattaagataaacgtggatactgcgatctttgaacaagaggaaaagtatggcttcgatattgttgctcgtaaccatcatggtagccttattgcaacactccggcaactgttgtggaggtaagtttgctgctgaatttattgaagtgttggcaattaaagagaccttgaacttgattaaagacaaacattgggaacatgttgagattgaaactaataactgttgtggaggtaagtttgttgctgaagttattgaagtgttggcaattaaagagaccctgaactggattaaagacaaacattgagaacagattgagattgaaactgatcgtatggtctcagtgcaagccatacaaagtaatcaatcaatgttttctacctttagcttgttagttgcggattgccaaa

SEQ ID NO: 12688 - DNA, 826 bp, Cannabis sativa
cgggcgatggtgaactttttgtggttgactcggtatcctgaagcaaaactattcaatttggcggtctctccctcggatcattctccactgttcttggatatgttacaacatgttaaaccggctggggtgaatttttttcgtttcaaaaattattggactcggttggaggagtgtgagtcgattattagagaaagctggaatcgttcgggagcgttgcaaatgcaacaaaaactctatcaatgcggctaggatttaaaagcttggggaagtagtgttgctaggaatttttcagcaagaattaagcaatgcaacaatgatcttaaattgcttaaaggtcgctgtgatactgaggggaaacaacggtattcggacaccaaacttcagctttttgaaactctaaaccagaaagaaatctattggcaccaacgttcgaagcaactgtggctcaaagatggtgatcgaaatagtaagttttccattcaaaagcttcttctcgcagacgtaataataatattatttgtttaaaagatgatatgggagagttgaaatattgggacgctggcttgggtgagttaatgcttgattattattcaaaaatgttttcggccgaacctggtaattgggaagaagtattgagttgtgttgttcccaaggttgatgaagagcaaaataatttcttagttcgacccattgaaactcaagaagtcaaagatgcattattccaaatgcatccggataagtctccggggccggatggaatgaacccaaaattttttcaaaagtattggcacattgttggagcggatgtggtagcttgtgttcagaa

SEQ ID NO: 12689 - DNA, 620 bp, Cannabis sativa
cacttataaaaagtattaacatactttaataaattttgtaacaatcaccttgatatagagactgaaataaatattagtatctgatcaatttatgtgagagaccataactaagcacttaacaacagagccaaaaaaatttactgtgagctacaatgattatttctttgtattgaaaataaatttcatatttgttatattttttattcatttgaaggtagattgtttcagaggtgcaaccaagcctatattctcaaatttgatgagtctaattattggcactgatcaggaatttatgagaaagtttgtaaatagtaatgttgttatgaattgagaaagaattcaattacatcataattgttgatggtcataaattatatttgcttgaatgctatattgtaatttgtatcaatcttcgtctttctttaactgtgatgatccttctgcttttagtttttctaattgtgatgattttttttattagtgatgctccttctattcctaattattctactggagtttcttcattcgaaacttccttgaaaatttcatcccccaaactcagaactactatggccaattaactttatctcaagaaggaattatacaccataagatggatg

SEQ ID NO: 12690 - DNA, 618 bp, Cannabis sativa
  modified_base (490)..(492): a, c, t, g, unknown or other
tttctatgtagaattccgtaaatagaacgtcctagactgtcagaagttatatgcccctcagcgagttcacacacacaagcgtcaaaagttccactcgccaccgaccttctagacttttatttaccttggtctgcacatggtaatttgataagagtgagctactaaactcagtaagaaaatgtgcgtcaggtagtcacataaataaaaataaaacacaactagaacgtacatgcacatattcagacaaatagcaatacataaacataattttattactagtaactaataactaatttttaagttaaatcacataaaaatgattacgcccgagtctaactttggcaaataaatccgagatattggactaaatggcacagagctgggttcagtaaaatcgtacccactactaaatggccccctatctatcatatagaaccaacagtcaagtatttaaccattatcttctcggtcaaatcatatcacataagcnnnaatctatctaatttaaataatgtttaactactatacattatttaaatagcacaacatgtcatagccataactttgtttaaataatgtgaattcattgtattgtccattattcaaactacatgtaca

SEQ ID NO: 12691 - DNA, 600 bp, Cannabis sativa
ggtttttcttgtgtaattccaattcatggtggttttgtcttttagaatctgcctgaagatgcagccgttggtattgatccttggtgcatttcaatagacactgctcaaagatgggagcatggttttgtcaagaaagggcaaaagttggttcagacatccactaatttggcagatgaagtttggaaaaacaggccaccagtggaattaaatcccgttaatgtacagcctatggaatatgctggccgttctgtggatgaaaagttgaaggatctaagacaaaatcttgcacaacaaacagctagaggcataattttcacatcacttgatgaagtgagtttatcttttcttatttcctaccaagtctggttgtcaatggatgtcactagtctttgatttcttcttgattttgtcttatgattggaatttcgatttcgcaggttgcttggttgtataatattcgtgggagtgatgtgtcctactgtccagttgttcatgcatttgctatagtgactttggattcagctttcttttatgttgacaaaaggaagatctctcctgaggtcagttaaatccgtatatcatgttttcctcatggagaca

SEQ ID NO: 12692 - DNA, 1072 bp, Cannabis sativa
  modified_base (188)..(189): a, c, t, g, unknown or other
  modified_base (977)..(977): a, c, t, g, unknown or other
caatatttaacaactgttttggtcaagcttttagcctcctagatcggcttattttcaactttgtttttatatttctttttttttttttaatgatgtttttatatatctattaggtaagaatttgactgttttttttttataaatgaaaaaatatctcttttttatatttattaattaaaaatattttnntattatattttattaaaatatagttacttttatgagtaggttgtttaatatacttatacttaagtttaagatataatttacattaatctaaataagatattatctataaaattgagttatatcttaaagaatacaaaaaattaaaacaaataaaataaaatgtatatataatataatttctacgtttttttttcactaatacaacttttaccaaattactaaaagacttagtagctgttaatataatataaacaccacaaattataagacaaattcttaattattaaagtatctctaattattttctatatagtaatgtcatgcagattaattattgaataagtttgtctattatttttatattaattaagcattaatatataattaataccaaatatctacttaccaaaaataacccacaatcaacactattaatatctcatacataaaaataaaataaaaaaaataacacaaatattatttttcaaaaaaatacattaataatatattaaaatatggtctaaatataataatattaaaaataaatataataaaaaatataaatatcttcataaaatattattaagatgtcagcataattggagcaacaataaattaaataactctttattttagctttttaactagtttagttaaaaaataaagtactattggagatgctctaataaaatagtgacttaaaaaataatgattactccatatactgttttttttttttttaactttttcaaatttacggtttgaatttctaaagtggttgcagcgcnagttgcaataggggtttctatacgtttttgttgcaatttaggatgcaacgttatttgcaatagagtttctatgtatgtagaatttcgtaaaaata

SEQ ID NO: 12693 - DNA, 951 bp, Cannabis sativa
ttttttttttttttttttttttgaaatgatggatctgcaagcaagaagtaacaaaattggaaattattaaacaaatgttctctttttaaaaataaataagagcatatatgtaaacagatctagagcagagatagagaaaagaagataaataaatgaataagagataactaaagtacgtacccttttggctttggtaattatagattagagattgctgaaacaaacactactactgcactagactagaatctttccttttctcttttctcttttatgaaagaaatagaaaagtatacagaaagaaaatggaattgaaaaagaaagaagaatggcttaaactgaactcaaaagcagaataaagtgaatgtttgatgaaaatgaaaaggaattaggaacacactagtatacagattttgtttaatagaaaaaaagattggaagatggaaagaagaagggatgaaatgaaatgaaactctctctactcactactcttctctaattaaaaactacatttggactaatctctctgcaacaaacaattcaaattaatacattgtatatttctagctaagacacaaaacaaaacaatgtataaaatacagaatggtgtgaaaacagagaatatatacaaacaataatatataataatatatagtaaaaaatgacctatgatgggtcaacaaattaatgtgactcttatttcttaattataaaaataaaagatacgcgtgatgaataagtgaataaattaataccaaagtaggtgattagttcaagtgagtctgccactaataataatgttacttttgcttttaacatatattatctgtttgttatctcttctaagactcttctatatattcacttagctaaatacaagatcaaatattaaaatgaagttgatttggaaaaataatgactgaaatattacaagtaataaataaaagcata

SEQ ID NO: 12694 - DNA, 798 bp, Cannabis sativa
tcttgggaatagtactaaaagataataatatatatgaataatttttaatgggtattacctcactacaaaaaatattatttttagtgataactttttagtcacaacaaaaaaattttgtgactaaatataatttttagtcacaataaaaaaggttacttatgactaatataatatttagttacaagttgctactaatttagttttagtcacaacaagtatattaaaccacatttagtcacaatatataaattgtaatttttgtgactaatacttttaaccacgaactttttagtcacaacataagaatgaaaatttataattagtcacaactttcttacttttagtcataaattttgttgtgactaaaaataagattttttgtagtgggcccattgatggttactaaataatgtaactataaatattaattttaaaaatattaaactattagattttgatctaatgacgaataataaaagaaattttttaatttttatacttaatttagctacttaattaaaaaaaatatttttttaaaaaatactttttgcattatatcaaaattatgtttatatacaaaaaaacttaagtcaaactcaatttttttaccaattttttttttaatttttttcagctaatagaacaactccgccagctcatataaaaatgagagttcttttttaattagatagaaaaactaagcataaaattcaaatttttataatattacctacgaatggataatactcatcaaaagtgcacccatatataattgaatagaataacaataataataga

SEQ ID NO: 12695 - DNA, 521 bp, Cannabis sativa
tcactttgatctacaccttatatctatgactagatttaagaacatagaagagtttcatggataaacaaataactataatctattcagaattaacaaaactaaagatgaagaagtacatgaaagaaactagttgagaaaacataaacaaaaatacataaaactttcattaaatggatagagaactcaatagcttctaaaactttcataaaagggttgattaacaagaataatagaaacatctcaattctcaatatctcatacagtactcatacatcaacaaaaggagaaaccaaaacactaccatagccatcaaagaaaactttgcagtgattaaatggaaaaaatgattgaaaaccgagatagaaagcaattccaatttagatgagcctaacaataatataggattccttacctacatgaaatttatatacagaagacaaaggaaaaccaaaccaagataagaaactaaatagaagttacaaggtttagaaacatttgggccaaaatctctgataaacaac

SEQ ID NO: 12696 - DNA, 617 bp, Cannabis sativa
aaacaacatgtaaaccacaagatataacacatataaaatagagatgtgagagcaatcttaacatcacatacactgcaagtgtataatagaagaatcactaaaacttgaacaagatattataccaatgtccaaaaacttatttttccctaccacaaacacttgtagaagaagaaaggtagaaatcactttttagactatcaagcctataaagtttctaacaaggtactttcttgatagaaacaagttatgacactaaatgatattcaataagttggtgatgaattcatgaaaccccattaaaatactattacaaccctaagtttagcttgcagattgcttgatatcaatttcagaactataaccttaagcttatgttcaatcgatgttttagtagcactgtaagaaggatattcaattcttaaaaaattgaagataatcactgtttcttgaatagaatatttggaatatattcatcagcatcactaactttcctgaaagaaaatagagaacatcaaaagctaatgatcataattcatctagtccaattatgtatgattatagtaaacactagtctaagttgtcatctagagaatattcaaagaacaattttgattaaa

SEQ ID NO: 12697 - DNA, 1107 bp, Cannabis sativa
gtataattcagaccccatatgaatttatgcacaactttccagtactagaattaacacataaaaagaaccaacactcgatccattaggaaagtcagagttccataattatagatcatgtttccagccatccacgttattagattcctaaaatagaagttgtaagaattattttctttgagaaactttaacgagtgaataagataaactaataacatgaacatgagttcatgattactcaggatttaggccaatctactattggtcatcgttatgatatgaaattaggtctttataataaatgatatgttaataaagacaactttattcataccgttccttgtcatatataatctatattatatacaacacctttactttgatgtcatattacatccgtaatttgaattgagattaattgcattgaagaacgggtatcaatgaaccgtattagcaaccattgattaaaaattctatatttttaatatgttactgactattttattcatagctaagcggtcttagttttctgtacaactacaagccacatcctcatatatgaataaagaattttttgatattaaatataaattattcaataataaatattaataatttaacattcaatgtatatatcaaaatattcaactctttattaataactagaaatatctttatagacttttcatagcataaacctcaataggtacaccgttttttatgtcatttgggaggggcttcactatttttcatgctcaatccatttccaccaataaaagtctaaatccaaaataccataaacctattttcggccatgaaaatgaacttgaaaaagtttcaaaaatctcaagaaaatgaggttgatggctgagaaaaataaagttccaacgattcctactatcaaaaaactcaatttttcccattaaacactcattcgaaaattattgtgtcaaaaagaattttgaaaaaaaaattggtttgaacccaaatgtaagccctagaataaaatgagatggctctaaataccaattgttgaattttgatacacaatgagcatgttattaacaataaaacatgctcatatcatccaagattaaacatttaacttta

SEQ ID NO: 12698 - DNA, 639 bp, Cannabis sativa
gtctggggtctaggtctggagttggagccgcgaccgagtttagggctagggttgggattgggttgggtctgggtctagtaagacgtcggggagtctgggttcagggctagggccagagtccgggggtagggttcgggaggtctagtaagacgtcggggttcggtctgggttcagggctaggtccagagtccagaggtagagttcgggtttggggttccggtgagctccgaggtccgtgtccgagttgggtccgtggtctagatctaggtctgagtcggggtcattagtaattttttaaatatttaatttattatttgtcattaataatattttgatttttaaactaatttacctcttaaaattttatcgcattggagcaacataacaaatattgtgctgaatataaaatttgtttattttttatactaaatttaacacaatatttatatttatagattgaattagagatagtcttacaattattaaaaaattaaatatataaataatacactttttctcaaaaagaaaatatcataaagttttttgaaaaaaaaaaatatcataagtttaaatctccacccaaatgtaaaaaaaaaatctaaattattttactttaaattccgatttgaaaagagtaag

SEQ ID NO: 12699 - DNA, 645 bp, Cannabis sativa
aatttaatgtgtcaaacactataacagatgatatattgttattgcaggtgttcatatccacatccgatctaatatatatattgaatgttaaattttattatttgatctaattcaaataatttcagtcatccaatcgattcaacatccatttgatgttggattagattggttctatttgttagatgtattacatatatatttgttgatttagtttggatttatccaaaattttagacctagctatagtatttttttttggatcggatcgaaaccatctaatattttaggtccagtatatattatattggattggatccatccaatccagaaaaaaaaaattaatgtaaattttcatgtatacatatatattttacgtataacaaaatcaaatctaattactcatccaaactaataaaaataattaattattagttcgattagatacaggatgtattagatttttggacacctccgatatccgatcaaatccaattggatatttaaaaatagcatccaatctgatccgatcctaattagatatctaatgtttggcggtcaattataattaaatcggtcggttgtcattggattgaatcgatttatgtacactcctagttattggtacattaattttaatatctgatt

SEQ ID NO: 12700 - DNA, 1387 bp, Cannabis sativa
  modified_base (647)..(648): a, c, t, g, unknown or other
  modified_base (1214)..(1219): a, c, t, g, unknown or other
ccgatgactcatgctctttgtttttatttattttatgtcattctatttttgttgaaatcgaatggttattttcccttttttaagaaagttgaaattggggatttcccgtgcgcctttttctagttgtccgaaatgactttcacactgccatttttcctttcctttattgctaggatgttctgcactcgatgtttgcctttgtagatagttggattcctttttggcagacatccggaggggcctctttccagcggttaggggacccccattcccctttttaattttagggtttgatattggggctaactgctgtatttttattgtttcaaatgagtgaagtccttcgtgaccttcacccgcacggtttctttggatttgaccaagaaatccttgatctataccaagtccactccatgtcgacccctactatcactggagtgaagttgttatacctgaaatttggctggaggacacgtgtcaaggtaaaggggatgtgaatcggtgccatatctttttatggaataactcattaattgcgtaagtactagagtatatttgtaacacactgactgtaaggtcttaggcgaggaatcaatatacaaactggtacttagtgtattaacgagaaactatatgtcgctaaaggnnaatagcgaggcaccagagaagagtaacacataccttagctacaatacgcaaatcaagtgtcaaagtcggaccggctcggagtacaagaatgcgagatgaccatctccctacgagaaaaattcctatagtttcatccaactaacagaagggagactcataaccctggcaagtcagaagatttccgtatacccgcaatcgacgtaaaacatatcttgtcgatctcggaaagaagaatggttccagctcaccattgggatcactacaatcaagtttctatcaagacatctctagattcaacaattaaagacatatttaatacacgatatttctgatccagtaaaagcgggaaaatcacagctaaatgattttcaaaatcatacaccacgtttacatttcatgatatgtaatcagatcccacgatttaagggataatgactgtaattatattttggtcagccttgtaattaactaccactatgcaattataaatagtggcgaacaatctcaaaaaaggacgaaaaaactcttatacaagaggccctgaaaaaaaatactcagaaatctgnnnnnnattgactcgtggactatgcagaatatttcgacacgtggcaattttaaaaaagtaaacgacttacttaaaattaggactgaaagacaaataaaaagcatgaccttaagagctattaccgctattttttgaagttggagacttatgtgtgttgaatctctctgccattga

SEQ ID NO: 12701 - DNA, 500 bp, Cannabis sativa
ggtggtgagctgtcattcccctcgaacgttgcatgactgcacggattcgtacgatggagtggaggtgaggaatgatatggagaatgtcaaaaatcgtacagtgggtaggtgcaaggtggatgacgtggttgtgcagataccacctcgtggggaattagaagcacgtgttctccctgatattgggcctaattttttaaatttaccccaacctgattttgccttggtcaataatgaggaatctatacctgatattggacctactctagcccaatgtattgaagtccctcatgattggctttgtcgttcccaaaagccccactcctttcccgagcctttacctatttgttggcccagtaaagactctgaagcccagaagttatttttccaattgtatggacctgatttccttaatctctataaggcccagtaatctatcatatgcaacccgcctgatctatccgagatgattaatcacatactgggaaataatagaaaaagaa

SEQ ID NO: 12702 - DNA, 783 bp, Cannabis sativa
agcatttttttactataaagtcaactcacaatgacattgtaaagacttcaaaaaacttgaaaatgacattcattgatttttttttttaccatgatagtaaaaatattgtcaatatatactattatttatagtaaatttagataaaataaaccaaaatggtaaaattttcatatttcactctttaaatattttgataaaaccaaaaataggcaatattatccactaatatttcaaggtaaaaactctaatggttgtctttgtccatagccaaaaacttttgttctatgagatgaaaagtaaattaaaactagtaccacattggtaagcaattctccaaaattgaaatcacttgtgaataaaaccctatttgctgttaaaaaaaaaactaatcagacattgataattaattcaaagcattaagtccattaattctacctactattgattattactagccaaaacaagaaatctaaattgatctattatagcaaaccatattcatctaacagtctattagtaacaacaaaaaaactcatggctgctggttcaaatcaaccacaccctctaccatcctgcatagaaaaaataatatcaaaattaattaattaattaattcattaaaaattaaaatatatatgtagagagagaaacaaattatgccaagttacactggcatgttatggcggagcaattcagtgaatcgtcacaaacacaatactctccacttcggagaatttgctgaaattatttcccaattattttacttaaattattaaacaatat

SEQ ID NO: 12703 - DNA, 598 bp, Cannabis sativa
tgttatttaatcatggaattttgggtatgggcaattttggtaatttgctaaggaagacttttatctttatgggacttaagaaatctgagggttttaatttatacagaggttagataattctagaaaaaaatcaagttatatcattagaaaatttaggaaatttacattgatctttctctctctttctcttgaattttcaagggagcagctagagtttgagggctgcttgatttgtttcaaggattgttggtaagaattgacaagctttgatccaagggccctataaagcgtcgagctgcaattctactcaggctgaccggcacaccagagcacagaaacgaggtaagatagcataaataatatatgtgtgtgaatgtatgcttgttattaattgtttacacgactaacactaacagaaatgtgattttaagggtgttagtacagtgtagaattttagggtagttacagtgttaccaacacgagtactagggggtttgtcaagcatgtggtacaacacttagtgactcccaggagtacgataaaggccctaccaacacgagtatgagttggtactttagtggatatggtacagtggtca

SEQ ID NO: 12704 - DNA, 563 bp, Cannabis sativa
gatatcattgaatattaaagaatttcagcaagaagataagatggttttgcatacattaaataacttgtaaggtaaataagtaattttacattattttcactaaattttcctccaacttagtgggacccacttgctcttttttcttttcctattacttttacttttctcttccaaacaaacataggataagtcttggttagtagtataacagaagagtttcaacaaggaaatcaaactatgaaggtttctttctagttagttggttgtgtacaacaattttagcaagttaatcagacaagaatgttgcttacatgatagttttatacaccaactttttagcaaccaaatcagctgactaattagtttcgtaaacaaatttcaacaacaaaatcatagaagaaggaagatatttgccgtgttcttttaacagatatttatggcataattacttaaagttttatatttgtaatcggcaaaatagtaattcggatagtctccattcattaaatggtgactaggatgactagtcaccatcaaatgttaaccgttcaaagagaaattca

SEQ ID NO: 12705 - DNA, 658 bp, Cannabis sativa
tgcctaaccaaacagaaaataatacctaaacagaatctctgtatcatctgtaacccctgccttgataatccaaccccaaataaagccaataatatattaaataagtagttgcaagaggaacaaattaacaacttttaaccaatttattctcatcccaaaagagtgaaacattatattgtgttataggagaaagatcaagctcaacaaactcttttcaattgcagaattagtctaataactaaacaaatatatttattaatttgctagagtactttaagtttccattttatttgttgagtttgaaaaagaagaagaagaaggaaagagttttacactaatacactgttgaaaagggtaacatcacatgcatacctgagataccattgtttcccatgctgcaccagcaatgctatgtcaaccaaaaaatatgaaaatagagagtttgggtgagccaaagttaagaataattatgtgatgggttgtatacatgaagagaatataattcatcttaagacaaattattaaacaatttacaattaactatttctatcttcttcaaacctgctcaacaatttcatgtggctgaagattccttcaaaaaaccccaatttccagttgcacaaaatgagtagtgcaaagggcagccaacctaattaat

SEQ ID NO: 12706 - DNA, 529 bp, Cannabis sativa
accatgttaaatagaaggccaaaatcatatcagtccccttacattaaaccacctcatagtacctccacttgtttttcttatttttctaacaagagggaaaaaataataattatcttatatactatttaattttgtttaaaaaaattatagtttggatttctaagtaagttgctatacggattttagttgcgatttatgttactctattagttgttataaaagtttttgtatagaattccgtaaaaaaaaaaatctgtttttgaaggttaaaaaatgaaaaaaaaaataaattatttttgttgttttgtttttaattacagctgtaacttaaaaaaattaatgattaaatgattaacaatgagttgagaaatgtgtgtacttatttgtgaattctctttaattggaaactttcgtatggattgaaggttgagggcatttctcccgtttcgagattcacaaattcaatttcactggacaccttaattacgataaacatatataaaaggaagcataatcaatgtagaacaat

SEQ ID NO: 12707 - DNA, 1289 bp, Cannabis sativa
  modified_base (1053)..(1057): a, c, t, g, unknown or other
tggtaaaatatttccaacataatcttgaatttattagagctttgaaatataagtccatggtcctcgagtcacctctatacaatactgtacgggaaaaagttttatttgaagaatggatcttgagtgaaaattaatttctacggggaataaattcttaagggcaaaataataatttgtgaaattattattttgattaattatggcaattataaattgtataattaatagtatttaactatttagttttattggataaacctatattaattagttaaacataatattattattaaataatattattattattaaataatattaaagaaagaaatatattattttagagaaaataatatttattttaatctttgtgaataataaattaatgagaattaatcaattattatttattgatagaataaataataaatcttctttttaatcaagaataatatttctattaatcaaacaagccatttacaaccaaatagggaatacacccacaactttacagcaatacttacaaacttttagcatttctatgaacaatcctctcaaaactagaaagctttctatcgtaaacaagagacaatctagttttgagattctctttaatgcttctatctatatacattggagctatatattttctttaaaaaatacacaagtttccattaagccatataccatagatggcactagctagaattacatagtaaatttctattgataaacttctcggcctttttccttggagccaatcaagaagcaattgaaaagaatttggccaaagccactcccccagtacaaaataataaatcttatttgtggcaaaattgaaaaattaattttggaccttaaaatattgtccacacgtgtaggcctattctattcgtgtagagtgatatataaaggcccatgattaatttgattgaattattttattggttaaaataatttaaattaaattaatttaattatcttttaattattaattaagtatattattgaataattatttaattaaaaggataattattaaaataaaagatnnnnngatattttgatattcggttattagatatttatatttgaattctgaattcaaatcaaattatatatttatcttttactttaaataaagaattaaagactttatttattacactatatatagggatatatagtatcataaatagcaagacttgagaaagccaataaaaagagaaataaaatagagaaaataaaattggtttttccaatcctactcactttctctctctctctct

SEQ ID NO: 12708 - DNA, 864 bp, Cannabis sativa
tagtacaatttaatattaagactagcactttttgatttaatagataataaccacttaaaatgcgccatatcagtatggtattgcaccttaagatacgagcattaatagattttcctagctctcgacccccttgagttgtttacccattggtggcattctctaaagccattttttttttttaaaaaaaaaagtcacgagctgacgagcattgttataaggcaccaatagtgcaacactatttagaggcgacaccttatgattaattagtgataatagttattaaattaaataatatgagacccgatacttaatgctaccaataacgatattatatcttagaaggtgctaaaaactactaattcattttagcattatgagaattatttttaataggcaatcataaatagcttttaagagtactatttagtatttttgcccctgaattatgacatatgcattattgtgcccttaaaatttttcagtctattataaataatccttggactattcacattattgtaaattagttttttttatcaaattttgtcacacatgacaaaacaaaataataacatagctgcttagccagttaccacatcatataacttaacattaaaaaaaaattaggcttttttcaaaaatcattaaactaaaaattaattaaagattttttttaaattaattacacacgtgacattgacatgtgatgaacatgtcatgccattattttatttatcacgtgtataaaatttgacagaatgatcaatttacaacaatgtgaataattcaagaactatttttaaccgactgaaactttcaaggggcacaacaatacataaatcacagttttcgaagggcaaaaat

SEQ ID NO: 12709 - DNA, 523 bp, Cannabis sativa
ttcagacttactaagaaagggtaatctaaacacttggatccaaaagggagtaattgtgtaagactccattggtgcattctgcagaacacttggagtgcagagaatcatatgctggttgtgaaaatgccaaggttctttagataaaacccttttaagatccccttcacagccgaaagtaaccatgtaagactcaaattcatagttcgcaacagtaactgcaaacctgcctttccaatttgaggagataaagttgttgaattgcttaggattatatcctctacgagagtagattttgcaaataagttgatgagtggttggccttggcggtggtacagcaatggatgacaagttaataacttctctttctcgagtcgatagagcctgagaggtatccgggtggaaaaagtccatgatagtggatacagagaacaataaactatggaaaacaaaacagaaaaacgataggagaagggcggcggagaagaaaaggcatgcagatggcgattagaatgagggtggtggg

SEQ ID NO: 12710 - DNA, 634 bp, Cannabis sativa
aaaaaaaaaaaaacataattgaccttaaattttatattagattttaaacttaattttttgaaaatcgagggttgattaatcttttttatttatttatttattttttggatcaaaagtatgattaggggactatttttttttttaccgtggatcacccatatactactttttcacatttattttttctctttttacgattttttattttggttttttatttttattttttacgatttaagttgctctattgtttgctatctagattgttgtgtgggttgcaatgtagattgcagtttgaattagattacgacttaaattgttccgttaattgtactatttattttgtaaaaatactttaaaatgtataaatgaaaaagtagaaattacacaatatatggaaaaattataagagtataattttatggcataaataaataataccatgagattatgggtttttttttatatatatttatatgggattttttatgccagattttttttttttgtttttgtaaaaaaatatggaaatcccatatttttacatatttttaaaacaataataagttccgccagaaaagtcgtcggcatcggaaaagtcaccagaaagttatcggaaaagtcaccatcaccg

SEQ ID NO: 12711 - DNA, 554 bp, Cannabis sativa
ttccctcagcttccaacgccatgatgggataactggccctatgaaacttgaaggcagcaggacccatctaccatctttgcctgaatttcccaataaggcatgaggtggatgtcaagaggagatcaacaatctactcatcacagcttggccttgtctaaagccaagaaaaaaaggatgcacccaccagatcaggagcatacaagcttcgtgacagacttaggcttgtgctgctacaaagtcacgccctttagggttgaagaatataagggctacacatcaaaagcttcatgatgttcaatgatcttatcagccgcaatgtagaggtgtgcgtggagacatgcttgtcaagtccaaaaggactgggggcatatgaaggaccgatcctctgcagctacaacatgaagaaactcaaatccagacaggatccaagcccttttgaacatgaagtcgcccacaacaattaaggaagtacaaagccaaacaggatgcactgctgcactaagcaaatttgtgtctaagtatataaacagagattaaacaaaaaataataatta

SEQ ID NO: 12712 - DNA, 643 bp, Cannabis sativa
agttgtttccccatttagaaggaaggtgtagtggtttgttgtgaggcaggtcatgataagagtaacccattgagagcagaaccccatcctttccataactcccttaacaaaaacctattcaacgcgatcgaaagccttagacatatccaatttcatagcagcaacacctttgcgaccagccgtcctgattttgattccatggattagctcaaatgccactaagatattatccgtgatgagacgattaggcagaaaagcactttggttctcagagatgacaagggggaggacaggtttgaaccgagccacaagaactttagtgattagcttggagatgacattacaaagagcaatgagacgatagtctttcacgaatattggttttttcttctttggaatgagtgtgattattgttgaatttaggggtgaaggattggctccatggttgagaacatttagtacagcagaaacaacagaatcacccacaatatcctaatgtctttggtagaacatagccgacataccgtcaatcccggggcttttgtcagatctcatcgaaaatagagcatctttaacctctgatgaagtgaaaggcttgattagattaatattcatttcaggggtgatggtggcaggtatacaa

SEQ ID NO: 12713 - DNA, 675 bp, Cannabis sativa
tatatagaaattttgtttccttcattattttctcaatagtaatgttttgaaggtggatttcgtcaaatatccagacgaggtatacctactctctgatcatgcaagattgaggaagataaaaagttagtagaaacaaatgctacatgagtaaaaatatagaaaagggatgcaataaagactatgttttgtcaagattgtatcagggtaagacttgtgtagatattcaacacccttgtgaaataaagtttgaaacatgctcgagtagtccatgcacaaccttgctgctgctttacttagtagcgaaaataagcttattactagtgataataatagtaatagtgatgaatactgacaagaatcatggggttccatcttaaaaccaattggtgatgagtgggtaggttatgttcttatatatggcttaatatttttacatttaatctatgtgagacaatgttgtccaataaatacacacctggtgagcaaagaaaattcagaattttttatttttagccagcgaagaaaacaggtttgttttcttctatattttttttgtaaaaacaaaattttagtgtatgttttgtgaacattatcttgttataaatattacaggaaggtttaaagtttgtgctaaaagaagtggttatgatttagttggagaatctgttaatcaaa

SEQ ID NO: 12714 - DNA, 558 bp, Cannabis sativa
aaaaacataaaatatggattttataatttaagttggctaatttttgtctgcattaatttattgtgtccactgaattttttactttgttaaaaatagtctctgaactatttacagtattgcaagttgttcattttgtgaaattttgtcacacgtgacaaataaaataaaaatatagttgcttaacgagttaccacgtcaacgccacgtgtgtaattaatttagaaaaaaattatttaatacgtaattctttaaattattaattaatttttagtttaataatcttttttaggatacatattttttagtttttaattttcaattatacacgtgttactgatgtggcaaatgactaagtagccgtatcatcattttgttcaccatttatgacaaaacttgataaaaagactaatttactacactataaataatttagaaaccatttataacggattgaaaattttaagagaataaataagtcataaaatataatcattttaatttgcataaatatagaatgccaatttcccaaaagaaatcttctgtttctctctgaccctc

SEQ ID NO: 12715 - DNA, 650 bp, Cannabis sativa
tatacaaggtgttgtactcttccttcttctcttgtaagcatgttcggtgactgctaggtacacgcctagctcttctttgtttaggggtttgggtaacataggtggctgagtcaattgtttcttcagctcctggaatgcggtttcaaattcctttgtccacttgaattttttgttgcctctgagaatgttgaagaagggtacacatttgtctgtagacttggacacaaatctgcttagtgcaacaatgcgtcctattttgtacttccttgatggttgtgggccacttcacgtccaaaaggtcttagatcttgtctgggtttaagcttcatgttaaagttgcgaagaattttgaagcattcgtctaggtcctccatgtcaccagcgcttttagacttgacaagcatgttgtccacatacacctccatgttgcagccgataggatcattgaacattctgttcacaagcctctgatatgtggcccctacattctttaaccctgaagggcatgactttgtagctatacaggcctgagtatatcatgaagcttgtatactcctaatttaggggatgcatcttctttttcttagcttttgacaaggaaaagttgtaacagtaacattcagattgttggtctcctctcaacatcctac

SEQ ID NO: 12716 - DNA, 614 bp, Cannabis sativa
agccggcgtgttgactacccagcccttttcgagactagtatttatactttttaggatattaacaggaaattcttataaaattagaaaaatagaagaaaaaaaaattataaagagacacctacacatttgtgtgttttatttatagtgcatatgtaatatcccactttactttataaacaatgcgggattattaacaaaaataaaattagtaaataatcgtattttttaggacattaatttaaaactctcacagattataaaaataaaaagtaaagaaaactatttacatacttgtgtgcgttttttttttttatatataattatataaatatagagtttttaaaaatttacgagtagtacatgtagagaatgaaagtaggggagaaaaagagagagagaaaatgcaaaagaagctcactttattcaactgaagaaaacgtatttatacaagtacaaaaatagagcaataagctcataacagaattcagttaactaccattaattaactaacacaactaactaacttaagcaaaacagaaaactaactaagattagtgagctatgttaacagcacatgatcataccaaacaatagaataaagcattttccgagat

SEQ ID NO: 12717 - DNA, 527 bp, Cannabis sativa
ctctattgcagcaatcaagctttttctcgtgagattgaagaatgtactcttggtcatccattcatctcaggaattcgcatctctattgagcatatacatcgcaattagtagtgtgtggttcttcagctaggccagcttggttgatggcctctctaagtttggctaactcgagatcttctcccaagtccacatggggctcaccaatttctagtcctatctctccaccatagtactggagacgagatctagttgttgctcctgggggttgttccccaaggttccttccttcagttggaggctccagtggagggccctccctcggaggcaagggcctgctgttcaaatccaccagaatgttcgtgtcactctggtcagctgtagtgaccagattcgaagtgccttctaaagcggtaggattgacaacatctgtagtgttcatggaattcagtcgtggctggaacatagacatcatgatctgcagtctgagggtcttcaggaagacatgaagatgcagatggtgtaacatg

SEQ ID NO: 12718 - DNA, 733 bp, Cannabis sativa
ctggaattgataactttgtcaaaatcaaatcaattataagacatacttactgagtgaagcaacaacacccttccacctcttctccagtccattgccactaataagtaagcattttcataagattcagaactcgcaatttgattgcacataacagtaaattacttgaggctagatgaagtgattataaagtgtaataggatgcttatgtggagtgatagaatctcaaattgtacaatataatgtatatctagacactttaatttaaaaaaaaaattgtacatcgcaataaaaatattttccataaataaataaatgcatttttcagtatttttttcttttagagaaatcgatacaggttaaaataacaaaagcaataaaattatgcaaccagatgagaattttcttccatctataagagttcattgtctatcctaagggtatgtagagataccacatgagaactaaaaaataaaatcttaatatcagtatttttaattgtataataagatattaagaattattacacggaaaatataaattgagactttatttacaaaaatacttacataaggtgtggacaacatttatacttttatttttaattacttttcttacactatcacttatacaatccgacgaatgtagttaggtggttggctgaaggttgcattagacgaaggtttcaatcgtacgaaagttattgggtggttgattgaaggttgaatcagacaag

SEQ ID NO: 12719 - DNA, 577 bp, Cannabis sativa
attcaatagcagccttggagatgaatgcatcatgccttaagcagcgaataacgagactccaaccttgggattcaatgagtgcttcctgcagtagaacaatgttaaaatgattggattagaaactcttttaattgttgttttttttttcatactttaatattaaatgcttactttgagcgacgatttgtttcaaaaatcgatggatcaatgcgaaaggaggactcaatcggaatgcctaagtttttgctaggctcaaatgaactcaataccaccagggaagccaatctaggttacctagaacaaacaaggcaatcaatctctttcgaataagccctacctaaacactttccatgttgagcttcggttaagaacccaaatcgttttcgtttagaaagtagggattaagaacccaaatctttttcaatcgtcgactctaacagaaggagtaaaattgaatgaccaatcggaatgcctaaatttttgccaggcccaaatgaactcaataccaccagggaatccaatccagattacccagaataaacaaggcaatcagtctctttcgaataagccccaccta

SEQ ID NO: 12720 - DNA, 511 bp, Cannabis sativa
tagcaagggaacttccaattacaacactactggaatgcttgagagcattagtgcaacaatagacgcatactaataggacaaaagcacaaaacacattcactacattggcaccacctgaagttaagatactactggatagctacacatactcgttgaacctggaggtcaaatatataatatgcattttaaatttaaaaaataaaatcattctagagcattcatgttttttcgagaattattttagggttgttatactattattttgaatgtataataaatgatgttttcaaataagacaggtaaaatcaaccactgattacttgtttgaggtaacaagagtgaaagaatcatggacaatataccttaaggagagaacatgcatgtgcaacaagttctaaatagatgaaataccctgtggacatgttgtggccgtgctaaaagagatgaacatggacccatacaactactgtccaaaatactacacaaaggaaaaatagctagaaacttatgc

SEQ ID NO: 12721 - DNA, 639 bp, Cannabis sativa
aacccacttgaaatggtctatatatctatatattattttgtgcttttcaaaactctctcataatggaaccttatatacattttttgtccgatatatccagaaaaagtgtaaactgttaatatcatgagcacctaaattttaaactttggatatattaatttttccagcattgtaattaaatacaagtgctacccagcaatttttataaatggcgttgtattagttattaatattatctaaagagaattgttaaaattacttttctcggtgttataccgctattagtgtataataactttatattgagactcatataacttaaaaaaatagcttttaagaaatatcgctaaccaatcgcaagacaacacctataaaaagtattgggcactgctggtgcccaatagcaatactcttctctaaaagctattttcttaaacatttattacaccaataattagcaattttcttaaatttatatacatgcatgcataataaggacgtaactacgtataaatacgtacgtacaatatattaatcatgcatattaacaaattacatataattaattagttacgtttgtcatttatacaacccattattatatttctatattaatagaaagttaaaattcacatgtaa

SEQ ID NO: 12722 - DNA, 552 bp, Cannabis sativa
gtggacaacgcctttctaaatggcaatctcaacgaagaagtttatatggagcttcctaaaggtctcaatctacccgagcctatggataaaaattccaacatcgtttgtaagctcaacaaatcaatttacggattaaaacaatcctcaaggcagtggtatcgaaagctttcagacgctctcatacaggaaggattcacgcaatcaaaggctgattacaccttgtttaccaaaggccacaaggaatccttcattgccttactagtttatgtcgatgacataatcctagcagggccgaatcttcaattattacatcagttacaaactgatcttcacaacaggttttctcttaagacattaggaaatctaaaatatttcttgggatttgaaatagctcgagcagtagaaggtctatttctatctcaacgaaagtatactctaacattacttgaagatcacggttttactggcagcaagcctgccaagaccccaatgaaccccaaaattaaacttgatgatcaacaaggtactcctattgaaaatccttcacaatat

SEQ ID NO: 12723 - DNA, 792 bp, Cannabis sativa
aaacatgttagagtgcaaaaggtggaacatgttaagagtgctcaatatctcaaatgatagccgcgcatggaaactcgacccgtcgggaattttttcttgtaagtcagccttctcttggtttacatctaacccgaatggtagtggagtcttctggacaaggctttcatggaaaagttgtgttccttcaaaagtcaaagtttttgggtggcttgtgtctttagataaagtgaacgttcatgataagatgcaaaagaggatgccttacctatccatctcacctggttggtgtgtttgctgcaaagctagcggggaagacgttgagcatctattcttaggctgtagtttcatccgttaattatggatcaggttgataaaggaatttaatctgtcttgggttatgccaagatgtgtaccacaattgatagttagccaattaaatggcagcaaacgtaaaacaaagaattggagaacggcaattctagcaataatttgggttgtgtggttggaaaggaatggtagaatttttgaaggggtcgggagttcagtagaggagatgtgggagaaagttaaaatttagacagctacttgggtttttaaaaccaagcttctcaaggatttgtctttcttagatttatgtagagattggaattcattgttgtaaaggaaatccttaaaaactcttattgtttctcggcaactatggtgtgcttaactatcctaagtgtctctttgtaatatggttttcttccgcaataagtgaggcttcttaatatatttttgggagggtcctgt

SEQ ID NO: 12724 - DNA, 519 bp, Cannabis sativa
gaattcaaagaacaaattggaaaatagaaaaccagaactttttaagttaggcatactacctgaagtgtctcatattctccaaacactgaaagtatgtacttactgtggagcaaaaaagtttcagtatgagaatgaaggattctgttgctgtgctggaaaaatattctaaaagtaaatgatgcgcctactgagttgtttgagctatttacttcaacctctgttgaagcacaattgtttagaaaaaattcgcatctacaatagtaattttttttttcacttcgtttgttgttaaacatgataaggaactatgtacaatgaataaaggtttatatacatttagagtacaaggacaaatttatcattttattgatagaatagttccgccatcagatactcctcctacttacttgcaattgtatttttatgatactgaacatgaattagaaaatcgactgaattttacagacagcatgagcataatcactctaaccaagataagtgctatcttacagtttaatc

SEQ ID NO: 12725 - DNA, 710 bp, Cannabis sativa
atatatgtaaaaatctttatatctatcatattaatatgcatgatgtatataatattattctaaactttgtatctttgacttaaatcctacctaatatctatcaacaacctttataatatattttataaaaaaacaaaatataaatgtgattggtgttttcactaacttatttcaacttttgaaaaaataaaataataataaaaaaaatggaaaactagagaggtggtaggtatctgtatatattctaagtattgtattagagttattattatttaattattaatttaaataataataaaaaattaaattttatacaatttatccatattttttaaatatataaaatttaatctaattttaaattatttttttaaaaaaaagtatatttaacttataattttattaaacaataaaataagtaaataatataactaataaattcattgtaaaatgattaattaaataaattaaagtctaattcaaatttaatttaatatttatattaaaaaaatatttaattttattgatatttttaaatacctatttaattttattgttaaattaaacttaaatatttaatactattttttttcaaaaaaaaaataataattaatattaattgatttaatgatagtagttaagtactttaacgaaaaaataaaaaataaaatcaaataaactaacattttcgaaataaccatatataatat

SEQ ID NO: 12726 - DNA, 667 bp, Cannabis sativa
aactgtttctccggttagattgcattgttcttttctcttctatttttttttctgcttcattttaatcatgaaataccattatttagaaagcttcaattatattttattctgcggactgcttatcatttgtttttttttgtctgtcttcctgtttgtatgatcatatattttttaatttaatcttttatggacattgtaatttcagaaggaggatgtaaattttgcaaattggtcacaccaagccgtggacttcattttaggttgggaaagtacttatgccttttgttttcaatcttatttggttttggtatgtggggataaggcaagaagcactatggctgtctagtgttgatacattgttccttcatcaaacctctaatgaattatatgagttgccttctttgttctgttatcatccatgaaattatagttcttttgctttcatagaagtcaattttacaagctattttagccaataatatactgcactgactggttctatattaatattattaatattactcgtgtttattcatcattgaagcagctttcttggtcttttattctgattattttggtagaagattaaggatattccataaaagggatggtcacattctatttgtagcctcgttgtactagttgtctatctctaactagagtgtat

SEQ ID NO: 12727 - DNA, 1186 bp, Cannabis sativa
attgtggatttacccaactaatgcagagtctgactatgatcaaatcattgcttatgactgtcacgtgaggaataataataaatgtaagagacacatagatttatagaggtttgatcccttttgtttaggccttttagttgtattcactcttgataataccaagcatattacaagttaagaccttgtaatttctagcgaggctctcttcaatattacaatgtgtttggcatgttagaagtatgagaaaagagagatgacttattgctatagtgcttatgagcatgattgaaacttagaacctaagtctgagcatgtgtatcttgtcctttatatagtagtaggacctacaagctgcacatagagatatccctagaaaataaagaacaacatatatttgaaatacaaagtaaataatccctaaagaatagggttgttatttgttgatggaaagtccctacctttgtgggcagtttgaactgttctgaagtcgtgggaatgctgaaggcgagttggaaagcttgtgagaaaaacacgtgctggtgtatttctgcacccttggccggccaaccctgttgaaggttgcccagagcatggaactgtccaccctggccggccagctataggttcggccaggaccttactagcttgtgcacattcctgtcaggataaacttgcttgtgtccactgtgtagccatgggatcttgcaggttggaaggctgcacgacattaatctgccaggtttgaaggttacacagcactaacgtggcaggttggaaggctacacatcactaaactggtaggttggaaggttgcacgacactaacctaataggttggaagaccgaacggtactaacctagcaagttggaaggcttcacgtacaaaccttgtaggttagaaggctgcacgacactaacttaacagattagaaagttgtacgacactaacctggcaggttagtgctaacctttcttctatgtattgtcagctttttgccacgtggaggagacatgtcagttggataaaatttgggataacatgctcagagcggacaatattatactaatgtgggagataagacgactcaacaaaataaaagaatagggcccaacaaaaactttataaatggcaagtatatttttgaaattaaggaaaactgagcactaatttcctttgtcgttcaatt

SEQ ID NO: 12728 - DNA, 764 bp, Cannabis sativa
tttttacattctctattatttattttctcgattaagtcatagtctaaaaatttatgtatttcatcttatttactttcatattgattttaatttattatttctcatctaccataataataataataataattttattcaaatctcttatagcaccccaataataacttttattaatatatgattacgttacttttttaaaaaaaaaaaaaattaatatacctttttcatttgattttggattacaatattcactaacaacattttacattataaaaagtataaggttaaattaagatgcaattattctcaattgattatgctaaaaagatgtgaagaacataaaaaattataagtcatgcatataaaaaaagaattaataagttttttataatttcaataggtggtataaaatatctctcaatttttttatttttttaaagtttattattttaaataaattactaatttttgaagggaatatacttatttggtaccttgtattttacataaataaaactttggtaccctctaatatgaaaaatgtttattaggtaccctctatttgtaaaattacacaggattttggtcaataatcttttgatatagccaaatttaccctctgtttttaattagttaaattatgttgtttcttttttgcattttgaaaaagaattaatattatttaaagtaaaaaaaaacacattaaaatagatgtaaaatagtagaagaagaataggctggccttttcgtctctcacaaggaat

SEQ ID NO: 12729 - DNA, 725 bp, Cannabis sativa
tgatagttcataaagggcgtgtaagtttggttggaaagacttgaagactaaagattgggacaggacaatttatccagtcccatgtttggctccataatgataatacaagtgtcacttttacttctactggtagagtgtttttattttccacattttttatatgaccgtttatattaaagttacagggtcttgccatttttcaaaaaaaatctaaataatgtatggtactaaaaacagaatttaaaatagtaaaaaaaaattaataaaacaaatatatatgtacaactaaatgcttactctgatttttatatcataaattatttgattttttaaaaatgagtaaactactgatatacaccttcacatatccacaaaagttaaaacttaagtagtaagctttttagttagtttgttttaaaatgtaaaattctccattataaaacatttattgtaactgctctaaaaagtattattagtacttattatttagtaccatttttggtatcatatcgatattggtgtaattaagtattagatctcatataatttaaaaaaaataaattttaagagatgtcacttataaaagatactaggcaccactaatattcaataacaatgttcataaatgaataagtgattgattgttttatgcttctatgattatagctatcataaatgataaaaaccgtcagtgatgtttaacactttcctatgtgttaatattg

SEQ ID NO: 12730 - DNA, 816 bp, Cannabis sativa
aaaaaaaaaaaaaaaatgtttctaattttttaaatgtacacgtagaaaactagatgcttataaaagtaccaagttatttgcaattataaaaggatagagttattttaagctcatgagggcttcataacctcccttaatattattttttttaagagtaatttgcaacataaatatttaaatttaattctcggttgcaaataaatatctaagtttaatttttaacagtaattatacttaagttatatttctagaactttgtaggtacctgaccgttaaatgttaagttattatccatatgttatttttttttattagtatatttaaattattttttaaaaaaaataaaaattaatgacttggactaattagggattgtcacgtggtaatttacttaacacttaataactgggtacctacagaaaatttgaaactataacttaggtattattactgttaaaaattaaacttagatatgtatttgcaaccaagagttaaacttaagtatttatggcgcaaattactctatttttaaattatgttattgtaaatttttcttatttttcttttattgccccctcaaattttatttttgcatattgatcccctaaccattacatttgatacaaacaatattaaattaagggctcgtttggaaagtcatatataattagttagatttagagataattgaattagttatataatttatcgtgtttgtttgacaatgtaattatattattgtaattaaaaatattcaaagtatctaactactttttctaattctcatattctttaagagaatttgatgtaattatt

SEQ ID NO: 12731 - DNA, 708 bp, Cannabis sativa
tcaattatttagaatactatataaacttttttcaatatgaataacataatataatttagtaacctagtaaaattgattgacacaattagttttattgattttaaaatttgagtaattaaaaagaaaaagaaactaataaattattttttatttcagttatttttattggtgatgatgagaaatatgtgtctcgaatgtcaaaatgattatctttaaaagtatattacaatagtataatttttaagctcaaataattattgatgaaaccaaaaaactttataaagtttgaaaaaataaaataaaattaaaattataagaaagtgagagagagagatatgtaaatggtatttctgaaagaaaaaaacaaaaagcatataaatgaaaaagcaagttgtattagcaaagaattgagtaagagatttaaagaaaaaataaaatagaaaaagggagtcagtgactctcggtggttagaaaaaaaaaacaaaaaaggaaaagaatctcagtatacgcatactagattattaattgaaaattcgttatattgtgagcatttaaatattagagcgtatttttataaataatttaaaaaaagtgtatgttggggtaattttctcaataagatattgttaatcgctttccaataaatttcggcaatacattccatggaaattacacaagtgaatacttaaaaaatcacagtcgttatct

SEQ ID NO: 12732 - DNA, 522 bp, Cannabis sativa
tgtattaactaagaatcacggctggaagaatctaagtgatggatagcgaggcatccatctcgatgtaggaaggcatactcatggtaccttcactaataagttcgagacatctttcaatgagatccaatgctccgtcgagtcagctctctcagatagaagcagacatttaaatgatgttgactactgaggttcaccttgtcacctagaactgcgattgtcagatggagcattatgtcttcaattgaagaaatgacgggatttacattatcaatctatcaaagtcatgggaaaagctccagctcactgccaggattattgttgctattcaaattcccagcgagatacactttgcagcgtatctaattccacgtcaacattgacccagtaaaagcggataaatcaaaaatgtatgatttttttattaataaccatatttttttacgtggtgcgtaaataaaacccataattttagggaaatattattgtggggtttgtatctgattgtaattaattgccacccta

SEQ ID NO: 12733 - DNA, 784 bp, Cannabis sativa
aaaaatctctcctagataccgttgttagaattcttcattactcataaaatatgcaatatcaagattaatttcatagacaacatattacatattattataagtgtaccttaatccattgataaagatgatctttgtggtaattttggataatgatctttcaagaatacaagacttacgcttctctagttttttctcttaattggggaagatgagaatatagttgctcttttttcttggggaccactaccattatataacttaataggctattaattttagtatttataatttagtcccttcataaattagaaatatctcttaaggtatctacacatttagcacatgatactttaatacccaatggcccacaattactaaaatgatcattttatttgggtcaaattttatatagcaatacataaaaatacatatgagcccacattaaagattttaatccaacaatcttttactttgggctacatatgttttcttatagtgcgtaaccttataagcacttaaattttgatatcataattataggtatttcaaaataatcttatccattgattatactaacatagcatcaaagcggctttcgccacatttagtgtggctaaacccatcactggtcacatatatcaatataaccaaatgacatagatcaatcatatatgtgtagcatgaaaattacatgcaaatgtgatcttagcatacctatctccaactggtcatccttaattaagatcaattctttagtttttctttatcgacttcttcttttctg

SEQ ID NO: 12734 - DNA, 1329 bp, Cannabis sativa
tctcttgatcaatgattggctaatacacaaaagaatcccacacttttaggatatatcatgacagctcatgattgagtgatatcagcagaatctaatattgacagcacaccaaaatggggctgtgatctggtgcggcatacactattgtttaatttaacatgctccctcaaacttggcgtggttgagccaccacagcaagtttgtttttcagatactcgaactgttgaattgagatggcctttgtgaatatgtcagttatttgctcagaagtgggaatgtgcctgattttgatttttccttgtttcacttgatcacggatgtagtgtacatctacttcatgtgctttgtgaggctgtggaagataggattggaggcgagttgtttggcgcctgcattgtcgcaccagattatggcaggcagtttgtgtggtatgccaagttctttgaataaggagttaagccaggccacttcagtggcagtttgtgataaggctctatattcagcttctgtggacgattttgcaacagccttttgtttcttagagctccaagtgataagattacctcccaagtagacacagtagccagttgtggattttcggtcatctacggatccagcccaatcggcatcactgaagcattcgacattaagatctttatatttttcgaacataataccttgtccgattgtcccttttaaataccttaacaatctcttgcactcattccagtgatgttgtgtagggttatgcatgaattgacttaatttattgacggtgaaggcaatgtcaggccggctgagtgtcaaatattgtagtccccccaagaaacttctaaagaatgtgggctgttcgaatagcttgctgtctgtcgcactgagtttgtcacttactgagatgggagttggactctcatgagatagcagcatgtgtgttttgttgagtaaattagtagtgtattttccttgtgacagatgaataccatactcccctctagtgatttcgaaaccaagaaaataattgacagagcgaagagttttgagagagaaaaactgttggagttgggtaatcattgttttgaccttgtgagtgttgttcccagttaataatatatcgtcgacataaacaagaagatataactcagcaccagaatttttgtagtagaacaatgaggagtcggagactgaattgcaaaaaccaagagaaaagagcacatttttgagtttatcaaaccaagcctgaggggcttgatagctatttgtaacttgcacacataagatggttgtgtggggctgacatagcgaaatggttgttccatatatacatcttca

SEQ ID NO: 12735 - DNA, 534 bp, Cannabis sativa
ggatagtgtaattacccaccagcttattattattgagaattaaattctttggcccattatccttccagcccaccaccaacctcatttcatttttactccagcccaacaaacccttgtccacctgttttaatccttgagtgacatttaaatgacacgtgtcattaataatactgcttggtgagggtccatctcttttcctatcccatttatctagacccactttatttacaattcattcttcatacagctgccatatgtaatttaaattaataaaattacttggcattaaatgagattgcacacgtggttccttcaagtctttccacaatcttttgaatatcctttgaatagtaatcgtaccccttgtttctcgtacgttcttattggaactcccaatcgccgtcgacccatcaattatatctaaattgatataatcatcaaagttgagatttatcctaacatgtggcaccctcagacttctccataggcggttaaatatagtagagagattcaccaccttcccctgctcacgat

SEQ ID NO: 12736 - DNA, 818 bp, Cannabis sativa
atgcacaagtacgactaggcacaaaaaatgacagccttgggcacgacacaacacgaaaaatatgtctttaagcacaacacgatatgagaagcacgaaaggcacgacacgtaatcacgaatagactagctcaaaaagtacgacacgtgacaagcctcaaaagcacgaacgacatattaaaaaaccttataatttattattattaataataataagatataaatttatcaattataaataaattataataataaaacttaaatataatacttaatattataattattctataattaaaactattaaaatatataagaaaaatgaaagtatatattaatttatttataaagtgtaatataaaatttaaatatttataaataaatatttaaattctattgatgttaataattatttttatatgattatatgtaagatattgttcaaaaagttatataaatataactaaagctttaaaatatacatataatttaataattgtaaaaaaaaatatttgaaaaagtaaatcactaatttaagcatgaatatgaaaatagactgccttgtttaagaaatacggatcgacataagcaaagcacgatacgaatccgagcacgacacgaaaatactgggcctatagaccatgccaggcctaccgtttaaaaatattatcacgatatggcacatcctatatttttctgtagcacgacacgatacgaatagtttttttgaaaagcacaaataaatacagatcgggccagcacgattagtacgaacttacaatactactcattttctatttggtaagctattacctcaccaa

SEQ ID NO: 12737 - DNA, 692 bp, Cannabis sativa
ctcatagggttcgggccaaatgtaaaggcatccaatgtccttggatgtatttttcctcaaagatcaatagtgatagttcggcatttgctatcaaaagttatattgatgtcgacaaatgttcaatgaaaaagcataaaagatttgccactaccaaatggtttagcaataagtacttaactgaattcaaaagcaatgaaaattggaaaattgcttccttcatgcagaaagtgagcaaagctcatatagttgacatttctagagacaaggcctacaaagctcgtaagcttgcaacaaaaaagattggagttatgaagaacaatatgctgcctcataggactatgctgaggaaattaagtacactaataagggctccactattgagttcgtgacagaagttggagataatgggaatccacagtttaagagaatgtacatttgctttgttggtttgagagatggatttaatgccagatgcaggccattgataggcttagatggttgttacataaaaggaccacgtaaagggcaattgctaactgcaattgggatagatgcagagaacggtatttatcctgttgcatttgctattgtcgagattgaaaataaggagacatggaactagttcttacaatgtctaagagtagatttgaagatagagaattcaaattattggactttcattacagataaac

SEQ ID NO: 12738 - DNA, 672 bp, Cannabis sativa
ttgtcaaagtcttacttcaggagagagtaagcactcacgcattaaaagatgaaggggtgtcactattttggtggtgttcaagaaacaaattggcaaagtaaattataaaggattgcggcaaagctttagagggagtctaaacttatttaagtcaattgtatttataattatttgagactttactaattgatttcattctctgagtgtggccccgtggactaagagtgtttgaaagaatactgatactacgtataattctcttgtgtcaagttttaatattctgccctttatttatgttctattactgcaattttctattatgttactgcatattgtaacaattgtgtttttaatcatttgaatttaataaatatattagcatttgcaaaaacacaacttttcaattggtatcaaagcgggacactaaactcttagtgtggtccactaacgttttcttgtattttttgtgcaatatgtcgattttttacagaagggagttccatttcttgtccaccgcttctcaatgattctaattatccttattggaaggttagaatagtttcaagatgagaaagcatggagaatgattttttcatgatggtctccccttgttgtggtagattctgaaggtaattaaaagttaaaacttgaacttaaaaggtctactaaaga

SEQ ID NO: 12739 - DNA, 737 bp, Cannabis sativa
tttctaaggtatttggagggattacttacgggtgcggttaccctcgaaattattgttccattaagaaaagaatgaagcttcatcaaacgagtgttgattttgtatcgttttgggtcattttaaaatatgagtttgtttcggtcttttattttatttgtggtataatcagccactctctttgagtttgaggtctactgttcatgattcgttcattctggttacctcaaataaatatttagtggttgatttaacctgtgcaatttaaaactaacgtttgttaaacaatatacgaaataacagtgaaacaactcaaaaataatattagaaaaaccataacagtcccagtcttatgtttgagaatttaaagtgctcaaacaacaggttaaaagaatttcgagatctatgtttgaacatcatttgtaattttttacttaaaagaatttgagtgggtgtaaacttctaacatttttgattcgttgatttatgttattgacgaagttttcgggtgttgatttaacgttgattttaatgattctgctccatcttgtaagaattaatagttgtttttcgactattctagtgttactctagtggttcggtccgtatgtattttggagtgtgtacaatataaaagaaaaaaaaataatgaagacaatatttttataaaaaatttcatgtaacagtataaaaacttgccaaaatttattattttagtaagtacccctttaaatattgac

SEQ ID NO: 12740 - DNA, 603 bp, Cannabis sativa
gtaaatttttttttgacgccgtattaaaatcatacaaaattaacaaaataacaatttacaagcagcagtagtactttctcgaactaaaatagtttatcgtctaataaaaaaaccagtaattcacaattggtggcggtactttctcgaacaagaatagtttatcgtctaaccgaaaggtatgttttgcgctgcaaaattcttattttgagccacataagacaaaactgcccccaaaaatttagacaataaaattataacatcctcaaataacacacttatagctcattaaagaacaattttcctttattgatagctgtaagaagagacaatgaatatgaacaaatctctttaattaggattccgcacgagagagcctaactgagtccaaccaaaagtgtcaaagtctcagcttgtaatactaaaatactacctgaaaacaaacaaaactataaaataccacaataacaagatataagtatacacactcgtatgctaaataaaactaaaaacaaaaactcaacatagtacaacgaaacccaaactaaggacgaaactaaaaaaaaataaaaaaatacaacgtaaagcataaaacatcaaaacctg

SEQ ID NO: 12741 - DNA, 512 bp, Cannabis sativa
tttcgacatataaagtaatgtttatgtacggttcttggtgcttcaaaatttaaacttcgtaattttcaactccaaaagtcgcggcccaaagtcaagagttaggctttctacaagaaaaataaagaaatggtaaaagtaaaaaaactatagtgaaagtcgcgacatagcagagaatgtcgcgacattcactgatttgctggtagaaaataaaaaaaaaggaaaaaaaagtcatgattttgggaaacaagaggagtgctgcgacattcaagactaggtcgcggcatttgcaatttttgggaaactttctcggttttggtctataaaaggatgtggaaactttctcaagaccacttttgagcataagaggacggatggaagcagaagacactattagaggactccaattagtgttctttctcatctatctctatcttttctgtttttaattgaatttttatgttttagaatgactgttatgagctaatttactttttaaggattattatgtgaac

SEQ ID NO: 12742 - DNA, 642 bp, Cannabis sativa
gtgttaggagtattattcttgaattattaattttcgagttattataagagctaaattctaaaccgattccaatttaaaagttaactcaattgatgattataattctaacaaactattgactttttaaatacgaaattattgtcttacctaaatatttattttatataaaatgtgactatgtaatagaatttttaatttaacagtatttttttgtttcatacgttaattttaacataatatactattatttaactgaatatttttattaattttataatattataatatatatatttaaaaataaaaatgatgtagatatttatataattttttttaatttaaatgtaaaatacgtagatatttttaactatgtttttaattttataatacttaatagagaaaaaaattcaacaaataaaactaattattaataatatttgacaacaataaattattagagaaaaagaaattatgcaatgttgtaattttttttaattacttgtgtctatcattaattaaagtatgttaattgaaactcaacagaatgaatcaaagacaacattatctcaaattatataagctagtttaaatggccataaacaaattattgagtttgctgggtcatagaattgaatcctaatt

SEQ ID NO: 12743 - DNA, 636 bp, Cannabis sativa
tgaaattgctttacccttgatcccaaagagtgaaaatccttccagggtagttaattattgccctacagcctattgttctactatttacaagtgtatctctaagcttaattggttcagtctggccgaggttcttcctcttgtggtaaaccaaaactagggtgtcttcgttcagaatagatctatggcacataacattcttatcttctaagacttagtaaagaactgtggaaggaagaatgtctcttctccgtgtgccatcaaaatagatctaaacaaagcttatgacacagtgaattggaagtttttagaagcttggctgaattatctttaattcccatctcgttttgtgaagtggataatgttgtgtattcgaggcacttcttatgatttgatgattaatggtacattgccttatctcaccctgacgtggcatgtccacgtaagtcaggacaaagtacatgtggaacacaaccttgccaataacaagacaaggtctccttacaagatatggcaaaatcgtcaagcagcaagaaaaatgagtgaaacaagccatcaaggagttgtaccaacatgtatggccgaccaagggaagtttataggccggtcagggtgagtttatatggccggccatgatct

SEQ ID NO: 12744 - DNA, 510 bp, Cannabis sativa
gaaaaaggcgtcgtcaaaaataacacctttagagaaggagtaagatttccattaagctcctcgataacccacgggttattccaaatctgaagcttacttgcgaaacggtgctctggtttcatcttcaagtaaacatcttgtaaaaataaccagttataaaataaggtttagccagtgacaacaacaacaagaaaatggtaaagaaaataactggttccataaacaaaaataaaatcacatttaaaaaaaaaaatatatgtaaaataaaaaagttgaagtacttactacattcgaaaaacttgtgaattttttaatagacgtttcaggtatcgaaggactagggcccttcgaagcaagacatttaacgccagcacgtattgtacgacgtactggcggattcggagcatcagaatcaaccaccctagcctgaaaaaaacagggaacaaaaaacaaaaatatacataagaaaacaacattcacaaacaataacaaaaaacaaaattataaaca

SEQ ID NO: 12745 - DNA, 644 bp, Cannabis sativa
gttgtctgaatcttttaaaggcaagattagcttccattaatggatcttgctctttcacaattagattggcacttgcttccacctcttttccagatttctcaattcttgactcggatgccagaaataaagcctcaatttcatcaaccgtgtagttctcaattcgagtgttcgaagagataacaaaggtatcatattcactcgagaggcctttgaagatagctgtaacatgatcacgattgcttattacttctcctacagatgcaagcagatcaacgatctgttaatttttcagcagataatcattgaggctcaaatttcctctcttcaaattctgcagcttcgtacgaaactcgaggatcttggaggaaacttgcaatgtgaagtgtttctctagagattcccaaatttgtcgagttgtgttacagccaaccatgcgagtcaagaggctttcagtcatcgaagacagaagccaggagacgagcaactgatcttgaacttcctaatcgccatagtcgggatttactctgttttgcattcgatcttcattgttcagaaattcttctagaggtggttccttgatgaatctcagcaacctatttcctttgattgctgcaagaacttgctgcttccacaaaaggaagtta

SEQ ID NO: 12746 - DNA, 781 bp, Cannabis sativa
acaaacctgccatagaggtcctggccgtacacagccaagagtgacaacttcaaagcaccgggcagcgttcaacatggctagcctgccaagtgtacaaaaatacaccaacagttgtatttttctcacaaacctttcaactcgcctttagcattcccacgacttcaaaacagttcaaactgcccacaaagatagggactctccgtcaacaagtaacaaccctattccttcaggattgttattatttattttgtatttcaaatatactttgtaacttccctattttctagggatatctctatgtacagcttgtaagtgctactactatataaatggtaagatacacatgctcacactcacgtttagaacttcaagtacgctcagaagcactatagcaataagtcctctctattttctcatacttctcactagccaaacacattctcattgtaatactgaagagagcctagctagaaattataaggtttcagcttgtactctgtttgacattatctcaagagtgaatacaactaaaaagggatcggagtaggtcattacctaaacaaaaacggttgaacctctataaatctgtgtcttttacatctatccttatcatgcacgtgacagtcataagcgagattcgatcctagtcagactcaacatcaattggctaaatccacaataaatattttggtactttcattgagagtccagaattttcattcaagaagctctcatattcttaatggatttcacaagacgtgaaaattcgactgaaccacga

SEQ ID NO: 12747 - DNA, 698 bp, Cannabis sativa
tcacaatcgaaccatattctatattcaaaccatcaaattttccttttgaaaatccactacacccaaattaccacactacccccacactataacttcaatacaattaaccccaaagggcattatagtaattcactccaaaatcgcctactcaaaaacccacctccgactcttcccaacaccacactatttacaacatgtctcccaccgtccaatccaccatgacacaacacccaaactaccaaactatcctcacaccacaactttaatgctcttattctcaagggcattatagtaatttcacccacaaatccccaactcaaaaacccacctccgactcttcttttcccaacaccattactcaacactcaaattaccacactaccccccacactacaacttcaatatacacttaccccaaagggcattatagcaatttcaccccaaaatccccaaatcaaaaacccacctccgactcttcccaacaaccacagtacaccaccgtccactccacccaaattaccacactacccccattctacaacttcaatacactcaaaaacaccaaagggcattacagtaatttcacccccaaaatccccaactcaaaaaccccacctccgattcttcttctcttcaccactttacttccttacctctgcaactcaactcccaaatttccatgggcaaaaaggtaaaat

SEQ ID NO: 12748 - DNA, 593 bp, Cannabis sativa
tattagaattttgatattaagtataaatatttaatagtgtccaacactattatgaacgggtcacagttaatttaagtaatttaagtataatatataaattcaatatatacacagtacattgaatatttgtactactgctaattggaatctaaaatttacatttgtgtgaattgaatgttgatatgtaaaagtaactgatgtaattcaatttaatctacatatatttatgtactttttaaaaaaaattaaatatacaattaacattttaatgtaaaaaaaataataatttaaaaatctaatacatacaatacaaatacattttaaaacttaattgatcaaatatatatttcattttttaatttttatatatatatattttacatacaatttaaaaaaaattaaacatttctttttacatataatttttttttctttattcgagtttgttattttttattttatttattttttttttagaaaaaacagaaatatctattaataaataaaaaacaaattctattacatgaaaatatgacctaaagagtaaaattaataataataagttcacaaaaaaaaaatgtgaaattaggtga

SEQ ID NO: 12749 - DNA, 677 bp, Cannabis sativa
tcattttataaccaatacaaaaagatagaaaacaaaaattatgttataattaagacacatgtgaactgttagttttccacatcatcaccaattgtcctaaccaactaattagcctctaaacaatcacagccaacaactataaataggttaacttgctcacttgtttgagataggacttgatttaactgaaaaccagagattgtgagagtgtttatggagggatgataaagggagtatccattcatgaaatggcttccctcatgtgaggattttatgtaattgtctctgtattaatgtaattgattcatcttgctggttttctctctctcccactgattctaatcaaagctatttcagcaataaagattcttcttcatgttcataatttagtcttatgtttttttggtgaaatcgatttcatactcaattcaattcagttcattattcttgatcatttgatccttttgttgttctgttattgtgtgtttattgttgtttcatgtggtcttggacaacaaaaagataaaaaaaaaatatatttttacgtacttgtatgcgccaaattgtaactaacgcaaataataaatttgcgtcaattccagtttgacataaagttttttgcttcacttgaaaactaatacaaaactatttgtgtcagttattaattaattaggcaa

SEQ ID NO: 12750 - DNA, 757 bp, Cannabis sativa
ttattattttgcaatgataaaaaatgtgatacaaccaacaaaatctaaatatgcctaaaagaaaaagtgggattttatctcaatatcttattcttggctaatcagagacttaattctaagcaattgtaaatagtaatttgaattgacaaagtggagttagcaaaattcggtttgacaaatccttaaatagtttgataaattcttagcttttgttaaattacagttataaaatatatgggatattcttaactattgcatttctcccccaaaaaaaaaagtagtagtgcttaccttgtgatgtgaggaagaggaaaatcccctttgactttccagaacccatgtctgatgtagcaatcggaggcagctttcctaagcacatcaatcaataaacccacgaccatattagccacatctttcgagtaagcgttcccaacattggccaccgaaaccactcgggcaagtcgacctgattgacgcccgcactggaagtcaccaccattcgcagtgctcgaagcagttggagtaggtcggcgttgacggaggtggcgtggctggcaatcatcgctcggactgagattgcatttctcttcagaaactggtccagaggtagctccgactccaacactttcaccaatcgaaacttttgatcaaacaatggcaataaaataatgggtagcgtctttacaatcagtaggagttggggctgatcgtttggaagagccattgaatttgaagaggaaagaggagagtaaaaacc

SEQ ID NO: 12751 - DNA, 563 bp, Cannabis sativa
taaaaaaaattaaaacttatacatagtaaataatttggttgatccatccattttttttttctgtgtggtaagtttatttgaatgtttcaatctctccaactttaatagactttgattgtctttcatctatatccactaccggtgtagaattctgaaataattaagtaaaaaaaattaaaacttatacattgttaattaaaattaatgagcaataataaattatttttaccgtctcatgtaagtgttgagtaaatgatttacgtccacccctatgcataaattttatttttgatttattttttgagccagccacatactttttctgcaataaaagttattgacgttaataattttttttgataaattaaaaatagatatgataaaatagacattatgatatcttctactcttcattggagaaacatgcagtgcacatccatttccagtcagcatctcttatcaccaaactcgtaggtcgatgctctaacggattttttttcttcttgaatcattttttgataatgccagtgacaaatatcacgatgattactgtatgcattttt

SEQ ID NO: 12752 - DNA, 582 bp, Cannabis sativa
tattgtattatgactgaagaaaatatttatatactactcttttgaaaggatttaagtttctccttttatgggtagtcttatttctttagtaataattttaaaagtatatctcacactaaatatgataatgtgaaaattatcattccactaaaagatattacaatataacaaataattcttaaatatcgataaaataaatattaaatataacttatatatttttattttttctttatttaaaaaaagaaaagaaaaagaaaaaagtgtaagattttgaaaacatttatagtacacccctgaaaagtattattttagtatgtattttatttgattcagtatttagaagagttttataatttttttttcatattcgtgtactttatacttacttaaaactatatgtaaatttcttttaaaatttagaataatttacagtactgaaaataaggttcaaacagttgtttacaatatgtattaaaaaatagttatgcgtacaaatatttgaatcttattttcggcactataaactattttatttttctaaaaattgattggtatttttaaataactatatcgtatagc

SEQ ID NO: 12753 - DNA, 1131 bp, Cannabis sativa
tgtagctctatacgatagcaatcctgagatagtagttggtcacctcgcactacacctactcccgccagtgtttgaaactttaaagacaggtgtttaattgaacaaactgcccatagttcaattattgcaggacgacccaacaatatgtcgtaggctgatggtaagtcaacaactagaaagtcttgcatcaatgtggtggatataggtggctcgcccaaagttaacatgagttcaataattccttaactggcgacactgtccctagtgaatccgcacaaattcaccatgcaaggttttaattttgcgttttgcaatcccattttcttcagtgtaattcttgtaaaggatattcactaagctcccattatccaccaacaccctttttattcttttgttggcaagctggattgtaatcatgagtgggtcgacgtgtgggtacctcacgtgccttgtgtcttcctctaaaaacacatttggaggttcctcagtcttaactttctttgatggttctggagcgaaagctgaccgctcgttcttgatttctttgacatgtctcttttggacattgctactttctctagcaagatgtggccttcctgagataaccaaaatgtcctctccttcaacaggaggaagttgtaatctgtgttgcctgggttattgggtggattttctggttttgtccattaccttgtcgctttacatattgttgaaagtaaccacgcgagataaggctctctatctcgtccttcaactgacgacattcattcgttgtgtgcccaatgtccttgtgaaatctacagaattttgtcgcatcctgtttgtgcctcgcatgtctcatgggctcaggcttacgaaatgcaaccctgtgctcatgcgcgagaaagatattttttcgagtttcattaagctcggtataaatagtgtaaattggcacgtacttatcgtgctttttctattttttcttatctttggctaattccttggagtcatatttcctctttatgctagagccccctggattgtcagcctccgtcgagacagtgttggcttggacagtactgagtttacttccccagccagtctttatcaatttcatctctttccttgcttcctcttttcgtacaaaca

SEQ ID NO: 12754 - DNA, 689 bp, Cannabis sativa
ccatcaacataggtccatatggcagttccggatcaacaccattgtctaattgctcaagaaatataggacatttctggtataagtggccaataataccacactccatacaataggaagacgttcataacggaactccacccagaactcatctcgaactcgtggtaaagtgatcatcttacccctaagcaaaggcttagtaatatcagtcgaacccggaatcgtaaaacggaccccaaccctcattcagcgagtcctcatggacagaaataaactctcctagtaagtttcctaatgatctcgccaaggatttcgacttactgaggaagggcaggcggtaggcttgcacccaaaaaggagaaaggatcatagattcaggggtgacattgtgcatagccattggtgggtagagaacaatgtgatggtcttgaaagtgccacggttccttttcaagagcacgaaatcgatccccttcgcacccaaaacagagaatgaacaaaccagaatagtgttctttaatattaaccttgaatcgaccgtcccagtgttgggccatttgacgttggaatgttgagagccagacttttttatttgttattacacgggcaaacagagagtagtcaggaggaggagtgtcttcaagaggaccttcattaccatcatcagtgatagcaacaacagttttctcagca

SEQ ID NO: 12755 - DNA, 1200 bp, Cannabis sativa
aaaataaattccaacaataataacacaaaataagtgggcaaagttaaatgtgcaacttactgaggccaactcctaaagaccgacagaagagagcctttgcagcttaccattaccaagcttctgcagctcgttatccacagtaggaaaggctctaacaagacacttatgaactacttccatggctctctaccccatggttgagcctactccctgactaggattctgagcattcctgcccgaaggctgatcccttctcactagagggtcatctattatgggtttcctaggtggcacaggcccaggaggagaaggaggaagagatgactccgcggcgtcaccagaatgggtggtttgggccaccttggcccttggacgacccgaaggctcatcggaaggtccaccagctaaacatctgaatctagaagacatatctgcaagaagaaagtaacaaagtcagaatacaagttacaaatattcaatgcaagacaagaatataaaagatggtgcaatcaacgatcgaataccatcatccttagaagatgaatcatctgaatcttcaaagttgccttgcccttgcctctagatgaaggcaaggggcaagtaggcctagtgaaaccctatgctccaagcctgatctgtagagtagcatccccaacggtgccctcgcaagctaagtgttggcagagggccctctctctcctctccaaaccctgggctatttgggatagaggcacatcatcatctatctaaggagcatgcccaactctaggaggctgaattcctaagcaactgggctccatctacaccaccaaatgggcccttagcccccacaactttagaatcagaaggatacaggtcgtacttctgaaagttagcaacactggacaaacttactatgttcctttttgctacggggaggaacaagatgtggtttgctctatccctcatttatagggtagggatggagcgcttgtaggtaggcactcgttggaagcaatgatgtcgaatctctagacatcccaagcaatgaagtaattctgggcatatccactaactttgaatagaggcatattgttggtgtcacccaaccactggaggccaacttgactaaagtagaagtaccccatctagttctgctttggagcagacttcaaatcaaaaatattatccaatctcgtacggagtaggctgaggccagcc

SEQ ID NO: 12756 - DNA, 559 bp, Cannabis sativa
gaagaaatactaatcttttttttttggctgtgttactgtattcttttgagggttcgttgtatcggttaagctggacagaacccagaactggatattgctgaattactcattattataaagaaaaatatcgtttgggactggatggaatggagctattagttgttcaaaattctactagcttttatttcattggtagaatctgtataattgaaatcaaaaagtatttactaattaaaactaatccaacttggtcagatgctaaactaattcaactgtactcatgataattttatgttgaacctaattaaaacattaattgttctggacaaaacaccactcccaaattaaaattttactctccttaagataaggctctattgagcctaattaaaacaaaaatatcacttaggcccagccttaatcctttgagagtatttttttttaggggaaacagaaatatcaaaattgaagagaatcaaaaagccaatgtagatgtagtggatgtataatggaaaatatatgcagtaaaatataaaggaaaaggggactataagattta

SEQ ID NO: 12757 - DNA, 741 bp, Cannabis sativa
gaagaacaaaattcagaaccctagatagttctatagggttcaaacaaagagagagttttgagagacagagagagcttcatttccaactttgcatttttttgtaaaacaatgaattaaatgaaaataggttgttttattaaataaatgtcagcttagaatcaaattttaaatttgattattaagttaaaacaaagtccactaaaggacaaaacacaaatggataaaaagacaatttttccctttcaacactaaaaatcctaaaaggtcacttaagagtatttttgtcaactctaaaatctcgactaatctcgacattcccaatgtctaactatactgccccactatactaaaaatagcagaatgtgattctaatagccaaacaccgcgttccaatgttgtcaggcacaaaacatgcaaaattatgaaattctatatatggcatataaaatgctttttgaattcaaataaatcatcgttaataagtaattcaaaactaataaacaagtttcataattaaaccctaattatctgctaatttttaaattaaagctaggcggtctttacatctcttctggttattactactttctctagcaagatgcggccctcccaagaaggccaatatatcctcaccctcaacaggggaggttgcattctttggttatctgggttgttgggctgaacaagtcggttttgttcatttccttgatgcttcacatattttctaaaatacccacgtga

SEQ ID NO: 12758 - DNA, 863 bp, Cannabis sativa
tctcgctatattttcactttggctagtacaactatattttaaaaaaaaaattcaatagactttaatcacatcatctactatgtatgttgagtttgtcgcatgttatagggtagctttgcaagcttttcggttaaagaatttgattttagagatacgactagttgattctattttctctcctttacaatctattgtgataataatactgctatttttttttcaaagaataagagattagtagtgcttccaaacatatgaaaataaagtatctcacttttaaagacttggtcaagaaaagagacattgtgataaagtattacaagaccaagtcgatgttagtagatcatctaagcaaaggattaagtgccatgttgtttaataaacatgtttttgatatgggcattttataatcttttgttcatttggactagtgggagtttcttgctctattatttgagttacatttatatataattttcttgttaattttatgaactacttggtttgttttgtgggccaataatttttattattggatctttatactttcaattatgttttgttatattcttgagaataattgaattgaaagcatgtagttcatatcttattgtgattattgtcttttaaatttatttacttaatgacaataatattttgttggcttaattttttaagcatgtttagtgatactgacttatgtattaagtaatgtatggttaatttcacttgcttatttattaaacatcacgatatcagtgaaattgagaactaataaagatattatgtaattgatcacatgttgaatataatattccctatcatactactagacttagtgaccatgtcgatttaatactttg

SEQ ID NO: 12759 - DNA, 735 bp, Cannabis sativa
  modified_base (450)..(450): a, c, t, g, unknown or other
aaaaatatatatatatatataggatgcgtttgttaacacctttttaattaatttttttatttttaaaattagaaaagtaaaaatattttccaaaatcatgttctataaaactgtttttatttttcaattttttaattaagaatctaaaatttaaaaacaaaagcaaaatcactttcaaaaaatttttaaacagttttttttaatcaatattttagatttcgactccaacttagaccttggaaaccgaacctagacctagccccagacttggacccgcccccagtcccgatcttagacccgaccttggacccgacttaaataaaatcaactaataaaaataaaaataatatttacaaaacactcttttattttttgtttttaaaattgaaaaacaaaagtggttataaaacacatttttgttcttcaaaaataaaaattttacttttattnttatgattaaaaaatttaaaaacaaaaatattaccaaacgtcaccataatttttttaataatttactcttacattttatttatttatcttggtaactcatatatgtatcttactttatattttctttatataaatatttttatgacaaactcatgtgtgtccttattgatcgttggctagtaatatccttgtttaatgatttttttagacaaactttgccaacccggatgatccctttatataaacatcttattaatatttattatataaattttatattttttt

SEQ ID NO: 12760 - DNA, 600 bp, Cannabis sativa
gtatttaccttattttattagagtattctagtttgttttgttttgttgctttccgtatttattattattattattattattttgctgctctataatttttttgtagttcttgattttactgttttgtttacttttatttgcactatttgctcagttgatttattttcttgataattttgtttgactcaaatgtatacaaaataaaaagggaaatcaccttctatacggtaatttgcctctttatttttaattttacgtttattattttttatttacttttttattctttcatttatttatttttatattattttaagtttctttttttcatttttacggaataagaagtactcattgagttttcaatatcacacaaaaaaacactttctattttcactttttatctcaatcttctctttgaatagcagaaaaatctctttttcatggagttttctttcctctctatggattgattcacactattgtagatcatctctattgtttcttcatattttggtaagagtagttttttttggattttttcttctttcatcttctttttcatctgaacttccatgtgtttgtttcttatgtaacctt

SEQ ID NO: 12761 - DNA, 670 bp, Cannabis sativa
acacacttctaatttattttggcattcataaaatcttttattcaattatttttataattatgtattttgtacttatttaaaaacattagtgcattctttattttttttaaataatttttatttttacaaataaaattcaaaacagttacttactatgtgtaataacatatttaaaccttcaagtaaattattttttaattttttaaaaatttataagtgattttaaatactaaaataaatactagtgtgctattatatcaaaacagatagagcactgttatggggcactaaaatacttaagatatctatgacataacgtcttataattagttagcgcttctctataatttttattaaatttaaataagtaagactcaatattaaattgcactaatagatattacacctcatatactaagcatcatgggtgctctttaaaagttctcaaacaaattaagagtgtatatcaaaagagtattgttattgagcactagtagtgtctggtaccttttataggtggtgtctcataattagttaacgatatttcctaaaaattattttattaagttatatgaaatcttatatttaattatactaataatgctatcaataaatatattaaacacaataatatttttttagcagatatgataaccattgttgtaagaga

SEQ ID NO: 12762 - DNA, 602 bp, Cannabis sativa
gcctcagatagtgagatagagaagttgcgggtggtacctgttgaacaccttgtagagcctagcatcagtaccaaaaaaatagtggctactaaggagcaagggtcatgttggatggaccatatcattaagtacataacaataggagaatttcctcaagaaaggaccatgtttagaaaattacagtaccaagctcatcggtatttaatgatcgatggtattctctatcgaagggggcccagcatgccatatttgaggtgtgtgtcagatcttgaagctaaacagatcatgcaagaagtccatgagggattctgtggagatcacactggaggcccaagcctctcaaagaaaatattaagataagggtatttttggcccacaatgaagaaatattttcaaatatcccaagagccccacccagtaaaattactttgatgactagtccccggccctttgcggtatgaggaatagatctcattggctccctacccacaggaaagggtggggtaaaatatgtcatagtggcgttagattattacacaaagtggacaaaggccgaacctatgaagaccataattgtaaagaaagccttggacaatgtcata

SEQ ID NO: 12763 - DNA, 867 bp, Cannabis sativa
gtagtggccctttggtcttcaagttgtcttcttcaaaggttgcatctaatttgggagtcgtggctaaaagaatcatcaaacgaatcgaaaatatctaactttggaagaacaagaagagtgggagagaattcgatttgtgaaagcttaagaaagaatgagagttgggagccaaataacaaagtggaaaaattattagaattagtcccacattgttaatgtgtataaataaattattatatataagatgaatgggctactcctcccattgccaattagttttgagatgaaccccattcacctcatcccaaattctaacatgggctcagagtcgattgtgatccgctatgagcccaaagtgtcgtcggtccaaaaaggcaagccataaaatagccaaacttaaaaacttttattgtctcttatttgggatctttcggccaatgtgtgtcagtttttagtgttggggtctttgacctgttacgaatttcccgacgtgtacactcacgaatttttcaatatttggctttgtgggattctttcaaatctcatgttcgaccctatggttcctttaaggtcgttcgttattgtcacactttttaagcccaaatgtgggcagagtgtattagagttagttccacattattaatgtgtggaaataaattaccatatataagatgaatgagctacttctgctattgccaattaattttgagatggaactctattcatcttatcccaaattctaacaaaaatgtagctgagaaaaaatgatggaacttttaaagcacatacgatagtatgctttagagtagaggagaaattaatttttagctattaaaaaaagtgaaacctacaaaggcccaagattga

SEQ ID NO: 12764 - DNA, 953 bp, Cannabis sativa
atggctctagtaatatgttttcatagggaatgggagaaccgtttcaaaatattgacaatgttatcaaagctttagacattatggtgcatgatcaggggctgcatttcagtccccgcaagatcacggtttcaactagtggactagtcccacagctgagacggttcctcaaagagtcaaactgtggtttagctgttagtttgaatgccacaactgatgaggtatatttcagttttatctgaatgggcaagtcattcatgcttacctgcgtcagtttcaactatgcacaaacttaaaagttctaccatgcttaatcttattattgttgcaggttagaaactggatcatgccaatcaacaggaagtataagttagacttacttcttcagacccttagggaggaacttcgcttcaaacataaatataaagttctatttgaatatgtaatgcttgctggtgttaatgacaggttggattagcttttaaatttctacatgtttggaattggattactagcatgaatgcatcgaagtgacatttactaatccttttcattgtttgtttttctgattcttgcagcatggaagatgcaaggaggctagttgatcttgttcaaggtattccatgcaaaatcaatctcatctctttcaattcccattgtggatcccaattcagaccaactagggatgagaaaatggttgagttccgaaattttttggctaaagccggatgtactgtgttgttgcgacctagtagaggtgatgatcagatggctgcctgtggtcaacttggcaatcctggtcctgttcgggctcctgtcctccgtgtgcctgagaagtttcgaactgccttagaagtttcagcatgatttttaagacaaccatgggaaaaccatcatttatttcatagtctactggcctaattcttagtagcttctaagtttagtaccctatatag

SEQ ID NO: 12765 - DNA, 652 bp, Cannabis sativa
tcggggatggatgatcgcttgggcttcttagaaggctccggcaaagaaatgacacccttccattttcggtcaagtgcaggaacttattcttcctcttcctcaataagaaccacatcctggttcccaagtacctccttagttggtccacctagagtcgccatcgctcgtggaggctcaggcacctccggctcagggctgtgggtacgggccaacatggctaacaggtcatccatgggttttgctgttcaaactaatcagttaaaaaagcattaaaaatcacaaatgtaagtataatacatcaaggctaatcctaccttgactctctaattctgccctagcaaattcgtaaattaaagatctggtgtcgtcatcccctagaaagctatctaaaggaaggaaccaacttgtgatcatataggaggaatggtccaaaagaatcggaacaagaggactagagcccatccgggaccgacccagaaaatggctcaaattggagaaataaaaactttttgcattattgccccaccgagaatgtggcttccaaaacttgtatagcctcatgtcaaagtccactggccttaagttagaataatcttggatagaaggaacgaaataaatattcaaaggcgacttacgggctctagaggtactg

SEQ ID NO: 12766 - DNA, 1147 bp, Cannabis sativa
gttatcctgtaaactcaagtttaaagagcagactattctttaccaaaattctcgcgaggttagtattctcaccatagtttatttgtttttttcttctcagtgatgatttggcttggaaggttggattgggttttctggtggagacggctttcaaaggaggaattcttgataagctttagggtaaagatacatcattttcttacttaatataaattttattgatttggattggtttaatttttttttcttttcatggaataattgtagcaatgcctctacatctgaagccattgattttatgtgtcagcatcttctgctctttactatttttccagcaatctatcagtgataagagctcctagcagtgaggtttatttcaatttgtgtgttagtacacaattctcttttatagtgttagtgcacaattctcttttatttctttagttgctgagcagcttacttttcatgtgcaatagtaatgtgattatgtaaatgctcggtatgttgagttaaagctttcaacaattcattttgtgtatatatctttcttttttgggggatttttacactattttctttacctaattttaacatatatacaactatattaaattttaaatatttgtcatgaaaaattctgagaaacaatactctttatttgctctcgtcatgtttagattaggtgtattatgcaattaaaattttcaaaacctaaagcatcctgaatttagagaaagaatttaatttctaataggtctattatccgattgtgtgaggttttcaattagtcatctcatgatattaatttttttaatttataagaaaaattaatattaaaaggtatgttatctaaaaatttgatatttcaaatagttatgatattaaattttctaatttgtaagcaaaattttgtttaaaattcagtttaacatgctaagaattttcaaactggggatccgcttgagatgactaatatggctattgggtttttatgaataaaagaacaattgtgatcattattgtagtcattaactcattgtcaaaaaagttctgatagtagtaccttatcatgttccttttttgtgaacaatacaatataacagttgtatttatattttatatatatgtgtaaattcagtttgatgtt

SEQ ID NO: 12767 - DNA, 509 bp, Cannabis sativa
ttttgaatcctctattttacaaaaattattagtcagatattctatttgttaaatggataaatgaaactgtgtattttcaaaatagtacaaaattgagcccagagtgttattttgtataattttgaaacatacagtatcttgataggtaatgtttttaaaatacagggttcaaaattatatttaccctaaatatattgatagatttcatagactatagattttggatattggaaacacaatgcatcagtatgaatattgtttgttttttagaaattgtgaaaatgttaacactttgtgccaaaaatttcattaatgttgatgctcagattaacatagtagcattcattccttgtgttattctgattaaaagttttgtaatctctgttgaagctaagcaaaatctaaactacatcttctgaatctatgcaagatgctattaggtgttgaaatatgcaagcatgagaatagtattcaaaagtttggttttttacaggctaaatcatcattaa

SEQ ID NO: 12768 - DNA, 590 bp, Cannabis sativa
caaaaccacgtaaaaagcctttgttcattttcttttgtttactgttttttatttttttgtgcaagtttatcattcaggctcaaatttggttaacaaaaatctgcgttaaaacatctatattccaacatattgatgtacattcaggggtggatacgagttatcatttaattcttaagacgattaatctagattttgtcttatgctaagaaatttgaaatgtttgagaaatttcatgaatttatagcaatattgaaaaacattaaggtaagtggttaaatatcttgatcactcataggggtggagaaatatttggtggatatgcagttcaaagatctttaagtctaactttgaattgtatccaaacttacctccttagaaattcaatttgcatattaataaaagttaaaggtgatgattagttactagcagctacacgaatccttctagggaaatacccttgtgatatgaatttttagaatgatggaattattgtttacttagtgtaaaccattattagattcatggatgtcctgatcatgaacttaagaaaagctagatctgttacgtaaggtttgcgagtttgatttata

SEQ ID NO: 12769 - DNA, 584 bp, Cannabis sativa
tatagatggtttaaatgacaattgtgaatcgacgggataacttcttccttcaattttcgtgcttcggttaaaaagaaacgaaaaaaatacccactgaaatttaacaacggtctttgtagatcgacgggaatgacctattttgtagtagtaataaatatctagactaatcatagaaccaacaataacaaaagtagcattgtgactgcgattctctctctctctagggtttggggtttcgaatttttattccttttggggcccaccagctgctcaagaaaagtcgtaatcctataaacattgcaattgaatctgatgtttaattataagcggtgcgagcgcacattctctctgtaaaccctagaaatatcatcaacctcattctgatcggagagcggaggagagtaggaattccatttcaatcattggctgcttaacacaattacttcaggtactatatatacttacttcactcactgcccaaattctgattaagagcgtcatgaacgtcgtcaaacctcatatttgaagatgcagagattctagggtttttaggtgtgttagaactgattcattagggtactgag

SEQ ID NO: 12770 - DNA, 655 bp, Cannabis sativa
ggtaggcctgaggttgaccccaagatacttaagggataatcccccttcttctatcttcacacactccaaaatcttggatttaatctcttctttaacaccaccaaagtaaatgtgagattttgaagtgttggccgacaatcccgtgtcattgcagaacttcacaaaagcatcatgagtgagcctaatcgaatttagatttcccttgcaaaagataatcagatcatctgcaaagcacagattaatcaagcaaagagtcttacacaaagggtgaaagccaaaacctttttcattcgagtatagccgaagtagccttgtgagataatccatgatcatattacaaacaataaaggggacatcaggtctccttggcgaagccctttcttccctttgaagctaccctggattcttccatttaaaaggatatggtagtttgtgcccttcagacaagtcatgatccaactgatgaagcgagaagggaagcagagcattctgagtaaatcattcacaaactcccagtcaaccgtatcataggccttacttagatctattttcatgatgcacttggcagagatattcttccttgagtaccctttcagcaaatcttgaaaaatcatgatgttatgtgccaactatctatctttaataaacgcacctt

SEQ ID NO: 12771 - DNA, 506 bp, Cannabis sativa
tttattttatataaataatgtaatttttttgttaatttttttagaataaatagaatttatctcccgaaagactcaaattatgatttttgtagaattttgcttcttaaattttttctctcttacaaaatttttccataaactataaaaatcattacaaatatcctactacaattgcattttggtcatttatttaaataatttatttatatatcactaacataatattaatctagcccaattcaagagtctggataaaaaataaatacataaataacaatctaataataaattatgaaagtaggtatgtgcattcttaaagcaactgtttgtatatttaatactaataaatggaattttaagtagcttaaaattattaaataagtcttgatactacaattatacatataactcatagccacataagtaaaatatttttaaaaagaacaaaatgtaactaaaaagggatatttgcaatgatttgcattgtccgagaaaaaaatttacaa

SEQ ID NO: 12772 - DNA, 513 bp, Cannabis sativa
gtaccaatacactcagtaccgcaaccttaccagtgttgctagtatataaatcacataatactgcattcatataatacacatacacattttatactaatattacttcattttttgattcaagtgtgtcggttaacgtgaatagaaatttacgcgctgaagggagtctctatatcacagtcacgcaaaatgggtaaacaacttgctaaaacctttacaaggacctaaactaaaaattagaaatttctctatcgataagtagcatgacaatgtcttaaatattgagggaaacacaaaaaaacgagactttagaaaactgccaggaaaaatgcaggccgttttctcggtaatctgccagtcacggtctgtcgttttctattgcaaaaaaataccaagtctcaatttgaaaccatccccaaacttgaaaccaagctccagaacacctatttaggcatcaataaataaatcccaaccagtaaaacacacaaaatcgaaaaatgtcattattgagccaag

SEQ ID NO: 12773 - DNA, 510 bp, Cannabis sativa
ctacttgtttagcttcaattgcagtagtaaatttctgttttttttacagaagtctgtttaaataccatgttttaagattgctttcttaatatatataccatgattttctaatcttctgaaagtttaaataccatgttttaagattgctttcttaattctttgctgacaagtggcaagcacacttattttaatgtctagtacacccactgctcaatttgaaacctgtttagtgtggagcctgacatttttctgtttttgtatcaccattcctttaagtacaatatgcattttgctcttgttggatgtgaatgttcattgtgtttgttttgcaaccatttcagggtacatcacaagctgaaccaaggaaccctcctcaacctgttgaagtagctcctgaatttgtttttgacactcagccagagacacagccagaagttgaaacagaagcaccacatacaaaacttggtgcataaccaccacaaccaaaggttccagagtttgcacaacctg

SEQ ID NO: 12774 - DNA, 530 bp, Cannabis sativa
tttgtgtgaccataccaggttatggtggctattctcagcatcttatgtctgtttgttctttcttccacaaatggttttattggcatatgggttgctttgactatctatatgagtcttagaacatttgctgggttttggaggtaaatttataaaaatgctataaataaataaaaaagaccaaaataatgtattatatgaaaattatgaagccacttattattattttttaaattactttatttgcaggataggaacagggacaggaccttggaaatttttacactccaggagctaatatatttgtatataaataaacatatacatatgtttttataggagtaggagttggaagttttgattttgtgggttttttttggagttttgcttgatagtggaaaattattacctttctatgtatgcttatttgtctgtatattttattaatataagcatgtaaacaaatgttaatttattacatggacaattattggttgagtaattatcggttaagaggtttttttttttttttt

SEQ ID NO: 12775 - DNA, 711 bp, Cannabis sativa
acatagcaagaactaacagacagttaaatcatccccaagtaagcatgaatgttgtacaagtagttgggaataaaataacatattctttatacataactaaacgtctctgatgtaacatattgtatgcataaacattcagtaagcatccattataaagactataatacctcattattcaatagggtaaataacattttagaccctatgttttataaaagttattgatttttgttttgttaaataacacttgtctattttgcaaaattaaacataacaataccttgagcccgattttttgtcaaacttttttacgatttaggattagattcgagatcagaccacaataggtagagttagggaagagaaagttttaagattagaaagatgaacttttaggtttagggtaaaaacaattgacaaaatgataggaatttcctatcatttaagtataaacagtagcaaaatagaggaaaatagctaaaatattgacagtggaaattgaagtgaacaaaggtagtgggtatttgagagacccagtgctctcccaaaccaagagcagcactattacaatttcattttctccaaccaaccttctaatactctcatatatatatatactgtcccaatactcctgttacaatgacctatataccctttttatttatcttaaggcctaacacaaaactcgggctcgaggtattattatattct

SEQ ID NO: 12776 - DNA, 905 bp, Cannabis sativa
attgaataataatttatacttttaaaagctattaatattgttaaactgaattaatattgtttgttattggttattaggtcatttattttttaaaaataatttgttatattatgcttttgtaaattagaaagccataatttgaatgtgaaaaataatatttggcccatacacaataaacaatggtttgtctttatcacaaaagttcaagggtaaattacaatacccaccccaatatatatttatatatatatatatatacattttaaattagataattgtaaatataagtacttaaagttacgagtttataactagtataaactcaataatttttttagcaacataaaataagtatttaatgttagtaaaattataatttttatctaactttatcattacggattctgttagtattttaaagagtatacatgtaattagacttagattttaaattagtaattttggctgaaaatatatagtattagttatttataaaaactaaagctggttacaaatgtaagatactaatggagtttataatgacaaaatcatattaaaattataattttactaatatttgaaatttatcttgtcaaaaaattattaagtttatgctattaacaaattttaaaattttaagtatttatgcgactatttattcattttagttttaaatatatggtttgttaaaataatatagcccattctttcttcttcttcaatggccaaccatctcttactcactcaactcttctttgtctttcttccactaccgactactcacaatatcgacatatgctggccaaatttgtttgttggttgtttaaaccctaatctctagtttcgttgaactcattcatcgtcggttgttgtaggcgaagaatattatgtttcgctcatatttt

SEQ ID NO: 12777 - DNA, 506 bp, Cannabis sativa
tataactacaatacataaacgcaacaaaaaagctgaaatataattttttaggtattaaaaatagaaaaaattcaatgataagaataaaaattcaatgttaaaagcaactagcagtgtaatatatatgtgaatatcgctacaaatgtcaatattactattggtataattaaatatcatgtattatataatttaatataataatactttcatggagtatcgctaattaattataagatgacatgtaagcaccattatatatacctaataacaatgttttaaaaataactccatcccaattatatatgagaaatgttaaaagatatcactagtgtttagtactctcatcgatttcatactactattagtgtaattaagtatatcaggtcttgtataatttaaaaaaataatttttaaagaataatcaatcgtatgacgccacctgtcgaaagtattgggcagcactgatgcctaataactatatgtatttgtattttaatttatttatt

SEQ ID NO: 12778 - DNA, 711 bp, Cannabis sativa
gctccacaaatcttttcaaaatgctattctcaaagcatctatcgaacttgagacaacttcatacagtcaagcatcaaaactttcacaatggctcaaagccatggataatgaattctttgccctcaaacaaaataatgcatggtccattgtttctctccccctggatgctatgttattggaaacaaatgggtatataagatcaaatacaattcaaaaggtgaagtagaaagatacagggctcgtttagttgcaaaggggtataatcaacaacatggcatcaactatgttgatacctttacacctgttgcaaaatttaacacactcaaattatttcttgccattgtagcctaactggtcccttcaccaaatagacataaacaatgcttttttacatggtgatcttttttttttttacatggtgatcttgaagaacaagtctacatgaaaattcgtaaaggctatatacatgagggggagctttcaccaaatgttgtttgcacattaaacaagaatttatatggtttaaagcaatcttctaggcaatggtttgcaaagttaagcacttctctacttagcaatggctttactcaatcccccaatgataattccatattcatcagatcaacaaataacactttccttgctcttcttgtctatgtcgatgacatagtcattgcaagaattaatgatttggatgcatctactttcaaa

SEQ ID NO: 12779 - DNA, 575 bp, Cannabis sativa
tggatgatgaaatgggttctctaatgaagaacagaacttggaaagtggataaagaccgaatgggaagaatgttattgcatgtaaatggttattcaaacacaaataagggaacaaaccagatgaacctacaagatacaaggcaaggctagtggctaagggctttagccaaaaggaaggaataaactatacagagatttttccccctgtagtgaagtacaaaacaataagaataatgctggctatggctacataatttgacctataagtggaacaaatggatgtgaccactgtttttttttaaatgaataattaagaaaggagaagaacttagtgtgtaagctacaaaagtctctatatgggcttaagtaatcaccaaggcaatggaataaaatgtttgaccctttcattatgatatatatccttaatgatcatattctctcctatattttcataagctatatttctctttttattttttagataatcaagagtcaaaataaattaagttgtaagtacatttttttattacaaatattgtacattgcgttttgaattaatttctaaattcgatattg

SEQ ID NO: 12780 - DNA, 622 bp, Cannabis sativa
cttctagtgaggcattaaaaaaatatcctataaggattttaaataaaatgggtctcattacattttgtggatataaaagagggttcatgaccactaaaatatggtgtattgtaggagattaaaaatgacttttgtcacaggtcccacttatttaatgttatatttgattgatataaaaaacacttatttttcgtatttaaaaaattacgcaataaattaaaactctcatttttcttctaataaaaattaaaaaaacacagataatgaaagataaaattagaagacatgtataatgtatattatctataattaaaaaaaatagtaccaactaattttgaaagttttttatgcattcaatctttttttatttatatatatatatatatgtatattatctaatattttagagacaatataatgcaataacttgattggtatatatgtgatgacgttaaaagtttgataaaatagtttttttttttttatttaattgtctaaatattattagactaatcttttagttttattttaatgtttgataatgatgatagtgtaaactgcctaaatcacacagtgtagttttcgtgtttttaagatcttgcggtgcgattacgttttaaaa

SEQ ID NO: 12781 - DNA, 865 bp, Cannabis sativa
atatcattttcttacaaaaaaaaagtattaattattcttttcgctttcatgaagactgttcatatataccacgtacgaagtatacgtatttaattgaaaaaaaatggatatgagataagtgtagtgatcgatccggtttcctttcctgttctacaagcttaattgtacattattattagaggtgagaccaacatccaatctaatctaatctaattcaattatgagaaattagatgtccaattacaattgtattggatgaaattataattggattgaatcgattattgaatgtcaatctaaaaatttaattaaaaatcaatcaaattcaaataaaaaatttatttatattggtttatataaaacaaatatattaattatatttttaatggttttttttttcttgttgagctcgtaacatttggttattatatatatatatatatatatattttcatgattttttttttctattttattactattgacaatgttgttattttagttatttcaaacttttaattgcattacacttgtaaggataatatttttatggagtattaaatataaataaagagtgatatttaatttttatgtatttttcttcatatttgtaaattaatactaaaaattagttgtgtaattggatatccaatcaaaaaattgatctaatccaagtagtttttgtagtagtgtctagtctttgtctattcgccactctaagttaatactcgcgtatctacaagtgtgtgcttttgttcaactcgaatactcacaatttttagtgttgtccaatttccttccacaacatgtctctaaagagttaatgggagtttaatagcccgattatccattctaattgtcacat

SEQ ID NO: 12782 - DNA, 604 bp, Cannabis sativa
ttttgtgaactataagaaaaaaatttgacagaatttttttatttttttatagatttaatttgagctttttgtgtgttttgcttttggactttacatattctagcttaggtgttgtgcttttgggctaatatatgattgtgttttttcattgtgcttttaaacttgtcgtgccaatttatattattgtgtattctttggctcaaactcatactttttgtactgtattgtgctcgtgcttcttaaacttatactggatttgtactgcatcaaaaagtcagacccgtatttgcaatagtagacgcttcacattattattattattattattttctatttctacttaaatacaattatagatgtaataattatattgtgttccattttatttgaatgtaagcatgaaaattcaactttccacgtcaagtaataggttaaaaaaccatatagattggcgccactaattaattgtattacttgatttatttgtttcttttatttatatactaaccaacaatataaaggtgtcaactttaaactttaaagggaatacttttcttgtaaagtaagtgtctatatatacatatagcattgttgtaagttttgt

SEQ ID NO: 12783 - DNA, 794 bp, Cannabis sativa
caaaaatatcatcaccgccaccaccatcatccaccacaaatacccaccacggcacgaccagcatccaccaccaccttatctagttatttatatccaaacaaccaaacctaccaccaactccaccccaactcaaacacaactccacaactcatatccaaacaatcaaacaaacctaaacctgccaagatctctgattcaaatcccaccaacaaaaaacctaaattagatccacacaaaaaattctcaattcaaacaattaaatctgtcaaaaattaagcgaaagagagagagagaaaggtgagacaatgaagaagctcaataatcgaaggggcaagaagcgagatcccagatctcgttctggtgtgaaccaatccgtcgcctttcttctgaaacttatctcggtcgatctcctctctctgtctctctctcgatctcctctctctgctctatctatttgaacaaaacaaaaagccctagcctcctcatcttccaaccttctcttctattctcttctcctttggacgacgctggtgaacgacatgcggctgggcgtcaacgaattacggtgttttcttctttttttttttcgggaagacgctgatgtcggagctgggggtttggtaggaggcgaaggtgggtatttctcaaatttgggagtttcgctgagctggcggaggagagtttgacccagaagagaccaaggccatgcattcattggttgtcaggttttgaaaacgcaccctagatcgggactgagagagatagagagaggggatcgagagagagagagagag

SEQ ID NO: 12784 - DNA, 554 bp, Cannabis sativa
gagttggatccaaaaatccagattgttaagagacactgaacgcggattctcccccaccttcagctttgaaaaaatcagtggcaccctatcgaaagtccaggggctcccctccacaactttgtctacatctatttgatggtaaaactgaaaaagataaagattatcttccaattcttttacaaacatacctcttccgggtcgccacagtgatgccatcttgtgttgcatagccatgaaatccagagatctttctgtgagaaaccggccgactacacaccaacgatcatcaaagtccgataattccctatcatttgtgtcatacaaaagccctccatcatcatcatctccactcgttaagatgacaaagtccctttcatgctcaatatccatccctccacgatctgccatgatcagatcacgacaaaacaagaaaaatactagtagccaaaataacactttttacacaaaacaactacacagcaagacagagaaaacacaggtcaatagaccagactttttttgtacatttattttgtaatgtaattaattttatg

SEQ ID NO: 12785 - DNA, 673 bp, Cannabis sativa
tatggtcattcatataactagctacttttaactattgttgttttaacgtttatgactctaattattgcttcaaagattcaagatttatatacttctttttatgtctggcgtgtttaaggtaattatctcatcttcaacaaatctcaaaattattgttgacgaaaaactaaattattttacgcaaaaaaaaaaaaaaaatcaatcttataaggtaaaaaaatatagttttgtgagttttgtgataatttttaatatatttaatatataaatcatcatcatcatcatcatcttcttctacaacaaaacaaccaccttatctcttttctcttctcttcattgaaactgagaaaaccaaccgaccagcctcgctccctccaacaatggctgccctcgttcaactcccttacgacgccacagtcaagctcgctctcgcctctctcgagcgcaatctcttacccgacgccgtcattcgaagacttacccgcctcctcttggccgctcgtcttcgctccggctacaaatcatccgcccatctccaactctccgaccttcttcgattcattcactgtaaaaaaaccataatccaccgccttgatgatgattgcccttccttcgataatttcattttattgtgtttttgatctcattgttcttttacataatatttatatat

SEQ ID NO: 12786 - DNA, 500 bp, Cannabis sativa
atggcgataatccaagaactgtgattctgaatcggttagacttatgggtgcaagtttttgatttacaacatggctatcgatccgaactagtgctgaaggggattggaaactatattggagcctatgttgagtccgatgttaataattattcaggcgtatggagggagtacatgaagattcgagtaacaattgacatcactaaacctctcaaacgtcggatgaagattgttcggagtgcgaatgactggttctgggcaaatttcaaatatgagcacgctcccacattctgttttgtctgtggcattatcggacactcagaacgcttttgtgagaaggcgattgatatcccttacgatcaacttgtcaagccatacggtatatggatgaaagcaactccgcaacggaaagcacatatgattggatcgcaatggcttcggacggggaaggctaatagcaacacttcggaggttaatggagggcagttttccggtggggatgga

SEQ ID NO: 12787 - DNA, 621 bp, Cannabis sativa
acaagagtacaatataaaaagaacatatttttttttataaataatataaaaataactataaaagtatttaaaaatccataaaactataattttataatttttgtatatttgtgaaataattccataaatataggaatctacacactcattactttgatacttctttgtgcacctttctgtggggtctaaagacaatacaactatcacttgtcacattagtttgaaagaagattggtttaatttcttttaagcccatgggccttaatgttagagaagtctagtattatccacactattttcaaaaatatgggaaaacttattaaggttatgataaatatgacataaaaagtaaatgccactaaatatgatattatttgaccaatcaaactaaaaatatgatttttttttttaaaaaaaccatataaaacttttaaaaaaaaatctgaatttaagatttataaaaaataaaaacttaattgaattaccataaaaaatattaaaattatcttcatatttattattttttataaaaaataaaacagataaaactatagtgatcatcgccaaagttgtcaatcgtgtccgaaaagtcaccggagtttgatgttggcactggaaaaa

SEQ ID NO: 12788 - DNA, 699 bp, Cannabis sativa
ttgagctaacttaaatttaagttcttatttttgacctaaaatatgaataaaaaaagacataaaatatataaggataataataaggcttatagaccattgaatttggtgcacaaacgtcttattccatacgaagaatagtttttaatttgtttaaagtttgatgggtgtgtgtatcaattgagattcacaaattctggaacagctaaaagtttgaagatttttttaggaatatggaaaaagctagttataaaagaaagaggttattttacattttatatctttcttatccaataatatattgccaattaaatatgcaaataacttctagaaagttctttcttgatttaaattaatatagaacgatgattaattttataaaccttctcaatctcaaccattggaaacattattaattataactaccacttaccacccaattggcttttacatataattataatcaaggctgttactgttagtataataaagtccttaattgttaggtgtttttttttttctttttttttaaaaaatttttagaaatgttatgatacgtaattatcagtacaatttaagatttagttctatttattttattttaataaaaattgtaaaaagaatactaattaattataaagtatcacttaataataatattaagcaccttaattttttataacaatgctttttttttttttt

SEQ ID NO: 12789 - DNA, 603 bp, Cannabis sativa
aagggattttgggtcttggtggtcgaaaattaaagagaatgagttgaagttgtttgtcgtctgtttgtgtgagactatctggaaatggagaaacagggtggtttttgaaggaatttgctacagcattgctttgattgacaaggatatagccgcgagatacactgaaatggtgactgtgatgtctgatttgcataatcatgagatgatttttgtgcctctctgcagctctgtggaggtgcctttgggggatgtctgctgcctttgaacggatgctttcatggttatgtttgatgttggtttaacggtgttggaaatcgtgggggagagtttagagagtgcttgggttgtcacgaattttatcaaggtctcgggtgtactggaaggtgagctgcaggctatcctccttgctcttcgcaatgctaaggatagaggtaattctattcttcatattcaaccgaattccttagtcgcagtgcaggctttgagatcgggttacctgcctttcgcctagtgctcttaccttgtttttgatgcttgcttagctctgtgcaaaagttttaatgtggtcagttttactcatatttctcgttgtttaaacttttg

SEQ ID NO: 12790 - DNA, 658 bp, Cannabis sativa
gaggtttcaggtgtagacgaatagttttctgcattattaacggctgagattcctccgatctttttgagagtatcggtaagtgatcggaactcgacggttcgatctcggtagggagaagaggccatcttagatttggagggagccgagagagaagtattgaacacacttcgctcgcagtttgttgtatgtaatattcttttttaaaaagccaatgttgtatataatattggaagcggatcctctgtccacaaagggggtctaatttcctgtctatcctattaagaattgccatgtgtcattagcaattaaattatttataaaataatcatcgtattgatatcataactaaataactgttttttatttttaaaaaggaaaatttgcggcataaataccatatattttcaactttatacacttaaataccatatcttcttttttttgcggatttaacaccaaacgttatattttaggcctctccgttactactactctgttagttgtaactcagtgtacacgtgtaagacccagattaaatctccattttttttaaatatttagttaaaataaaaaaaataactttttaatctaatatatctaacttaaattttatttccataaaaatattttaacctattaaaaaaatatatattttttt

SEQ ID NO: 12791 - DNA, 647 bp, Cannabis sativa
ggttgtgttgggtctgatttggggttttttattttactagttactacttactatttatttatttattttagaacaagttactagttactaaatactcttttactttttattatgacactagcaaatgcacgatttgggacatttcttagaaagaaagaaacaaaaaacaaaaagaaaaataattgataaattaacattatttatttaagcatttttgaatagtcgcatacctacataaaatcatcacacttgatcttctccaaacgatgtaagattacacatcttacctagtattttcctctatggatattcgctctcacaatattaactcattatcctatttattatgagataagttgaaaaatactttttttttgtattcgttaattaaaaatactctcatattatattttattaaaatatacctacttttttgagtgggttgtccaatatacccttattttctatttaagtctggcatataatttacattaacctaagcgatctataaaagacattatttataaaagtatgtatattttaaagaatataaaaattcagaaaaaaaaaattaaaagaaaaaataaagtgaatataatgcaattttctcatttattattgataaaatcaactgaatctaactaata

SEQ ID NO: 12792 - DNA, 584 bp, Cannabis sativa
  modified_base (219)..(220): a, c, t, g, unknown or other
tgtctttatccattaaattccaaaaattataaacaattataaagccataattttaaagaaaacccaaaaatgaaatgctttaattcatttagacacaaaaaattcttcaaaaatcacaaattattatatcaattcatttcaaggaagagcacatcaaagttaaaagggacacttttttgaagatcatggaactgaagcagcaaatggctgatatctttnntaaaattaaaccaattaatatttcttctttttgtccccttatctttgaaattaggtgcttcaaggtcaggaagaattattattaagtttaattatgaaaaatgaaaaataagagaaggttaaaagacttctccagtaaaaagaagaagacaaaaaaaaaattctaataaaataaaaccagtataaacaatagtatcagtactaactcactgaaaatataatataatacagtctctattgagagtaataataataataaagacttaaacaaggtgaaataaaaccctcaacattgagaaaatggatcaaaatcttcaaatgcaagttaccctagtgttttctagatgatcagagattaagggtga

SEQ ID NO: 12793 - DNA, 781 bp, Cannabis sativa
  modified_base (461)..(475): a, c, t, g, unknown or other
cttgcaggcgtgggcgcgcggagcttgggcgtgcaggtgtgggcatgggtagcttaacctgttcctttgctcctcctcgtaccaacacattcccttgggtgcattttagaatttacatttggcaaacttcgggcataacactaatgactccagaaattacacttagcacatacaagaaaaattagaaataagggcgacacattacccgcggagcatgtccacccctattaatggaattattaccagcgaatccactattcctctggtaatcttgaatgatcttttttattaaaattttggttgtttaatgacattaattaattaaaaatggattgcatatttattttttattattttgtaaataattttactgtattgactaaaactaatgagactaaaaaatataattttgttttgtctcttactcaaaacgtctctattcataataataataataatannnnnnnnnnnnnnnataataataataatatatttatagcgcatattgagttatgtaagaaaatatttttactaagtcttactcaaaataattagatattttatattcatttgttgtgaaacttataaattaattaaaattaattttgtagcatagtataatggaagagagtagtggcttaatcgatataaagaagaatagcgactcttctaatgtgaagaagagaaaatattgatatggtgttcactgcgtagtaagaaaaaatattacctacgagttgttttatggttatgatctattatggaaggtaattttttgtca

SEQ ID NO: 12794 - DNA, 741 bp, Cannabis sativa
ttaccacttataaacaatctgattctagttgaatgttaggaaaccttagctgtattagagttagtcccacattgctaatgtgtagaaataaattgtgatatataaatgaatgagctactcttcccatagccaattagttttgagatggaaccacattcatcttatctccaaattataacatggtagcagagccacttgtgatccgttatgagtccaaagtgctaccggtccagaaagtcgtttgtgatccgttgtgagccaaagtgctgccggtccaaacagattcttccgctgtctcccttttaaccttgatttgggacctttcggccaaggtgtcagtttccagtgttgggtctttgacctgtttcaaaatccacaaatttcccaatatttggccttgtaggattctttcaaatgtcacattcggtcacatggtctcttgaaggccattcattatacccacacttttcaggctcaaacgtgaggagggtgtattagagttattcccacattgttaatgtgtgggattaaattgtgatatataaagagaaatgagctactcctcccatagccaattagttttgagatgattcctcattcatcttatctcaaattctaataaactgagaacaaaacattaaaccatgaagcacaactaaggcttctacaactcgtggtgaaggagaaccaacaaagggagaggcaaaaatgctagatactcaccgagatgatttcgaatca

SEQ ID NO: 12795 - DNA, 734 bp, Cannabis sativa
aattcaaagctcaatctagcaatcaaaccacaaatctcagctctaacttcaaccaaaacatacaaactaccattctcatacttccaaagatgcaaacacacaacgcatcaagatatcacttcaaatcttcaacatgcatcataaacatctcaagaacacatgaacaaattcttaaagcttaaatgccagaaatcaaaatcaagtaaagaaaggttagaagcttaccacaagttttcttaagcttcaaacacaaaacacaccaagaacacctccaattcaagctaaatttccaattaagtgagaaaatataaaaagagatgagaaggggaaggagagggtcagctagggctagaaatagaccagaaatgagtttctattttttttttcaaaattagcttttgttgaataatgcataaaaggtcaaatgaccatattgccctttaaggccaaaatgttcacatgtatgcgtacaaggtcaaaatagtcattccacaacacccatatataacacatacttttagatttttaaaattataatattaatgccaaattaaagcccaaaaatatattttgggccctgaacccgattcggcccaaaatatccagttgtgactataccgcgccaacttgtcagaaaatacttgcagaaagacataaaatatagtccatcacgatataacattaaaattacggtttacctttctcgggttaaaattacgaaaatgtccctggct

SEQ ID NO: 12796 - DNA, 559 bp, Cannabis sativa
caacgcttctttcactccgatcacctcagcaatttcagggcctacatctcccaatcggctgctagaaatcccctgaagcaacctcccatttgtgtcccgaggcacacaaccaaaaccatatttatgctctgcctcaaggatagcaccatccacatttactttaatgtagttggagaccggtcgctgccactgctccacactagaagacgaaccaaaaaccaacaaagggcctgacttttgagcatgagcagcagaccactattgcagaacgtttcgggccgagaataaaacacatgctgctgtgcaattcttttgcttccaaaggacatcattacgagcattccatatagaccagctaaccatagcagcatcaacaccaacttcaatagattgagtttcaagaactcccataaaccagctgccaaaatcaataggaaccccataaatcacagtcggacttgccaagttccagcaagattgtgcaaaccgacattccataagcacatgagagatagtctcaactgagttaaggcagaaaggacaaagaagatccacatga

SEQ ID NO: 12797 - DNA, 671 bp, Cannabis sativa
ccatatatacatataattatgtgtgtatatatatgtgcataaataataaaaaaattaattaattaattaatatctataaacggtccgtagtgagtagtaacttggtataattatttttttggttctaaatttaactaaggataaatattattttgaatcttctattttacaaaaattattgattaaatcttctattttgttaaataacaaattagatcttatattttaataaaaaaatagtactaaaatagtactttgaattagttttttttttatcaaaataaaaattaaaacttaataaaaacccgatctagaagtgttatgacaaaactgtttatatttttttttatatttgtttatgttaggaactatcttcaagttggttatattaaaaaaaattgtaaatagtcaaaaattgagcttaatgtcatatttgtattattttagaaaatataaaatctattttatcatttaaaaaaatacaatatccaaaataatattaacattttaatcaaaagtaattaatgttgagaaaggtaatttataatgtaaattttaaatatggttttcgagttggtaatggtaatgttcatgcatttggattgaataattaaagtgactaccaactttagtgtacatgattggactagctaattagaactacttgaaat

SEQ ID NO: 12798 - DNA, 708 bp, Cannabis sativa
attgattttaataaaatatgagtttattggattgtttgttagctcatattgttagtagttaataattaatggatttagcatttatgtgtgtaaagtctagttgaagtagaagtgtggatttttttagttaactgaaacttttgatgagcacctcagtccaattagggttgtgtagttaagtcatcttcctaactctataaatacatattgtgttatcacaattgtacttttgatttagagatctagggaggaatacttagttgatagtattgcactatcaaattgtaataattgttatggattaatcaagtatatatatctaattataatatatattatagtgttctatattgtatataattttgtatcttgggattatttaattttctaacatgtggtatcagattgtcaattgtatataatttagaacctttaatttgtataataactgatatgtatatgttaattttcaccagttacatattaacttcattattattttatgttgcattttttttttcatttttcaatcttaaaagcttaggaattttattcatcatgaaatttttattctattgatatcttatatgattaaaattattgagtaaatagaaagaatcttatgattaaacctttagggtttatatgctttaattatgaattcaaatttagatttttccattatattgattattgacaaaaattgat

SEQ ID NO: 12799 - DNA, 633 bp, Cannabis sativa
agagagagagatagagagagagttgaaagatagagagttcttctttttttaagaattttccaatttttgaataaatgaaataaaagatgtgttttattaaaattaatctcagccaatttaattaataaaatcagattaaaacccaattaaaagttcactaaaggacaaaaagtcatttaggcaaaatgaccattttgcgcttcccataaccaaagagtcaaaaaatcacttaggggtattttgctcaattctaaaatcttgactattctcgatattcccaatgtctaattaaattgcctcgctatactaataatactaggatgtgattctaatagccaaacaccgcgttccaatattgttggcacaaaatatgcaaaattatgaaattctatatatgacatttaaaatgcattctgaattcaaataaatcatcgtaaataaataattcaagactaatatgcaagtttcataaataaaccctaattatctactaatttccataaagctaagcagtctttacagccttcttcacttcgttcgccatgatttcatcaatggcctccttgatgttgtttgggtcataatatattccacgagaattgagagggtttacactcttgttgagagctatta

SEQ ID NO: 12800 - DNA, 710 bp, Cannabis sativa
tcatttggttactttcagcatttctggcaaaattttctcagagtttcacagagagaaaaaaaaacctcaaacaccatagatttcctgctcttgttccttcgccatttccagtcaaccttttaccggcgatcaacaccaacacgcaccctccacactttatgtaagttcctcgtatctttgtacactagttcactgtttgttcacatagcatgctttactgttaatttactttttctcggttggatgttgaatttctgggaattttagtttgagtttctgtacaacgcgatagattcctccttttttgcgtttagaattcttcttttcaccttgtttttgtcgaggacccatcttcgtcccacgtaatgacacttaagggtttagagtagacttcgtcttctcgatttttacccctttttccttttcccttacttttttgttatgtcactatctgtgggattcttgcacctgactcttgtcaaggaaaaccttttgaggctttcttttttgacatgtgtccggagggggcctctttccagcagttaggaggcccccattccctttttgaattaggatttggtttggggcctgactgctggattttttcaatctttttcagaaccaaaaatgtcttctgctgcatccggttctaaatattcgaagaagggagaaaatcgtctggccatcctggaggaggtcatgaagggtcc

SEQ ID NO: 12801 - DNA, 606 bp, Cannabis sativa
atatacttcaatggtggtctaattaatctcttttctttttctttccgagatcattaattaaatttttaatgaaagccagggcgcccacactacctacatcccttcaaaatctatgtatacgaatattataatatttatatatgtatatatttgaatatttcaagcatagctttggatcgatatcattctcttattatcatttactactaagaaattgaaatatatctatacacatatattatcaataaatatgaaatcgaagtcacgaaaatgatatcacgcaatttgtaatatctacatttaagtgattattataccgccacataatctgatctagatatatacataacatattattatcgagtaattaacgaccttgctagtacaatattatacatttggatatgaattatatacacatattaataatttatgataaatttggattccttttgtaaatattgaagtgtgtatagggtttaggattcaaagcttaggaagaatatattacgctttaattattgatgataaatgaccacacggataataaagcgaattcgaaaaagagatattgtaggatcgaactactagctatatatatatata

SEQ ID NO: 12802 - DNA, 546 bp, Cannabis sativa
tttttattttgaaagaaatagacttcacctcttttgcggaaattaaagttccagtgctaaatagagtatacacttatctatgtttggcattaaatcataaattaattatttcaaatacaatgtgggtttataaaaaaagttaacaaataaataaatgaaaaatagattacttagtcagagtgtctcgttacagatactccaaaatttttttcattcttaattcacaacttgcaagtttatatataggatttgttcacaattaatttttcatattctacatttaatttaagtcataacccatgataatatgtattgcgtattagtgatattagtaatttttataaatagtgttttacaattaattaatgatatttttaaaaattattttcttaaattatataaaatttaatacttattataccaacagcaatataagggctgctttttaataattttctgataatataacgaactatttatctttacagggaaaaaaaagagattgcatacattatatttcaacaagagtaaggtatttagtcttta

SEQ ID NO: 12803 - DNA, 818 bp, Cannabis sativa
  modified_base (176)..(184): a, c, t, g, unknown or other
ttaaattttacttcttttaaaaaaaattttaacgtcaattaaagtgtattttaataacacttttgctttctaattttaagtaaaatttttaaaaaaattattttttaaaaataaaaatattttgtaacaatttttatttttcaattttaataataaaaaataaaagtgtgttctgnnnnnnnnntttttatttttattttttgatttatttggatctataggtgaagtctaaaatattgattaaaaaaacttgttttataataatattgaaagtgactttttttttgttttcaaaattttgattctccattaaaaaattaaaaagtgaaaacagttttataaaatatatttttaaaaaatatttttattttttacatttaaaaataaaaaactaattaaaaaagtattaccaaacgttacctaaattaaaaaaagttagagtttcttgtctttaaatttatagctataggaggttgtttttttttttttttgttccggccaggttgacttttctaaggcataggtgcaacattgatgggtcgggttatgttttgctattgcgattcgatttttttactatgacataattttgagtgttttaatcttgtctgtgtcatattgttttgttttgttttgtttttggctattctttattttccgttggtttaccatcaaatttttgttactaatcaaaaataacaagttctttgcgcctaatgggttgctgaacattacgtattttgcacaatagttgagtgcttaaattacaagattgaataaatgtatgcttaaattataagtatttttaaggttaattg

SEQ ID NO: 12804 - DNA, 544 bp, Cannabis sativa
ttagccttggtaccaccagtccggcttggcttggccttatttttcttttccttcaagggtttgagcataaaatcctctgggaagagcttgtacttcacatagttggcctcagtggtcaacaaagtgatgttccgagcaacttcaggcagttgaagaattttttgtgcctctccctaagtcccaatgcgaaaggaggacgacagtacgagggaatctgctggaactgagtgtggacggtatccatgcacagcacgaagtactcgtccacaaaattccctattttactgacatcagtgtccatagtacctttcagccatttctcgtacaattggcagaagtagaaataccctgacttgcactacttaggagttgaattcaggtcaaaaagccagttggtgtcgtgcggagatggctcaccccatccttgagaagcatagaggatgaacagggcggataaatatttgatgctctttggagtgaactgggttgggcagagatgatagtaatcgccaatcctctagaagtacagaaacaaaggcagcat

SEQ ID NO: 12805 - DNA, 714 bp, Cannabis sativa
taaatttgattagtcaaatgtaattatatgtttttattagtcacaactattaatcttaatgttgtttcacattttattttttcctataaggaaataattgtaggaaaactatttttttgtcttatacgataactttaaacctcatctaaaactaaaaaaaaatctaagaattagagataaaattaaaaagaaaaaaaaaactgtgaaatatcatacttagatacttgaataaccactctaactaatgataattttacaaaagaaaataaataactttatcagagtaattattggtatttttgttaagaacattgaaaagattttaaacaaataactattcagtaacaattaatctcacctaaaattaacaaattagaaaaaaaaaaaaaagtaaaataacatgtttcagatgaaaaaaaagtgaactcaaaatgataaaacagatataaaagagtagttcaagatcacctaaatactccaatagtttgttgggtatgccatcattgactaattttgtagtatgatcaacttgattcttaagcgggatcccaagtaaaagagataccacaattactagtattgtggcttccttcaacttcccacaaaactaaaatttgtaacgattcaaaacataaacacaaaactaaattaaaaagctgaaagtatcatagataaagtagaaagataacaaacacactatccatattgtggagc

SEQ ID NO: 12806 - DNA, 535 bp, Cannabis sativa
attttataatttgaatttattaatatgaattaattaatttaatgaaataataaaaaaaaatagtgttcttgattaaaattaatactaaaaaatttagcaaaacaattaaacaaaactctacatttagagaacatttagagctctttatttattctctattatagagaacaatttttttaatagtggagctcattttttttatcgcactccctattttaattaaggagtgtatttagagaacatatttagtgtggttgacaactctaaaaattgttcccatgatccaatcacattaaattaataatttttttggtaacaaaaaagtaacttttttctaaaaaaaaagtaacattttctcatagaaagaaaaaaagaagaagaaagtcatgtagttgtagtctatattaagtaacactctacacatttatacataaaagtagtcttaaaaattagacaatattacacatatgacgaaagtcgaaactattctaattaatgagcaaccatcattggagatgctcaccctaaaatatgg

SEQ ID NO: 12807 - DNA, 615 bp, Cannabis sativa
attaccccggatcggcattgggattttaacaaacttcagcattattttgacgaggggatgtgtaactccattctatctgtgcctatagatccttctcactctgatgctctcatttggaatcatcatccttctggttgtttcactgtcaactctgcctatcatctggctaattcctccatatctggccctggcccttccaaccctgctaactataaaagttggtgggtctctgtctggtcctccagcataccccctaaaattaaacattttgtttggaaagccttcaatcatatcctcccttccaaccttaacctctttcaccgtaaatcaattccctccccaatctgctccatttgtcactctcacccagattccaacacccattccctcctccattgttccagagcaggtaaagtttggaagcactcttctttttctcatttttactctaacaataaaaactgtgatattaaggaatttatgcttagaggttttgattttctttctaaagatcaatttctcacttttttgggtttgctttggtcgatttggaacaaccggaacaaagccattttttattgtaaaagggaacatgattactgtttggagaattct

SEQ ID NO: 12808 - DNA, 649 bp, Cannabis sativa
attggaagtagacaagttcactaggactaatgactaattaattctatggcgaatcaagatgaaagcattacttgttcatcagggcatttcagaagcagttgctcatattcgacttgcaaaaattacagatgaaaagatcaagagggatactgaattaaaggctcacaatgccattttgttgagtcttggagatgaagtcttgagagtggtctctgatgaaaccactgcttcaagtttatagatcaaacttgcctccatttacttaaagaaatcattggctaataaattgtatttgaagaagaaaccctatgccatgaagatggatgaaagtaaggaattgagaagtcacttggatgaatttaacagaattattcttgacttgaataacatatatgtgtcaagatagaggaagaagatcaagccatcaccttgctaagttctctaccaaaaatctatgaacattttgtagatacgattctctatggaaaagatacattaaccatgtaagaggtaaaagttgcactcaattcaaaagagatccaaaagaaaatagaggatagaggggactcaagtggtggtggtctgtacatatattgtaagaggaagaactgaaaaaagagaattcaagaacaagtatagaagcaatagt

SEQ ID NO: 12809 - DNA, 683 bp, Cannabis sativa
agtacccatgtttgctgggttatctttagtaggtaccttttctacttctagttcaccttgagtcactttatcttgtataaagtgatatttgatctctatatgttttgttctatcgtgaaacatagaatttttgcatagaaatatacatctttgattgtctgaatataatgtaggtactcctttaagtagcttaagttcattcattagccctcttagctagatagattccttgatagcttctgctgtggcaacatattcaacttctgttgttgagagtgccacaacaggttgtagctggactttccagctaacacaatttcctccaagcaagaaaaaataggcagatgtagaacttatgttgtctctgtccccagcatagtctgagtcactgtacccttctattatagtacttacattttgtctcttatagaccaaacctactttagttgtcccaagtaagtatctgaatacccctttcatggccaactagtgaacttttcctggattttccatgtatttactaagcacactcatagcataacctatatatggtcttcttcttacaataagatacatgacagaccccactgcatttgaatagggtacatctttcatagctttaacttcttttcagttttagggcattattctttggataaagtatactggctggttataggttg

SEQ ID NO: 12810 - DNA, 515 bp, Cannabis sativa
ttaaaaaaataatgaaaactaaagtttgtattttccatagcaaataggccattttctttgggttatctataattgatttgttcaaatggagagatattaatttggattagagacaagagtttttagtcaataaaagctcatgtaaactttgaattggaacttgaaaagtcaacaatagtgggtggttgctttgctaaaaataagaatagatagacatatttttttttttaattaagtagagtatatttttattaattctattaactaatgatgaattttttgacttatagctaaaatattttaatcaaattgtgattagaaaaatagtacttgaaaaaagattaattaattaatttaattttcctcaccatcattacaagtagtattattgtgatttaagtgaaaattaaaatagacctttttgataaaatattattttcattaagagatttattaaaattttattttcagacacattaattatgtgaactttaatttatttgggtataatactc

SEQ ID NO: 12811 - DNA, 504 bp, Cannabis sativa
gaataattttatcaatgcctaagtttcccagatcctcttcacgaacccttcaaaaacacgaaatggaggattggctcctaggactatacaaactatggatgaacgccataaggcagcttcagattcaatctcatcaatgtccagtttggccacgagtctatccctaactttcataggttcggtgaaatctaatcgagttgagggagtacaaatccaattaacctgctttgctctcctcattttccacttcctccgccaatctcgtagcagattttgactgggagcagctaggtgaaatcttagtttcaatgtcttcacaaaggaagaacacctccgttcgagtctcagagcacaaaggattgaagggagatccttcactggttcatcaactccagcaatggtggccaccaccttagacttcgatactacctttttcttcctaatcatggggagaaaaagagagaatcacactcttagttttaatttaagttgatccacaataaa

SEQ ID NO: 12812 - DNA, 538 bp, Cannabis sativa
tccccactgcgagacctacttcgctcttgccttggtgggacatctttccttctctcctcatttccaggcaggccttgaaattggttagtcctgccatatgctcttttaggcaagatttgactgttattgggctgataggatggcgaccttgtttgggatgcagttggtccccctggctgtgaggtttgcccataatccttagggtgctaagttccctctggacataggaccttttccccaaaaagggtcccttatgagggtggctcttcaacttgagatgaaactctcttgttgaatcgtctgatcaggtcgttaacctctcgattctagcaattcaggtccacttgacaggcttggaggattgcatcttgctgatccatccactcctagaatttgcatctctgttgggcaaaagcatcgcctatagcagcgcaagtttcctattggtcatgatgaagaagatttgtgtgaccctgtactttccctatggcctctctcagcctaacgagttcagaagtcatcccccagattaacatgg

SEQ ID NO: 12813 - DNA, 861 bp, Cannabis sativa
taagtatttaacaaacaatatatagttctaagagaattgttaattataatttttcattcgattgaaatcttatttattttactttagcaaatattctaaaaaatcgttaactaattataagatgttacctcataatacttaatcaatctataatacttaatcaatctatggcaaagatgaagaacttctctccttgtaaagtccagtagaattttttttttgtgtaataaaataaaataattttaatgaaagctcaacaacacaataaaatatgcataggtacacattattaagaaagatcacaaatttttataaataatatatgttaagaaaataatatatatatatatacataaataaataactattatcacaagaatagcatccacatcccatttctccacttagatgggatcccacataattttattttattttattttttaattcttactagatgctcatagtccatagcatattatagcaatatcaattcatttgaatttatataaaagtaatgaaaatagtttatgaactctattataatttagtttataatatataagttatgtatatattcctaggctgaaaatttattttattgattagaatagttctttaggatatatgattaaataatcatgtccttgaaacaataatatgggggggtttttgtcttcttacacattttgttcttataataattttatgaaaaagaagattaggatttaggaataatacatcccaattaattcttaaataatagtaataaattattttaatttaaaattcggttcaattagtacaacccaataataatatcaaaaaaattgaagctttatttctttcaaaaaaaaaaaa

SEQ ID NO: 12814 - DNA, 548 bp, Cannabis sativa
tttatgcctaatttttaattttataaatcattttgagagtcaagttgtattgaatagtacaaaaagtatgcagtgatttgtcctcttacacaaaatttactccactaccatggccctagcttatcatctctattatactattccttagtgttgcagttacagctctaaaattcttaaacagaagtaggaataaaacaaagaaccaaaacatatattagcatctatacaacatatggtatatccaaagcagaaactaattgtatgtttattgattactttccactaatcatatattcatgtatctgattttctaatgaacaaaaagtacaaacacacttgcaacaaaattcccaattactaaaattgtcaaagaataaatgaagtgaagaacaaataatatcatcagggtcactatatcagaactactaaaggaaaatataactgaactggaccatttatgaaaattctatataattcttcctagtctaaatggggcagacctaggaacaaaacaaaagaggaaagtcaagagagagggaataaattat

SEQ ID NO: 12815 - DNA, 513 bp, Cannabis sativa
tcagaaaataagagaagtaaaaaagaacacaataggcttaaataaagtctaaaactactcttaaaagtcatttcatttctcacaatgagttctttatgcctcatatgtttagtctattttttaaggataagcatatcctcataaaattctaccacaaaactagtagtttcaactataagtgaacaaagagtcactatttatattatttgagcatgaatggtcaccataaaattattagttgttacaaatcatgaatggagcatgcatagattttgacatggtaacttggaggtttttgagctgagagaaacatcctaaatgttcaaaacacacagattaatatgctgaaaataataactaattactagttaccaattttttcagcttttaattaattcttttccaacgtgtaccaaaccactccatttttacttgtgaaaatttcatagcagagcaaagaaaagaaaatagagagggggagagagagagagagagagagagagagagagagag

SEQ ID NO: 12816 - DNA, 577 bp, Cannabis sativa
  modified_base (242)..(270): a, c, t, g, unknown or other
tcactcatatctttgacattatttactagtagttgtttacgatcacgcccccaaataagcttgtccttttgaagtttaaaagatcattcagtcaagataaaaaaaaaaatagatgaggcctctgaaatgttaaaaagggctcgaataagattcccattctaccctccattatcactcgataacaccgcgactatcccattatcatcaaagacacggataagtaattattattattattattnnnnnnnnnnnnnnnnnnnnnnnnnnnnntattattattattattattagtttgatactcctaattttgatattgatgggtctcaaatattaattatgagtttttacacaaaatactatatttttttaaaaaaaaattatatttataatgtgataagggattttttacatttacaccattcatacgttatttttctttcgtttgcattgattttaatttatttcagtgtatatgaaactttcttttagtatccttctctctttctataaatatataaatataaatgtaaagataataagtgtaacactttatatcacttttttttgttctaacact

SEQ ID NO: 12817 - DNA, 1000 bp, Cannabis sativa
caccaacaaaaataaccaccattacagagcagagtaaaaatgcagaacagttgaaaataaccatagacattgatcaaagtgatatctcaacaaaaaactgcccatcaattctgaatcccctacagtcaatcgacaaaacctccttctagctgggatgcgacctgagcagtagctcctcaaagcggcagggtagaccaaggaaacaaacccacctggcctcaatcgaggatgatgctcaacccaaaaggcgtgggaggccgcctaaatcgcagaacggtctctctgttaccccgaagccgtttaaatggaggaacaagtcgaagtcgaccactagtatgggagccacgataaccaacttatgggaaagtaaagcttttgatctcaaggtggaccttcataatcgctttgtggtgatcgaaaacacaggcttagatattacaaggtgcaaaataacagaactcaatgaagataacacagaaggccactcatctaaacaaccacaatatgatatggatttttgttttgggggctatggagacttgcctggaaaagtctccacagtcgccatgaaaatcttggcttggaactgtcgtgggctagggaatgccacgacagttcggcaactgacggtgcttgtccgtcaacaccaacccgaaatggtcctatgatcggaggctcgtattccctcacaaaaattccaagctctaagtaataggttgaagtttgcaaaccaccattacatacctccaattgggctatctggtggacttggcctatgttggatgcaaggagttcaatgcaagattacctcagccaacaaatttgttttagaaggagaaatctcttcagaccccccaggacaggtttggcaactgtatggtatgtatgctcctccccacgaaagagatatagaaaccttctggacgacaatcggtgagaagttagtctacaaccaagccccaactttgatcttgaaagatttgaatggcaccctaagaga

SEQ ID NO: 12818 - DNA, 760 bp, Cannabis sativa
ggggggtgtttatagtattattcttggaggatccctagaactgcatcacttgtctttccatgcaggttccataaaggcacatattcctagcagatacaaaataggaaatatatgacctatatcgtaggtatcttaagagttgggtggatataatcttttattccttcttgattgatgtgatctttcataaagtagccgtcactaaccttattaatcacaccgtaatagctacaaaagaggggttacgccatcagtcatattacttatggcagttcaagtacgttttctcccatgcggccattaaatgcgaggtgactgttcaaatagaatccagtacctcccggaggtgcccgagcatagccctagcctccaggagtacgtggatccttctcatatcttctccgggagttatcttctcattgacactcatgttgccaaagacttagtcgatttctttaagagctgagcctctcagctccacgtgtcgtctttatattggtccacgcattttaggcaaaatagagggcaacagtaattaataatataatattattatttttattaatttttagcgacaatatatattatatatatgtagtttttttttgtaaagaaattaattaattgtcttaatttgtgtttattttgatgtttggtttttacagcgagttgatgcagttggtggggcgatatgggatcagaaaatggtcaaaaattgctaagatgctaagtgattgagtgggaaaacagtgtagggaga

SEQ ID NO: 12819 - DNA, 770 bp, Cannabis sativa
aaaagaggcataaatatcagagataattgaaaatatcaagaaagttactagaatcgataatttttctttttataaatacacacaattcaaatttaaaatatgaaaattagggttatttgaaaaggctggacattttctcaaaaaaattgaaatgattttttcattaaatcaatcacgactatattatgacacatgagaataattttgagtaaccagttccacgacattcgagctcatactaaagaagtcataagcctgaaaattgtagaatcgatgggcaattgtaagggataaaaataatcccaaggatataaaaataattttactcttataacaacaatagaactaataaggtgatgttgcaagaataacaaaaaaaaccaaccgtttcactataaaaaaaaaggcaaaaacaacagatcaaagctgaccatcgaaaggaatagaggataataagcagaatggaaaaggaagagctcaaagaagcgagaagaacaagttcgtgcaaagcatttagatcgaaagaagagggcaattctacattaattctcgcatataaataggagaccccgccattctaaaagacgaagaattttttatcacaccagactagtcaaaactctaccagaatacatcctccacatattatcttagttcgggaacaagagacaaaggaggaaatcaccagtaatttgggaaaattatgtaaactagcaaagttactctttacaattagatcaatcctagtgtaaagaattcaaattcgaaat

SEQ ID NO: 12820 - DNA, 809 bp, Cannabis sativa
tttaaattttgatagtaaaatcctctaaattagagaaacattagtaaatttaaggtgtcatcaatttttcacagttaagttgtttatgtgtacactcgtatatacgcgatacatttatattgatacacttaaaattattatttaaaaaattataatattttttatattttattttttatttttataattttaaaataataatattaaatgtaccaatataaatatgtcatgtgcacaagaatgtacacataaatagtctatagtgataattaatcaaatgacacaaaatttcaagcacgctaaaaactttaaaattaaaattaaaatttacaaaattaaaaatgataaagtaagctggtgtttggtttgatgtaatgtaatagtaatggtaatataatggaataagaatagtaataggaattgattacaatgttcggtttgtagttgaaatgaacattgtaatgagaattattgtgtttggtttggtatgagaatgtaatggaataaaatgtgtattgactaaaataaccctattgcttttattataaaattataaaatattaaaaaaaaaaaggataatatagactttgacttttttttactatatttttattaaaatatttttttaatctttgtaatggagtgtaatgtaatggggttacattggttttagtatgtaatcatcattacaatactgaatgtaataagcattacattgtaatggattacaaaaattgaaaaggaaaagcaaaaacaatataatggacctattcattatcattataattaccattacaatgaatcaaaca

SEQ ID NO: 12821 - DNA, 1083 bp, Cannabis sativa
acacaatcagacgttggttgcaggatggtggctgtgtggttgcgcgatggttacaacaggtgaaggtttcaataagacaatagttgtagggtggttgctgagtggttggccaaaggttgtatcagacgaaggtttcaatcagacaaagattgttgggtggttgacggaaggttgcattagacgatcgaaggtttcaatcagataaaataactgttagcaaaatatttatgcaactgtaatgtaactgttatgaatcattaaaaattagaacagtgattccacgtacgtaactctatctaccaatctctttatgatttaatatgaacaaattcaccatttaaaatttagaaaacaacaaaaatccactaggataaatattttactatagtattgatgtaattttttttggattacacttgagttgaattttttgggaactccagttcaattttttgagatttgcatttcatggatcttaaaattgaagtcaggacattagttttatgcaaattaaactagattttcagttgaattttagtttcgtagtagtttttctacactttttcatgaatttaaaacagcccctattttgattgattctgatcgtcttctcaggtgaagttgcaggaattaatggtggttctctttctggttgaatttttgtttcagttgcgttgggttgctgcgtggttatgcgatggttgcccaggaagcatggatcctaggttgaaggtgtgtgtaagtggtatttatgtaattttttttatttaagttgtatatttgtttatttggccaactggaagaatttttgtaattgttacttttttagttaaaacttaaaaaagccataaaaaactaagcttgagcaatcattaaccatagttaagcacacaattcattagaaatttatcatcttcctagcattgtttttagatcaattaagagtctcatcattgactcattaccgccaattaaatccattgctcaaattcatcacataaatcgtcataataaaaaataactactacataaaaccaaaaaaaaaacgaaacatgaaagcaataagaaaagacatcaaaataa

SEQ ID NO: 12822 - DNA, 896 bp, Cannabis sativa
ttaattattgctattttttattctaatcatcaacactaaattgtgaataattaaataaatatagtcctcatgggatcgacccttacttacgattatactaaaataatcgaaagtattagaagtattgtggcttacgacatgcatcaatttaatatataagttttattaaatcccgaacatatagctattcacaattataatgatgccatcacagtagaaaataattgtgattatatgcttcaaatttatttagtcctgagatttatcaatacaccggatttacactggcgtgataatcggtgatgtagtttacttaaacttggctaagtggaatgtcttttccaagacattagcaaagtaaactcgcatatgatgtattggatatatatcagaccagactgatattaacagtgaaaaagatatcataaatttacatttatatattttataactcaatgtcacttagttgatcatagatcaattgatctcaatcctgagatggttaagctttaacctaatgtattattttagttctttgacttgttcattaccagttgttattcacatttttgattaatgacatgtgtacttccaagacccaaaattagccagaatgggcccattcctaggcacaatcaagttaagggatcaacccacatcaaaatcaggcaatggtttcggatccggatgcgagtccaacttacatgcatgataaagccaaaccactttggtccgggaaacattgttttgcctagaagatgaaaggtccatcaggatatattcagatatcctcatggggtaatctaaaaaggacaaatgaagaggcactcggagacatctagaaagcatcctttgtgacatccctctgacataggaaactacctttttgtccaacg

SEQ ID NO: 12823 - DNA, 751 bp, Cannabis sativa
ataacatatataccggaaaattagtttgcactgaagttccccaaaacttcaaggagaccaaatcatgagctctggctgcattttcttccctgtcgaacctccctgctcattccactccaaatagttaatttttttatgtaattaaagattatgatttataaatatatatatatatatatatatatatatatatttggcattgagtttttaattttaatttttttgatattgtatctatttaaaaatttttataattcttcaagaaattcataatataattaatttacaacactttattctatatacgtataaactaaaataagtatttgaaccttattttttggtattataaatttactatctacaatatataaaattatatattgatataaaataagtatacatcctttatatttatattataaatatatatatatgtatatatatacttccttgcttgatagtatatatataaggttgatcatgcaaaactacttaccaagataaactgcaaacaaagagaaaaacaagagtttgttattatgtttctaacttgaatagaatatatattataaataaataaacaaagaaaggttaaaagaaaaagaattaatgtatgtatgcattaattaagtaaataaatttaattacttgttcttccttcctttggtagataaccgttgtcataaacatgagccacgaatgttgttttatctttgatcctgcatttgtgcgtgtgcatatatatata

SEQ ID NO: 12824 - DNA, 632 bp, Cannabis sativa
  modified_base (410)..(418): a, c, t, g, unknown or other
aaccctagttgacattttacatgggcctaaacaatttcaattaatagaacaggcaccaattttgcctaacacgtttttacgagtcaatatcgttatcggtctattgaagtatcggttctcatataatttaatataaaggtaaataacactattttgtaagtggcataatcccaatgtttatttttagcgacataaatacccaatgtttataaaactgtaatttttctctaatttcattcgtacaaaccctgttattttcttaaacaggccacatataaggtctagattcttgatcattggatctagacagaaacatgtagtatcagttacttctaaatgttcttttaataaatttaaaacgaagtctgtactgacaaaactgaacaaaaattacagttttacaaacattnnnnnnnnntgccgctaaaaataaacattgggtttatgccgctaacaaacttaaaactttgggtacttataccgctattattcttgatataataatttttagagaatattactagttaatttgcaaaaacgacatgtctagaggtgttaggcattactggtgcccaataacaataatcttttaatttattgatgtaatgtaaaattacaaaaattactactaa

SEQ ID NO: 12825 - DNA, 688 bp, Cannabis sativa
aatgatcgaaatggaaggatcgcagacattgacaacctgtagaataaaggaaaaaggaccgttgagaccttgggacactaggatggtgccaactaaagggactccgatgatcaagtcaataaataattcaaataaagaatagccgaatgtaaataaaaaagatagaaaataaatatttccacagtagattaatggaaaatggctggtaataataatagtaatgtattgcgtgaatgcttgagtaagtgttcagtgagtgaagatgagatgatccttcaggactcttgggttctccttttatagagcctttgatggttaaattcatccgttttgaagaacgaacatgggaagtggtcttctccttttgcaggaggaaggatcgattcttttggattagttatagactcgttcatatcctttgtatttgattggtcttgtagctactgagctcatttgggccttgtattttagccaaagcccaatgtattttggatgagtgggttatatttacggacttggttttgaaggattgtaattccatttgggtcgtaagaggcatttgggcctgtgcaattttttgccattataggcatcttcatgagttggtcaatgctagacttgggtggagaaatcaccattgttggggatctaatatccgattgttgtggctcgtggtggacgaggaaca

SEQ ID NO: 12826 - DNA, 614 bp, Cannabis sativa
agaaactccaattcaattaattctctattattcattaacaaatacttcaattttcaattcaattaaaaaaaaatgggagctagtggttttcgtttgctgaatatggtgcggccttttctttcatttttacctgaagttcaaagcgcgaacagaaaggttacactcagagacaaagtattgtacagtgttttagcattgttcatatttttagtatgcagccaattaccattgtatggtattcaatctataaccgccacggatccattctattggatgcgtataattcttgcgagcagccgtggcactgttatggaactcgggataacaccgattctaacatcaggctttataatgcaattgttggttggctcaaaaatcattcgagttgacaataatgttcgcgaggatcgagctcttctgtatgtttactctaactaactcgagtctgtttgatattgttttttgttttattttcttttataagtaaccttacatgaaagaaacatcgtagcacaaaattagagaaataatgtaacattaacattctgacttacataaaattctaatatttgttgtttttttgtagaaacggagcacaaaaattactgagtatg

SEQ ID NO: 12827 - DNA, 629 bp, Cannabis sativa
tgggattgttcccatcatgtaccgaaggtattatcaatgtgatactaataatatatatatatacatatattagaaaaagagactcaaacttgaaacttccttttaagataataaaatgtatgtgtagaagttatgactaaactatatgcctatacaactaatacatacgacttgggtatggttaaatgttgtataattaattggattatttttgtttcatttcaaaaatataaatagttttaatatttttcaaaaatacaacatattttttttcatgatggtccaataatatttttattgtactaaagcccacaaattttcagggtgttgcgtgtttataggaatttttacactacatactgaaattttttaatttttttacttttttcttactgtagggtagaattttttcacggttgtttttaattgttttactgttattttaattattctactttcttgttttacgattgttttataaaaagacaatatttttgttaaaaaaattccgtgtgacagtaaaattgtaaaattttgcccaaaatttagtattttgtgaaaacccttaatattatattaacatagttttattgtgtgtgcgtgtatatagagtgccttgcatgagaagt

SEQ ID NO: 12828 - DNA, 582 bp, Cannabis sativa
atatgcttatggaattaagtttattaatttccaaaaaagatagacctatactcatgttaataatattaattattgttttaataatttaagtaatactagttgtaaacaatgtaaagtataatgcccaaagcatatatcagtactagtacctgtctatttgtaattgaaaaataaataataattataataataaatgattatataatttaagtgtggcatacttaccattcttggtctttgaaggaactttaggattgagatttgattttgattcatcttgtcaaaaagtttttcaagggagaccttggatgatccataggaaattgttgattattcaggaatggctggaagatggaatttaggatgttgaagagtttgatttctgtctttttttggattcaagctcttgggcttccctcgtcttgccttaatcactctaatttctccctggttgctgctaaagtaggtgtgcttagggacacagactcaacaagaaatggtcagatgcaatgataaggcttttatgagatttgtagtggagatgatgattgctaaactagtgatagctggtttcttcttgga

SEQ ID NO: 12829 - DNA, 681 bp, Cannabis sativa
tagttgatgtcccaatgcaagtatggcaactttgcactaagacagtcccaaaaactgaaaccctagtggaggatgtcaacttgggcgccgagtgaaaccctaggtgcccaggttggctttcggattgcaggttcgtataatttcagatcccgaggcttggattaggttgctccataatattgaaagatagtgggttggattcaagttattgaagtccgaacttgcatttcaaaagatgccgagggggctagggtcccctcccaggttcaggtctactcaactccgtgacgtcatccttcatgccacgtgtcaaacattgatgttcacaatactagaaaaagtttatgggttaacatgaataaatatatcatccttacaggtttatacagtcaaaagtttgaaataactaaaagggtaatttgcggccaaactccctgaactttgaggtttgagacgatcaactccttagactgaaaatttaagggctgaactcctcaatctacataatcgttttgctctgtacttcttccgtctactttgatttgttaagtgtcaaaccgatgataaccatgacaaaattagtgatggagagaacaagttcgaatacagtcaaatcttaaaaaatgatttaagaagatgaaggaaacacaaacaaataaggtctcatctctagctccaaca

SEQ ID NO: 12830 - DNA, 707 bp, Cannabis sativa
ttgcgtggtgcagttcttgtattgctcaaagtagatggaggcatcacgaatgatctggtctggggaaagggatagaccctcatgaagccaaatgttcctgcagttccagagcttccacagcaaacaaacaaagagatgataatgtccaatagtaaattcagtggcagcaagatataataaatccatacagctaagtgaagaatgtgtacaaataaaagctttaaaatcagttagtttccataccttctgggcagcagaacatctgaagagagcatgttctagggtctcatcgtggtactgacatcgactgcaattgggagaggttatagtctttctgttaaaaaggtttcggcttgtagggagtatgtcatgacagacacgccataggaagtgtttcactttaggaggcaaagaaaggttccaaagtgctttccaccaatcatgagaggatttgttattggagggggaaggttcagtgtggtgaagctgtctatgggcaaggtggtaaccagagttgactgtgtatgaaccatgaggggtgagggtccagtagtatgtgtccggagtggagattgtataaaggggaatggaaattatagcttgtgtaatgtctgtggggaagagagactgaatagtgtcatggttccattgtttagtaggtgtgataaggtcagccacggtcatatcagcattcgaatggtatctta

SEQ ID NO: 12831 - DNA, 531 bp, Cannabis sativa
  modified_base (382)..(388): a, c, t, g, unknown or other
gaatgattccctcaaacaccatagttggtgtgataggcaggaattgtcccacagtggctgccggtgtcgatgtttctccaacatgaccggtcaggaaataagttgagggggtaatggtggtacgccccacgcctccatcgatggtattgacaggtgttgttccattacctgggagtggaacatttattgttctgacattaaaagatccccgtgttgttatctccattcgtttgctttccagccattatgattttccttcgaaatcaacagaaaaattctttcccatagacggcgccaaatgttgttggaggaatttagacaacaccaagtaaaataataaatttaaaatatgaacatgattatgcgattactctacccagannnnnnngtattcaaactatggacacacagacgtactggaaatataaataacacaaagaaagtatagtggttcagtcagatcacgatctgcttagtccactgctgcaagggttttctctcttggcgatttcatgttagatcactccttta

SEQ ID NO: 12832 - DNA, 556 bp, Cannabis sativa
tttataaactaattatttttacattcagtctacataatgaataattatatttcctaataaaaaaatataagaaaaaaagcttctttttattcttcttgaagaccttctcccccacaaacttcatgatctctaagtcaccaactgcaaatgtatagtgaaaatatgtttgctacttcttctctttgatgccatttgtatatgacatgtgataattctcttttaactgcaaaaaatataagaaatcattgaatgaaaatgtcataataataaacaaatcaagtgtttatacaaattcagtacacgcacacacacatatatgcatatacaaactatttatacaattaattatatgaacattggaggtataacaatccttaattcttattcttgcagattctcttagggtctttaaattgttagaaaaatttagacaacatcaaaatatgcgagtattcaagtaaaacaagaacacacatgtacaaaaatatgagtattcatctcgagtggtgaattttcaagattagactatgaacaaacaaataagaacagtaaaaat

SEQ ID NO: 12833 - DNA, 500 bp, Cannabis sativa
gctcatttattgctgcaaacaagattgaataatacccaacacacaaaagttgcactacactttttttagtgttttaatcatagatagatatatattagatatttttaataaaaaaattattaaaaaatattattagtgtttagcaccctttcggagtaatattgttattggtgttttaatcattagagcgtcatctttttttttgttcagatcgagttttcaaagagagtgatattcctattgagttagagttgtacgtatgggctaatttggtgatttaataaaattcaagattaaaaaaaatatataaaatttaatataacttaagaaaatattgttaactaatcataatgagtgacttatatagaaagtgttaagccccattctctttgtaggactatatagcaattaatgtatgtgtaataatttaagttaattaatttcaatcattaatatatcatggccgatttattgtggattataatttcacagttttattt

SEQ ID NO: 12834 - DNA, 582 bp, Cannabis sativa
tatttgatccttgaccatactccagttgagcattgtcattttgaattcattatgagcaatttgaacttgtacaatcaccaataacagtgaacttttaaactcacaacactcaatcatggaagaacagtatcagttattccctagaaccccaagtacacccaaagttcttacactactataaaacaactttttagaggttgttttttccacaagttttataaaaagagaagttaaagggtgtcaaaatatccgtctgttatgattaaacaacacaaactcaaacaagaataatgatcaaacaatcagcaaacatgttagcaatcaaaccagaaatcaaaactgataaaaaaaaccaaaaaagaaagagagaaaacacaagaaaattatcttggttcggatctcaatttgagtcatattccagctctcccccaaggagtttctccactaagaatcaacaagttacaaacaccaatttcaatacacaaacaacaagaacagtcaatgacagaaatggctcttcaacactcaaacttagagccactcaacctttcatgacaacatgatcttcagccatttctgttc

SEQ ID NO: 12835 - DNA, 624 bp, Cannabis sativa
gtctcagtttgggtcctggtctaggccctaggtccgggttcaggtctgggtcagggtcagggtcagggtccgggtttgggtttgggtctcgggtcccgagtctgggtccgggttcgggtctgggtccgagtttgggttcgggtgtgggtccgggtctaggtctccgtccgggtccgagtccgggttcgggtcccgggtctgggtctggttctgggtccgggtccgggttcgggttcgggtcaaggtccgggttcgggttcgggtcagagattgttgttgaccccgaaccctttgtaaatattataataaaagctaatacagatcatttgttatgtattaaataatacaacatacattgtattaaaattttagttgaaataattaatacaatatattactttatccaaacatggtgttattatttatatttaatacaaatacaatatgacccttatacggcgtaccaaacgagccatttgtataccaaagattaaaactcaacattataaggacctccctagctaaataattttaaaaaaattataataatttaaaatgttcatattatgatttaaaaacaactttgttgcacaaaagtagtaaattaagtatttatataggcac

SEQ ID NO: 12836 - DNA, 639 bp, Cannabis sativa
tccttagtatagagaaatgccaacgtaacacggttttaaggcataaatacttcaagagctcctttggtaggttgtataaaagttgtattgtattaaataacaagtaccactacgtttgaataaaatattatattgtatcaattattacgaccataatttgtaatacaacctgaatcatattatttaatatataacaaatgatccatattagctttcattataatatttataaagggtctagagttagagactttggctccaaactcgaatctggacccgaaactagaccccagacttggaccgaactcaggacctgaaccccaaacctagcctcagaccccaacaccaaatctggacacaaaccttggactagaccccaaatttggacctagaatcggaccaggaccccgaactcagacctcaactctggaccttggatcgagaccctgaccttggaccctggcccgggactccagaccccaataaagattatacaatgttaaagaatctattaatacaagtcaataccaaacataattttatattaaataatattaatataatactatgcaacgcaatacaatacagtatgacgtactaaacgagctccaaataaatttggatgtttaatgaatggaa

SEQ ID NO: 12837 - DNA, 930 bp, Cannabis sativa
gaagcttcaccacatcccaagcactagagggaagtataaatttacttacccgacaatcatcattaatcctccttgtgattggctgtaaagatatcagacgcgggagccatgggtccttatatgcctgaacttgcgttccatcaccgatggatctttgaagactgtatttaagcaactccattccctagatcaaactcgaccaaagatgagatgaaccatccttttcagtggcctttaggatagagcaatttgaaaaatatttatgttttagaatttgagcaggcaaggaatctgggtatagaaataatctccacacttgtttagctaaaagagcttgattaaaaagttaaaaaaacccaaaatcctagcccacccatcgccttaggctgatatatcctttcccatttcacccaaggaatcttcttttaatcaccatatcccaccagaattgtctgacaataaattttaatttttcacaagttgtcacccagagcttaaagacactcattgcataagttggaatagcttgaagaatatatttgataagtacctctctcccacccgctaaaaaaaaactcctcttccaccttcgaacaggcttcctcaccttctcacagatcccctcaaatgcccactttttatttctaccaatcaccgtaggcaaccccaagtacttgccatgagtagccaccgatgtcaacccctgtactctcaaaaaccccatctcaatccacctgttgcacattcagactaaaagtgatagcagatttctcaaagtttatcttctgaccagaagcttcctcataagttagaaggatacacttaatagtttcagtatcacctccattagcccaaacacaaggctatcatctgaaaaaaaaaaataagtgagtaacctgtggtcttgatctagaacacctaaaccccatc

SEQ ID NO: 12838 - DNA, 638 bp, Cannabis sativa
gcaaaaggaattatgtataaaaaaaattgcttagtttatctaaaaaaccaaacaaaaactgcatttattattgagctttttgagataaaatctttttaacgattgtttcacttgcatttaatcctttaagtttaaattttaactataaaactctcaaaactattaaactagtagcaaatctaaagggtcattcagttacatatcacttataagctgtttatgtgtacactcttatacacataatatatttatattggtatacctaatattactatttaaaaattatttttaaaatttattttaaaattaaataaaattataaaaaataaaaaatattacaaattttgaaataatttttatatttttaaaataataatattaggtgtactaatataaatttaacacatgtataaaaagtgtacacataagcagtctatattagcaattaactgtaaaaaataaataacatcttaaatttataagcagtacagtagtttagagaattttactgttaaaatttaaatttagagaattaagtgcaagtagaatgatgttgagagaatttaaccgcaaaaaattcttcattatttaattaaaagattaggaggtttagaactgtctatttccagcgatttatt

SEQ ID NO: 12839 - DNA, 1170 bp, Cannabis sativa
gaagacacaaaatgactagcatcatcacacccctcttggccacacataacacaagcaccaggagctttcccaaagatattctacaatttagacccaaaaggaagggcatcctggcataatttccagataaacagcttgaatcgttggtgcattctcatcttccaaatacaggagcaaacatcatccttagtttcaaatcgatccttattaagatcccaataaacaacttttaaagagaaattaccatcattagacgatttccaacaagccaggtccgtgacaggcagggcattcctatctgaggaggaaatcgtatcagccacctcagggataaaaaccatattaaccaattgagagttccatccagagacactgtcaccaacaaggtcacccaccaaaactggttccttgatcaaatgattaatagcaccctcattcaaaatcgatccatccccacacttccattgttgacaccaaatatcaacagaggaatcctgaccgatggtccaaacacagttcaaggcaataaactcacgagatgcccaaatacctctagccacaagagaggccttagaaggaaggctggaggacaaaaaacccgagtgtctacaatacttagcagcaataaccgaagtctagagagataaagttcctgaagccaacagtcatccgagcttagagagtaagcaaaaattaatattctttgaatgcctgaatccgaggctgccaccggattaaggcttcaaaatgggaaaagataatttttagcacatttatttaataacatttctaataggtgttaaattagtgaagtgctaaattatatcacacaaacaaaaaataaatactctaggtctagtattaaaaagataattacataaaccattattttttataaaattttattcaattttttttttttacatttttacggttgtataccgagattttcataaacgggattaagtaagagtttaagaaattaaatagtgattaagtaaataagatggaggatttttacgtggttcggatgtttattatcactagctcacgggtcagtgtattggccttttaggctttgaaatgtattatcactagttctcttgaagaagtagaaagcttagaatcaaactagtagagcttcagctaaaatcccctaccccccccccc

SEQ ID NO: 12840 - DNA, 507 bp, Cannabis sativa
aaaaaaaaaaatacttatggttctaaatagaatattaacagtaataatatctaagttatatttttaaaactttataagtacctgacagttaaatgtcaagtcattatccacgtgtcattttcatattagtatatttaaattatttttttttaaaaaaaataaaaattcataaattggaccaatcaaagattgacacataataatttacttaacatttaacaatccgatacttacaaaattttaaaaatataaatcaagtattattgtcgctaaaaaattaatttaaatatttatttacaaccgaaagttaaacttaaatatttatactgcaaattactcatctaaataactagagaagaaacaaataaactaaataataccattaagaaccgaaataaataggatttgtagtgtaaacatttttcctaacacaaacactaaacaagattaaaaggatttcaatggataagatggggatgggtgctcgagatctcaccttcaaagttc

SEQ ID NO: 12841 - DNA, 500 bp, Cannabis sativa
gctatgaagcttgacatgagtaaacctttcgacagagtggagtggcattttcttcgcagtatgatgattgcattggggtttgcctctctagttgttgattttattcagagatgcctcaatagtgtttctttctcttttttgataaatggatctatccaagatcatgtatcaccatcccgaggcattcgtcaaggtgatccactatcaccatacctattcattttatgtgcggagggacttttaagactctttcaacatgaagaatctggtggtaacttacaaggactgcaagtagctcgtggtgccccatcagtctcccacctcttctttgcggatgatagccttgtactaagccgtgctaacaaaaaatccataaatgatattaagcgctccttggattactattgtcgtgcttcaggacaacgattgaatgcagataaatcggtcatttgtttctctcctaacactacttcggctatacagtacaacgttcaacaaat

SEQ ID NO: 12842 - DNA, 778 bp, Cannabis sativa
catttgctgcaccaatctcctttatcatttttatttttatctattggggtcctgtaaactgctgttgtctagaaccattttaatttctttaacgttgcagactcttgaattgttaatttcagttttcattttccttttctttttatggaacgaatgttcaatttcagttattatttgtttcaactgaaactatccattaatagttaaattgatattactcattgagattgcatagttgaactacagataaatcatcaaaaaaacaatgatcaaaagaaattagataaaatatatactaaactagatcatcaatttttgtttggcttgaaaaattagattatctctagctaagtactaataaaaaatacagggaagaattaatacaacaataaacaaaacaagaaaattagtgaggacatgttatcttagctaggtaggtagattgatatgtttgaaagccagtctctcatcatgatgtgataatattggtttgattatgggtagatcgtccgatgaatccttttggaaccaaacacttctcttctgagtacaatctctcttgaacaatgggggatgttaacacctcaagctctttgagcttcaatacttcttctttacccatctcctgtttcagtatacaatttggcatattaattttttgtaacaaatgatcaattagaaataaataatattaagcagcaattaattgattacctgaagaactgaaatctgtgcctttaaaaagtgtacatatttagaagcagcttggaacatttca

SEQ ID NO: 12843 - DNA, 532 bp, Cannabis sativa
atagagtgtaatttcctctttatggtttgggattatttgaaaaatttacaaaaaaaaaaatatatatatataaaaaaatacaattgtacagaattttaaatattttttcgatttttataattttatttacagaaagtacggtcttttaatttatttttatgttgttctcttattaatttgttgtttggatattattttttatgtagttttcgtgttgttttcataaaatactataaaaatataataaaatatatttgaacataaaaatgaaaaagttttacaaaaagtgacattatttgcatgttgcacaaatataatataatgtacctgaaattgtgggtatttttgttaaaaataaaaataaatccataaaaaatgttgaaaaactgtagatacctatatttgtaaattttctattatttttgggtatttatgaaaatatccttacaagtttttcaattgaatttgaagacctatataatctgggcctcttttagattaatgaacaaaattgggcctttatgttcgggaa

SEQ ID NO: 12844 - DNA, 926 bp, Cannabis sativa
cttaaatgtattcaaccacaacatctaaatgtctaattgcgcttcaaattttaaccttacaatatccattttcactcgtccattagagttttagtgaaaatcatactccaattcaaagttttgaacttctggggttgaagattctatttctgggtgaaacttttgcttttgcttcctcaattgaacctggtcagtatattcaacctatttttcattcgttgctccaaccaactctaactttcttatctcctaccttttatagatgaaccctgctgagttttggggacgcaaacatcatatcaaccaggatctacttcaacttttatacgaggatcacccttgtctccatgctagcccatcttcgtctagtaataatctttcaaattctagctttggcgattggcaggtaaatagcaaacatacaccctccctagagcccgaggtgcaacatcatttctatcccgaccaaattcaaggtgaaggatacgttcgtttcatctgggaactcaagaaagagtggaggtgttaccttcttactaactagacgtatatagtccatccaaacatggtcgacactctgcccgagggccgcccaaaccttgctgctataggcagacctgttgccaattttgccgtgatcattgtcagacacacctccaataaaattctgcccacacgtatgatgatggtgtggactaaacagactgtacgaaaatcttgactaactgacccaaataactcacttaatacggattcgattgactcaattaaacttcgatttgaaagttatttctatgatctatcaagtcatgtctcatattccaatcgcaattctgaagttattgactccaaccttcaccctcaagagagttatgaatttaagctacaacttacatgaagcaggtctcgcatacacaactcaaact

SEQ ID NO: 12845 - DNA, 973 bp, Cannabis sativa
ccctcaagctctccaacctttttcattttaaatcccccactacttctaccactactcaaaaccacgttggataggaaagacaagtgattaatagtactaatttcttggggaaactctgaatcatttagaggtacaccatgaatgtttagatatcgtaagttgattaatcttcccatcttcttttggaaattgacgaagcctggcacacccaattaatagtaaagtttgtaaattgtacaaattacaaactgaattgggtaattcttcaatatcagttcgagacaagtccaagcacctcaaatgctttagattgccaattgaatgaggcaatttctccataatactttcacttaaagaaagaactcttaaacaacttccacttgtatgcagcatatcatactccatgttcgtcaactgatcatagtctaatggcaatgctagaaaggtgcgcaagctcttggcttcatgcaaccccttaactttgttgatgtcatagtcccactttatatatgacaagtgacgtgtctttgttgaaagttcaagtaaatcattactcaaatccaacctaaagcaaaaatcatttgatacgagtatggccaaatcgtgtaccaagtcatgcatttggaggaatgattgtttcttctttgaacgttgaaacaatgaccttgacaaaagatcttcaaggtactcctccccatgttcctccatcttcttgctttttttatcaagcggcaaaaaaccttgtgccatccacaacaaaatcaattcttttctctgaaattcataatctttaggaaatattgaacaataagcaaaacattgcttgagtcgagcaggtaagtgacggtagctcaaccataaagctggaagaatagaaccctccttcttgtacaactcctcccaagtgtcactcttaagtatatcctcccatttctcggcatttctttccgagcgcaatagtccaccgagagat

SEQ ID NO: 12846 - DNA, 626 bp, Cannabis sativa
acacaagccatgatcaattcgatccaatgcttcaaaaagcccatcttacgaagcatggcttccaaaaaatatcatttgatcctattgtaagccttactcatgtccaattaaagccatagaccccgtcttgcctcttctcttctttttcaagtaatggaggacttcaaaagacaccatcacaatgtcaaagataagtcgtcctagtataaaagcactttgcgaatccgcaatgatagtatccataaacggtttcatacgattagtcatgaccttagttatcaccttgtacaaaacgttacatagagcaattggtctcaagtctttcatacattgcggatccttcttttttgggattaggactacattggaatccccacaaccatcttcaaagaaatgttgaactagctccataacatctactttaataatatgttaatatttttggtaaaatactgaggtcataccatccgaacctgcgctcttatttgggtgcatttaaagaactgcttcatcttcagttacagggtgagatagctcaacattagcacactcaggcacagcagtagagacatcatcaataacttcttggtagtaggtgttagaggcaggaaacaaagaggagaagt

SEQ ID NO: 12847 - DNA, 680 bp, Cannabis sativa
ttttcaatttcattaaatgttatgagtttatatgttattatacgttaatgttatacaatattactaacttcaatattatattatgtaattaaatgtagttgtgtggtagtgagaagaggtagtagaatcatttcacattgggaccagatcatcatcaaaagattaaatatagttgactttcttagattcacatgtgcttttgtctatctttataaaaattaatttacaaactgaatgatagttgtaatggtgtggtagtgggaggtagtagaatcatttcacattgtgatcatataaagaattccgagttgaagtgattgttataaaccaaactcatcacaagaatcttgttggttgatgatgagaataatataccaccacttagccaaaaaaaaggacatatttgttgcacaagttcctatgtgttcagcaccgtgaacactcaagaatagaattttgagatcacacacagataatcgaacaccattgatacaaaatgtgagtcttagctcttgtattattctggtaattgtatcttacaatgtacatttggaatgaagtcggatgcctatatattgacaataggcaaggacaagtaactaatataccggtcagttgtgagctgatcgagactaattttactgacacactaaactaactactaactacctctaactgtt

SEQ ID NO: 12848 - DNA, 546 bp, Cannabis sativa
tctatcctttattcagtggctatgattaaagtttgtaacaccttaaatatcaataaaactgctcatgctaattgagctgagatttactttcttccctactctgcttttcgtcaagtatttctactcttaacttgtatataatctagctcaattgagctcaataataaaactcacttttctctcctctaatactctttttttttttctttatcttttcttgcatttgttacttgttcttaattcgattttttcatcaatcaatgcctcaaaaattcaacaataatggacataaatctagactaactagttataaaaatctcaactttgagctgtgtttttctttacccaaacaatctaattatatataaatacaataagtacatatatgtatatttatataaaggaaataatgtagtttgcctcaggttaaaactagctagtaagaataagaaaaggcattctagttaaaatacgggtcagtactgtaccctgaagatgaaatgtgtgtgagatagatgttcagatccaataagtatatatagcata

SEQ ID NO: 12849 - DNA, 661 bp, Cannabis sativa
ctccaacaattcacatgcttttgacaattacccttctccaggtacatgaatgcttttgatttcccaatatttacttttggggggaaatcgaggcgtttgaaattcgaaatgattacattttttcactaatatgcttatatatagggcaaaaagtatagggcaaaaagtcctaataaactacttttagcatttttcttgtttagtgagttcagagcaaaaacatcttcattctctcaaatcctttgtggaatttccagaaggagtcgatcaacgtcatccgagcaacctcaaagcttcgaacagtgagtaagtttctcatctttttctcccttaatgtttgaatcttcaattttctgggtttctttcgtagaaaattcaatagtcttgacttgttctaggaaaactgtagagaatctaagtttagaaatatgaaactttgactgtaattgatcatataacttgattgttggggcattcagactttaacttcatgatattcgcttctaactttgcccattcggggtttagtgaagatcaacccttaaattgagattttgaaattctaggttatgaacctaaatcacgcgaaattctcctctttttaatcttttgattggacctgttctgtattttttgctttttttgtttcatatcctggcca

SEQ ID NO: 12850 - DNA, 594 bp, Cannabis sativa
ttcagtgttcatttattgttgttcatggggtgaacaaaggttgtctcttgcttgcattttgcagggtctgttgcccccgcttgatgcgccacatcatctgcgcaaacacgaatggggtccctttcgtgaaggtatgcttattttctatgtggaaagttcagtttgtagttgaggtcatgttgtttacaaatttccttatgatcaactggaaatgttatggcttatgatacatgatgctttgttgtaaattcataggtgtcacacttaaagaaagagctccaaactcgtcgggaacactagttgatgttggtttaaataaggtattgccatcttcaatggctctcttaattattgaaagcttcatcctttgtttattttattattattgctattttttgtaatctcctctttgtatgtatggcattgtcactacttcttctgtgtaaacagtaagcacctaatgttacttgtcccttaatttcatctaccataattttactttccatcagcatatgagatattaagattgtcccccagtcccttttgctcctactttgtttcttatgtagcttattcaatattcccacattggat

SEQ ID NO: 12851 - DNA, 913 bp, Cannabis sativa
aagaacttgtctagagttaactgtcattggaacgagagctggaggctaggagttacttgctctactggagctgcccgaaccttcttgatgaagaataatgcactactataaaaatgagtttttccgacgtttttaaatagtcgtttaaagtattactgtcagtttctataaccgtcgcctatacgactgtcgtaaaaagggcataataggcgacggttcaaaaccgtcgctaatgtgggtttcccaacggtttaaaattgttgcctataactgggtataggtgacggtttataaccgtgccttatactataggcaacggtttaaaaccgtcgcctatagtatagggcacggtttgttgcaaatcactagagggaatctaaattaagtcaattgcttttgtaatcgttgatactttactaattaatttcattctctgggcgtagccccgtggactaatagtgtttgaaagaacactgataccacatataattctcttgtgtcaagtttttaaagtctgcactatttatttctggttctgttttgattctgctaatttatgttttgcagtgacaggattgcaatctgttgctgcaaactgttatagttgcatttttactgaaatgtagtataattattggcatttacaaaaatataatttttcaagaccaaatcactattccactaaaaaggacatcaatgtcatttccattatccaataatataaatatatatatatatatatttatataatgaagtagcatttaatcaaaagtcttaacacaatttacttaaaattggaccccaaacgcggtttaagccaaaatatctgattataactataccgtactgcaacacatttaagcaaatatactatttaataatatagtctattggcacgtagtatattaaattt

SEQ ID NO: 12852 - DNA, 750 bp, Cannabis sativa
actatcaactgacacatgtactttaagaggaatatgaattaattcaatgattataatattaaattgcattattaaatgcaactcgaatatctcgtttcaataaattacagttgatataaagattcaaactcgttgtcatataaacacatgcgagataagaataataactattaataggtacaactaataagataatatgtccatctcaagatagacagagtatataatagaatttttcaagatgagataacaaagagcttgcaactcattgacccacatatttgtacatatagagaataactacattcatccatctcgccctcaatacgacaaaataactacctcgctaatatcatcataatacgagaacattatgatgagaagtatatctatacttagcattttttcctatgaagacggtgaagaaggaccaacttgtatttagcgagaaacattatgcatggtcagcataaccgtttaaagataaagataaaagactggttgggtagttattgaatttgagagaaaaaaactatctattagattgaaagagaaaatttgtactctgtatccagattaatcattcatagtaagatagactcgtggagtatgtagattttaactacaaaactacgtaaaattatttggtattcatttattgttattataaactctgtagtatatttattacataaaaggttcatatatttggtcaacataaatctacgttaatagagataatcatctcag

SEQ ID NO: 12853 - DNA, 585 bp, Cannabis sativa
cctcctaaatcagtggagatatggagcatctacgcattaacaccattgattacaccattcaatgtcgcctgagtattggccggaatccctgaatttggatttttcattgccgcccctgatcgtagccattgagctcccatggtgtgctgtcttcgtcgtgggactgctttcaaggacagatcataggccttgactatcaaatccggtggcgtatcaaaaagcttctcaaaaaagcattcagaatggcctagaataccacagataacagaaggtagggaggtcctcatactgaaacaacagtgaacaagattgaccattctttttttcaagtttcatcttcttcttcaaaggtttatcaatattcatcttgacccgaaccctaaaaaaatccctccaaacactaacaaaattattggggtctgatttaacaaaagtacccacataatttgccacatttctaactgtagactctgtcataaatcccaactccatgttatgtagctcaacccagaaatcaagtctattcaacagaaccagccgagggttctctccttgttttaggcattaaaatattaatcaaaagtc

SEQ ID NO: 12854 - DNA, 885 bp, Cannabis sativa
aaatattcttgacattttcccagcattcgtacaaatggaaaagaaaaatgtaaagttacacctgcaaagtatcgatcaatttagctcgactctcgtcatcttccggaggcgtctcgaagatcgtcgaggaaggccatccatgctccttaaaatacctaaaaccaatccagaaagccaattataatcttgatttttttatttttttgaaaaagcaaaagcagacacaaagtaagaattatccttagtaaccatcgcattttgggttttccaccgccgatttggttctgaagcacgtcgtaaaagtcagaaccccagttgaggggctccggcgaagtggtacatcgaacattgaaatgggcaaaagcatcgttgtaagcttgacggtgcaagtgctcagactcgagtatgactccatcgcagtcaaatatgagagcgcgaaggccagaagaagccgaagctgaaaccgagagaggtctccaagagttcagagtcttcttctttgtgaaggttcgaaaaggaagtgttgaattggagagaggtctgagagaaggcaaaaccagagcagtgtgaaaagaagaatatgaagaaggaggagagagaatcatcgtccatgccatagccatggctgttacctttgattcctgtggctttcgactgctccctctaattttaacggatttggtgaccgttatggaccttgaaattttgatgcttttgatttcgtgtcgtttcatgagttatatgtcgttgggtttttttcaaactacgtgtcgttgattgttttatttatttatttatttttatttttggaaaaacaaaatgaccaataacattgatataaagcagtacgatcagtgaatgcattattccaataagaaaaaaaaa

SEQ ID NO: 12855 - DNA, 899 bp, Cannabis sativa
gtattagcacaactagaaaaaggggatttgtcttcagcttttaggccaatttgtcttcggtttttattaaaattcgctaccgaagtcatttgaggcgatgacatatgtttaaaaatactgaagacgtaagtggggcctacgtcttcggttattatataaaaaccgaagataaaagagtaacttttctcttcggtttttacatatgctgaacgtctttggttatttttttaaatattttaaatatatattaattttttatttaatgattaattatatattattattttttcaaacaattgtaaactaattataaaaataaacattttctttgaattaaaaattattttaattatataacaaaattaagtacaaaagacattaatctaattatattataacaaagaaagtatacattacaaaatatactaagtcctttctaataaaaaccgtacacaaaataagtattgcctaaaattaaaagtctaaagctaactagtacaagtatcgtgtcaatttcaataaccattgatgttggagtggtagcaacatcatctccacatcgtatgtgcccttcattcttcattccaaattccaaactgtccaaactgtaaaaactgtaaaactgtaaaattaaagtgtaaattagttttatgtatcagggccgatcttaaggtatatggggcctaaggcgaaatcaaattttgggacccctatatatatatagttttactattataaaaattatagttttagtgcttagtttaatggtaaagtattttaaaactcttaagagctcaaggttcaatccttcataactacacattaatttttttttttaaataattaaaatgtagaggttgggaattggtctcatgacctcttagaaagaagttaatcct

SEQ ID NO: 12856 - DNA, 679 bp, Cannabis sativa
tttgctcgaaaatctaatttctcagtattttaaattaacatttttttttcccttatcttttactataattgctacatatataacttttatttgggtaaataatattttgaacccattattttgtaaaagttattaattagatattttattttattaaatagcaaaatagaccttgtattttctaaaatagtataaataggactctgaattgatttttttggtcaaaaaaacattaatttacaatctaatctaaaagtattattataaaactgtttacattttctgtatctattcgtattaaaaattgtcttcaaattggttatataaaaaaaaagttaacaaaaattaagttaaggatcttatttctaccattttaaaaaatgtaaggtctattttgtcatttaacaaaacacaagatctaatcagtaatttttgtaaaatacagaatttaaaatagtatttactcaacttttttggttttaatatggacagaactagcagaaatatgtaaaaagagcaaaacacattgattcgcacatttttagaattgcataaccaaataattcaaccttaattggaatatttgttcaaactaattagtcaacaaccaaagcacatacatagccgagaagcaaaaccaaagctgaattagggttaattaagaagaatatatacatat

SEQ ID NO: 12857 - DNA, 585 bp, Cannabis sativa
ttccaattcttccagtgaagtttgcatttaccatctgcaactccccaccaaaaatttgccatttctttttccacaaagctgcaaaaagagtcaggaagtttgaaaaccgacatggcataggttggaatagcttggacaacagccttaagaagaacttcctttcctcccttagagagaagtttgccttgccattttgacaagtaagaccagattcaatctttaagagagtttaaagaggagctcttggacctgccaaaacactgaggcaaaccaaggtatttgtctagttgatttgttgtgggaatttgcatataatcttgaataaaggtctgataggtgaggcttgtgtttggggagaaaaacagagaagatttttggaagttgacttgctggccagagattttttggtactggtcgagagcttctttaatggcattgcacgcttgaatatttgacttgcagaataaaatgctgtcatctgcaaagaggaggtgggaaatctttggggaagtacgtgcaattttgatgccaaaagcctcctcctgactttcagcacgctttaggatggatgagaggccctcagca

SEQ ID NO: 12858 - DNA, 877 bp, Cannabis sativa
  modified_base (615)..(625): a, c, t, g, unknown or other
ttgttacaggatcactaataaattagggacaagtacccgcctacattaaaactcctaattcagacataacagatttagttagtgcatgaactacgtcattagcagaatgctagatagcataacaacaaccaccactagctggagctaatattattttagattttaaaatttgagaaaattattaattgggttctttgttttattaaaggctaattaagattttttaagtcgaaatttaaaaaaaaaagcattgttattaggtactagtggtgtctagtattttctagcgtgtcgctttatgattggttaatgacactatctaacaattattacattaatggcacgtttacacacagtattcataatcggaataaattaatggcgaaatataacgaaataaattaagaataatcggaatcaatatttgtaatatgttatttgctaaaattatttgaaaattgaataataataatttagcttgtttactttatcaggaaacataatcggaatgcttaaattgactaaattaatattttgagttaaattataatatatggtagttatgttgtaagacatattttaaagtataaaattatcattatatatttaatattnnnnnnnnnnntaaaaataaataaaagtcattaccattttggaaaatacaggttcattttatcatttaacaaaacagaaagtccaattaataacttttacaaaacactgggtctaaaatagtatttactcaaaattctttaaagaagatttaaaactagtgcaaaaggtacaacttaagtaaagctacaaataaaaattaaacgaagtaaagaactaaagaacactcttggctaagttagaaaaaagatttacaactatgttt

SEQ ID NO: 12859 - DNA, 740 bp, Cannabis sativa
attgttataaacaaaaatatacataaacaaacaatagcaagaaaaaaaaataaaaaaaatataaacttaataataaaccctaaatagcaaaaaaatatgcaaataagcgaaaaaatataaatagagaacatacaaaaatgtctgtaaaattaaaattaaaattcaaaactaattgaaactccctctcctatagatgttggcctgaccaactggtttccctcaccggcaggctagattatgtgcaacactgatgtttagaaacgacaaaggggttattgtgggcatccacactatccacatctgccaccacgaccccctggctggggaaattgctaccctctgctggggcgctgaagttgctacctctgaaggtttcctcaatgtcatcttccaatgcaattcaacaaatgcggtggctacaattcaacagaaatcaaaacacatctctaacttgcaccacaacattcaggatttggtaacaagattctctaatctaaccaacaatctcaatctttgggaggctagttggatttctagaaaattcaattgtgtggcccataacgtggccaaatgggcattgcgatccaattactttgggaacatctatttgtccaattatgacagctccctgttcgatggttaggcggatggctgtagcggctttttggcttctttttgttctcttttacttaattctatttgttcggatttgttttcttttcttattgttgttgttttag

SEQ ID NO: 12860 - DNA, 558 bp, Cannabis sativa
ctctatcacaccaacaaccatgtacgtgtgtgcctatattaattaactttggtcattggattttctttaatattacatttacactcgatactcatttcaattcaatgtgtataataataatgtttcatgattcttgtgtttatgactattgagaattactaagttttatcttaaaattaattgctgataaatgtagtagtctatattcttatatatgactcaatattttattatctcacaatattgatggtgattatcagagtagacaggaacactatctatataggtgcaaatcgagggtcacatatccacaaggaatatagttattgggttcaatcttaacaatgacataattagcaaaattacgatatagtttttttctagtcataatatgttgtaacaatttgaccccttgtgtttattaatattcctttaacacttttccttttccttttttgtttggttttgtttttatagaatgaaatgactaaacttcttgtgagtctacctccacttggtttacatcttcgaaaagaatcatctttgttagacttgatt

SEQ ID NO: 12861 - DNA, 536 bp, Cannabis sativa
atgtgtttcctgtaaataaaataaaaaacgatcaaattgtaaattcaaagttcaacttcaagggtattttagacataagcataaatcttggtttctttgtgttgttttatgttatttattccacgcgcattttcgttagcttaaaatttaatctatatatgagattttatcacgacgttgtattgtgtatagtatatataataattaattaatcttgtcaactatggaacacgtactaagtactaactcaaattggatttgccacacgctagctagagctgggtagcctgtactgtatacgtgtatacattttcaaatgaatataaaaactagatttttatgggttttgccggccttatattcctaataaccttcttttttttttcttccatagtttgattatgactatacattaattcttgatttagtagtgagtaattaggtggtcgtcattaaaccatatgtgttaatcaaaactattgaaattgatcgagtttattagttcttaaaatattaattataccatatatttaaaa

SEQ ID NO: 12862 - DNA, 571 bp, Cannabis sativa
tccattttcatatccggacttaaacttatactttactttttcatatttttttacaattactaatattttatagcttttaattatatttatataaatttgaacaatattttatagataattatataaaaaaaaaattattagtattattagaatttaaatatttacttataaatactcaaattttggtatcataccctataaataaataaatatttaattttaatttttcatattttaataattttagttataaaattatactattcaatattatatttaagtattattattgttttaatttatttataattaataaatttatatcttaatattattattaataaattataaagttttttaatatggtgtgtggtatttttcggacttgtcccgtgttttgatttttgaactaatctattcgtgcttacgtgtcgtgtctttcgtgcttaagaatacatttttcgtaccttatcacgctcccaaactcatattttttcgtacctaattattgtgtcgtgtcaaaaagcctaacccgtatttacagcaggaataagaaaattaaagcacacag

SEQ ID NO: 12863 - DNA, 789 bp, Cannabis sativa
tgtcttcacacctgacataggatcggatttaatgaatgcctccagtgccactaatctcaatacctttgcctcgtatcctcccagtcctccttcatttcgaaatcctattcatccgttgaggcccgtaccattgcctgctgtttcgaaggctattttcactactgctcctactgctacaattgtttccaagcttaatgttggtggccaagaaaatgatcatccgaatagagttttcaaaagacaatttgacacaaactccatgagacaaactttgaagagatgtagagctaacaattctgaaactgctccttccttgtcagaagttgctggtttaagtcagtctgtttctgcaactgtggattccactgatgtgtttgacaactacgcggagattgcacagcaatcccccggttcaccatgaaaatcgtcagttggaatgctcggggtttggggaacccgaatgcattccgaagacttcgtttgcttgttaaagagcaaaatccccatgtgttgtttcttatggaggaaacaaaggttacagttgttaattctctttctcgttttaagcaatctttatgttttaattgtggtttagaagttcctagaactgggttgaaagggggtatcatgttgttgtggaaggatcatatcgatgtaactcttctttcaatgaatgttaattattttgattgttacttggtgtgtgataatggtcctcgttggcatctttctgctgtgtatgggtttcctgaaactgaaaataaaaaacatacttggactctagttaaa

SEQ ID NO: 12864 - DNA, 519 bp, Cannabis sativa
tctgtcaataagttaagtcagttcctaaaagctcctaccacagcccactggtctgctgctaagaggattctacggtacttaaaaggaacaatgttccatggcttgcacatcaaagtttgtgacagactcggcttagtaggcttctccgatgccgactgggctagctgtccagacgacagaagatcaacagcaggctattgcgtttatcttggggacacactggtttcatggtcttcgaagaaacaagctgtcgtttctcgctcaagtacagagttcgaatacagagccttggcacaagtctcggctgaattgacctggatccagtctctattgcaagaactcaaatttcctatgccaacaactccaataacctggtgcgacaacatgggggcaagtgcacttgcaacaaatcctgtttatcatgctaggaccaaaacatagagttagatgttcactttgtgcgggataaagtcttcaacaaacaactggaaatacgatacattccatcacatgatcaaa

SEQ ID NO: 12865 - DNA, 550 bp, Cannabis sativa
aatgtcgtcggtatagatgggttcctgagtccaaaatgaaagtttttaccgacaacatatccaagcttttaccgacaacatgtcctcggtagagtcttcaacgagaacaccattcttgtcctcggtagaaaggaacttctaacgacgagcctctaacgaagactttttagtgaggacttgtcctcgttatagggttttaccgaggacatttttagttctaacgaggacatttgtcctcgttagagacccagttttttgtagtggttaattattccatatagaaaaaaaattggcaaaattttttttaaaaaaaattgagtttgacttaaatattttatatctaaatatatatatttttgatatattgtaaagaggtattttttttatatttttttaattagataactaaattaaaaataaaaatttaaatttttctttaattatttatcattcaaaatttaatgatttaatatttttaaaatcaatattttaataactatgagtaggtaataccattgagtccactgtccatacatatataagcacatag

SEQ ID NO: 12866 - DNA, 531 bp, Cannabis sativa
ctggtcccttattttggcacctagggagggttgtttcttccagaaagcacttgtttcccagtgtttgatgaagacgaagaggatgcatgagttggatttttgatctgatgcttggaagtggcccagattgacagattgtcaacctgtgcactaggtactcgggcaccgggtgttcgggtgctcaaaggtgaaagttctccgaatctgattctaatgcctcaaatatgttcgtggtatgtctagttcatgtcccaatgcaaagtttaacccatttgtactaagatggtcccaaaaactgaaaccctagttgggattgtcaacttgggtgctgggtgaaatcctagatgcccaagttgatttttgaggtgttgaattgtgtatttttaattccttgggccaggaattgatacatgatattgaaatatagtgagttggaaatgacttatcggaatccgaacacccatttcagagttcttggagtcagcttagccgcagggctagggattcttgtcaagtcgaatactatgactc

SEQ ID NO: 12867 - DNA, 531 bp, Cannabis sativa
  modified_base (293)..(294): a, c, t, g, unknown or other
gatttgtttgatttaatgttttttgttgtttttcaaaattaaaagagttaagattttaaatacacaatttgtcttatcagacatattatataactttcggttggatttatggtatctaaatttaataatatacggtttctgcagggaatattttaggtaacagcaccatttttgttttatggtaatatttaataacatttttattttaaattttttaatcacaacaataaaagtaaaattttgattttttaaaaaataaaaatatatcttataactatttttattttttaatnntaaaaataaaaaaaatattttctataaaattcttttttattttcattgttgattttatttatgtcggatctagggttggggtttggggttagatcaagggtcgaagtcggggtcgaagtctaggatctgggtctgagtccgagttggggaggaggtccaggttgaggtcaaggttagggtctagatcttagtctggggtcgggataggggtcaggtctagggttcgggtctaggttt

SEQ ID NO: 12868 - DNA, 694 bp, Cannabis sativa
  modified_base (394)..(404): a, c, t, g, unknown or other
tagttgttaattcaacaaatgcattagcatactctccaaaatgattacttgcaataaaacttggcacattcacattctcctaatagcatggcaataaactcattttgccgggttgaaaccacgtcccgctacatttacatccctacggccctaatttttattattattattattaatcacaatattaatgttacgagttatgtattataaaaacttagcatacttcttggctagacaatgtgtgtgtctttttttttttttttgaaaaaaactccttatggtattcttaacattaaaataaataaataatgataatagcattaacaaaattatcttatatactatttttttaatatttttttaaaatttatggtttgagtttctaaagtggttnnnnnnnnnnntgcaataggagtttctatacgattttttgttgcaacactagttgcaatagagatttctatgtagaatttcgtaaaaatgtaaaaaaaaaaaataaattattttaaagtgtaagaataaaaaaatctcataacattattagtcaaattgatttaagattatacattttcattttagtataatataggaaccatttcttacaatttgatttttatagtttcaatttcaaccattgactttattaagtaatcgagtaaaccaaagtgaccaaatgaaaaggatgggttatcag

SEQ ID NO: 12869 - DNA, 674 bp, Cannabis sativa
cgggatattacattcaagcttaaagaccttggcacccttcgtttcttccttagccttgaaattgcccaatgttcaaaaggaatttatgtttctcaaaggccatttaccttacaacttctcaaagaagctgactgccttggttccaaacatgtctcaactcccatggaacctaatattaaactaagaaacaactcaggggttctccttccaaacccaacttaatacatgagtcttattggcaaactattatatctcactataacacgacctgatataagctttgccgtaaataaaataagccaatacctccaaaatcctagacaacctcacatgattgctgcaacaagagtacttcaatacttaaacaattcacctggctaaggcctctatttttatgcttcccccccatccaaacttcagctccaagcttttgttgatgtagattgggagcctgtgttgacactagaatattgatctttggatattgtgtttttctaagcaaaacactcatttcatggaaataaaaaaagcagccaaccgtttctcgatcatgagccgaagtagagtatcgcgccattactaaggctacatgtgaactcacatggctcacctccattctacaagaactcaacatcaacatcagtcgtccttcaattcttttctacaacaacaat

SEQ ID NO: 12870 - DNA, 668 bp, Cannabis sativa
agaaacaacgcatatgtaaggtatattaatgaataaaaaatgttttttccgttcaaattgtgtcaaatatcttgcgaaaaaatagatttttaaagttaattttaatttttagtgcaacatgcgtgtaaaatgatcctcccaaaaaaatacataggcaaagtctatatacttggttaattgcaagtgaccaagagagcataagtctactcgatcacttggggagcacccacgcacaacatcgaacaagcacagatatacttaaacaaaaatttgaagctttgaaagcaagaatagatagataaaaaatttgaagctttgaaagcaagaaatcgatagctaagtaagtgcggatggcatgcttcaaggtgaacataaaatgcataagtctgggattaaaggctgcccagccaactacgtgttagaaaaattgaaagaagataaagccatgattaaagacagcctagtcggtcactagttcgaaagtaaaaggccttaaggccatacaagaacaaagccaaaaagtgcaaaataaaagcatgaaaaaaaatactaaaactaaagccattaaatgttgtcaaatgcagataaatctagagttgataggtcctgggcggcaaccttaacgttagaaatctccaggacaagatcagtctggccaatgacctgca

SEQ ID NO: 12871 - DNA, 508 bp, Cannabis sativa
atcaaatatttagatttcttattaaatttttcattaaattcaattaaatatttttaatagataaatatcatactataattatcactcgaaaaaataataccaagtttatatatttattgcaaactaagcacatataattaaaaaaattatgagaattaatgttatacgtctataataatattaaatcgcaatataattaccttttaataacgtcgttaaagctttgcatgccgagatttttttttattaaaggatatgaaatgagagaaaattataagatggggtatagttattgtatatataggcttgtcattaacgcttgatatacataaatttataaaactaataactataccatatgtaggaatacatatttaaaattatcaaaatatatatttatctaactaaaattatatattttattaaaataaagatgaaataatatttgagtcatcgattaattaacatgatctttaaactcatttattatggattaccaaaaaaaata

SEQ ID NO: 12872 - DNA, 843 bp, Cannabis sativa
tcgaccacacctctacgagtcggtgccaccattgtgttttatgactaaatttgaagtatagagccagtttgtgacccttactctcaatgaaagtaccaaaatgttgacctcacttttagccaacgacaatgagtcttaattgtaagcgataagtgatataataaacgtgtaatatcgtaaaataaatataggacatagagtttttaaagaggttcagcctcgagcagttcagtaatagccttctccccttgatttgtattgacttaagaacaaagaatgtagtgattcttctcttaaagcttttacaatggtgtctttgagaatacactcttagattattctttcgaccctttgcccagtaagaatagataactatttataaggctataagcttgagggaaagtttcccttctatttacaatgtctataattggtaagattacacattaaatacagaatacactgattaagggatttggatagcttgccatatctctgtgatatgatcccagagttatagggattgcttctgtgattcatgatgcaagtgttgaaattgctaagtgttggcatcttgtttgggttgtccactactcaactaggaaagcttcctctgtgtagatatgtgcggtattctatttggcatatctctttgtgaagttgattccacgtgtcaccagcatgcgatgccacgtcagagtgccaaaattgggataacacaaataatacttgagcaccccaaggagagtagctcggtctcatgaatcccacattcagtaactcttgcaagtggatctttaattccttcaattctacagcagccatttgatatggtgctttcga

SEQ ID NO: 12873 - DNA, 601 bp, Cannabis sativa
tcttttcctatatcttgcttaaaggaaatagaaagttaaaatgggatgaaaaattccaaacatccctagaagcgctaaattattatttgagctggccaccagtgtaagcgaaacttgaacctgaagaaactttgctcctatacttgactctgttgggcagtacagtaagttcagttttggttcgagaataagatggtgtataatatccaatttactacatgagcaagaccttttgtgaagcaaaaggaactgaagcacgccctttcaaaatactgttttcccttaaggtcgatccacatgcacgtctttgcaattagacgagctctcatttctacgcttttggcttacttttgcctacagcaaaaaacaattaggtatgccgattttcttagtaaattaatcgaacaagtacaaacacacatatagcatacatttcgcggcattcattcgaaaagtttattttaacaaatattagtaacaagagtcagagaatttatcggccagaaaagtttagggagatttttaacgatcagaaaagttcaggagtataatttagtacatgtcaaaattggaaggacaaaaatcttaatttaaaaaaaaa

SEQ ID NO: 12874 - DNA, 604 bp, Cannabis sativa
taaatgaataacaaatctcataacaatgctcaaatttgaaatagttgtccaacttattctacattaatgaataatcttcaaattaaaagcgtgcacacacacacaaacacatttttcgcattgggccatcccagccaccatgattgggcccagtagtgaagtgacttgggtagcccacgtccaaacaaggtgaactcatcatggttgcttcaaaggcataaccttgttataaattggatctctacgtgggattgtgagtcaaaccaaacctttgctgttcatttatagaaaaacatcaactctaattttctcacattaattacattagtacgtacacatatattatgtacctaacattctttttcccaatcacaaaaatcagattcacatatatgatatatatatatggggttctattgggagatgacaattttttttaaaaagatattgcaattttcttaattagtaactattgataaataattagaataattaacaggtcttgctaataaaaatataactgtcacacatggatatagacattgaatatgtcgagttgggcagtcccattaacgtggtaccatatgattatctgtagtttcgg

SEQ ID NO: 12875 - DNA, 624 bp, Cannabis sativa
aattaaagataataattattattagctaaattaggtataataattaagctaacttgacattacttttttcttaaatatatttaatttgaataggtgcacattatattataagttaattatgatttttatttcttgaactttaacatatattaaatcatgtttttttgaacatttttagccgttaaaaattcttcattgaactattaagattgttggattaattaaggatatttttctagtttcattcgattttactaattctatgattgttcatgtactaaatcatgctgactttaaatatctaccaaattatgtttcttaaactttgacatgtaccaaattaaacttcttgaacttttattcatgttaaactttctttattaaaattggaaaaaaaaaaaattcttaaatctaataattttaatagtttagtaaatttttcatctcaaaaaaaaaatatttcaataaatttttaatgaccttaaaaatttaaggtgtgaaaatttagagaataaaaatattagcatacatatatttttgtgagaaaagatatataaatttaaggttaaaaaaagtagactaaaaatggaaacactctataagagtatattagttaataaatta

SEQ ID NO: 12876 - DNA, 528 bp, Cannabis sativa
gaagataaaaatatcccaattataatagggtggccattcttagcaacaggcagagcattgatcgatgtattaaagggagaattgaagttgcgagtgcaaaaccaagaggtaacatttaatgtttttgcagcaacaaatatcttatctcaattttttcccacatgacatggcatgcccacatgtgcaagatcaatgctacgtggagtacatcttgtcaaaaagagggccaagtcatctactcaacacttcaactgacgggaggtaagtatacttaggagggacataaaaataacaagccagccaccctaagtggtcggctctacgaccagcataagccggccaacctctagacattgtaaggccagccagcctacacctggcaggcatttggtgtgcaaccttcatcttgggacgacaagctaaattgtgatttgggcttcaacaacccgcaaaagtaggggagaaatatcagctacttccctattcttaagaaataattaacaaatttaatacttattatttaattat

SEQ ID NO: 12877 - DNA, 901 bp, Cannabis sativa
ccctaccgtaaccctcttgtcggatttactcgacctttagaaccaccattgattaaaaaagtatactctggggtcttcacacaatccttaataacactaatccagccatcagcacaactgaactattgcatcatactggccaagaacctccattccacccagtcatatgctttactcatgtctagcttgagtgccataaatcctcttctactgttatttcttttaaacaatgaatgaattagttcaaagctaaccataatgttgtcatgtatcgagcgctctggataaatgcactttggaaagatgagatgagggggccaaggacacttttcatcctcagtgataaagcttttccaacaattttatacagtacattacacaaagcaataggtcgatactctttaactaatcttggtttttgtacttttggtattaacactacatttgacttattaaactattgcattgaagcattgtcatttaagattgcaaggcatacttggctggccctttcacccacaatattccaatatatctgaaaaaaataaagcatgatatacgcctggtcctggagctttaatggcattaatgaccataacagcctggaaaatatcctcctgagtaaatggtgccataagacgctcatcatcaaccactgaaatgcgtgaattaataacttctgtaccatgctgaattttctcatttatcgggttggctgtttgagaaatatctataaaataccactctacttcaccaacaatctcttcctcagcacataactattggccagtttatctcataatctcagtaatagtatttttcttctttctcaccgacgctttattatgaaagtatttcgcgtttctatcacctgccagcattcactacgatcttgatctct

SEQ ID NO: 12878 - DNA, 566 bp, Cannabis sativa
aagttctttaggatttgcataggcaacttttttatgttagtcaggacgttgacttcaatgttaatctttcttgctgtgacaaactgtcttcaaaaacttacttgtaacttgctccagcagtccactgatcctggctccattcctaagcaaaaccgcttagcattagtggaaagcgtaaacacttcgtgtcattgctgaccctcatgacagtcatcacccggttaaaccgggacaaatggtcactggggtccgaatctcctgtgtaagttacaattttctgcatcttaaaattcttgtggagtttcgcatccagtatgtgtctggcgcatggttcccggtcctcggaatcatcccctttttgtcttcgagagaccctagtaatgtctttgcgcaatatcgccaattcaaccaagattccctcgttcaatgtgcctctggagactggcaatgcgtgtttcttcttttcaaggtggtttttcaagtcaccatgcttttcattgattttctatcttaggtcagctggagggcaccttcgacttttcctccgtctttccgcgggttcttgg

SEQ ID NO: 12879 - DNA, 829 bp, Cannabis sativa
ataataataataataattgtgtttttacagttcattcttgtattgttgatattcagatatataatctaattattgatcacattatgtagtattttaaaaattttgaaataatttataatataaaaaaaaaaaatcaaacaatctattttacgctgaaataaaagatgctcatgtaacaataatttattagaatttatttttattctaaaattataaaatgtttacaaaatatctccatcaataactacgtactttgtacgtacactgttatttaaaaaatgataaatactattttagattatttattttgtaaaagttactaattagacttattattttgttaaatgacaaaatagaccttgtatttctaaaatgatacaaataggaccctgaacttatttttttttatcaaaataaaacttaataataatccaatctacagatattatgataaaactgattacattttttgtatctgttggtgttagaaattatctttaagtttgttataaaaaaaattatcaaaaattgagttcaatatcatattttttaccattttaaaaaatataaggttcattttgtcatttaacaaatcaaaaaattcaatcaaaaaacttttgtaaaacataaggtctaaaataatatttatcctataaaaaaatatcgaaaacaaaactattttaaatgttaaaaacacaaatgtggtgcatccattcatcctcctttcaattagggcaccattaaatttccatacaaataacaataatacaatttcactattctataagtatacgtaccatataccatacaatttgcatagctttatgat

SEQ ID NO: 12880 - DNA, 752 bp, Cannabis sativa
  modified_base (525)..(539): a, c, t, g, unknown or other
tgttagttagggtgttacattattctaggacttcctacagtggatcaatcaatatgttcaaccatcttcttactatcctcctatagcaccacaagacgaagatcattctcttactgatctgctcaacactttagaggcttctactaattagatgcaacaaaattatgcataatttcaacaacctactcatattgcaccatatagtgaaaagccaaatattgctgagctgattaaaatgttagcagctaattctttgcagtttcaataaagctatcatgaaactatgcaaagtcttcaacaatctctgcaaaagtgcaatatgcattattttttttcatagtgcattcgatttgcactaagtgtaaatttcatattttggacccaattcaatctacacaatagctcaaatccaattcaatcaaatctgtaaaagtgcggattggatcgattattttggattaattactttctaatattaaattatttaatattttttgaaaaatattttttcacataactaacaannnnnnnnnnnnnnntattgttattttatgtctctaataacaaaataaaataacaaatttaaaagaagaaaaaaattgtaggtaaaaagaaatgttaaattttattttaaattatattttccttacatatacaaatgaaatatacatttaactattaaattttaaaatatcggttacttttatatgtatatgttacttttgtaagtatcatatgtattagattaaatt

SEQ ID NO: 12881 - DNA, 540 bp, Cannabis sativa
attatatgctaagtgtcttcacaaacaatgtatctcatccacgtaatcgaggttagtttatcgtcttatacacctgaagttacatggtttctcgttgatgcgcaagacaacagtttgtatatttttgtctcgcataagactatttagtcagctgagttgaaaatatattttgttaattatgcttttaaagagctattcctcctcagatataattttgattacgtgtctgagttcatattcttcccagtttgattacgtgtcttcgagtataacaattgtcccttaaattttttttttttaataaaaagtgctttttaatgattacaaagggtatttttgtcataatcccatacgtcctctgattttggcagttttgcaatttcgagctacatcaacattaaatgaccatcttttcttcttccagttcgaattatgtctgtaggatcaaacttctttctgattcgatgaagataatatcaagagtataaagtaagaaaaaggaactagctttgcatcatttcctccattttagaaatcctg

SEQ ID NO: 12882 - DNA, 513 bp, Cannabis sativa
cctttttatggatttaatctttttctaaaaaaaatttggagagttattattctgttttttttcatgaaaaatttagaatgattttttatagggatattttcgtaaataccaaaaaatgagaaatattttacaaaaatattgacttacaattttaagaatttaaatttttttaatgggactcgaacccaggatctccaagacacacactcaccgatggccatttgagctaacctcaataatacatttcaaccttgtgatttcattaaaaaaaatatacatttggtatcctatgttttcaataatacttaattggtaattcatattttcaaattgtacatatttggtaccctaaagtaaaatttaattaatataattttttcgaattaactaaaaaatctcaattatatgtaatcatataattaaatttgaattcaaaatttataaaattttagataatttgattgtattgattaatttattcataaaaacttaaatttaagataccaaatatgt

SEQ ID NO: 12883 - DNA, 593 bp, Cannabis sativa
taatactaactggatgatcactgtaaacacttgtgtatacgtgaaagtaaaatttcgaaatcaatacagtaataatccagttgatatttaacggtgatatcaacttatctaaaaaattgaaaaattgaaggtaatatatatactttgatatataatattatatagaataattggttgcgaaattcccttatgttttagtttttatacatttaatttctttattttttttttgtggtaaaatctccttaagtttacttttattataaatttgaggcgtcagttaaataaaaccgctaaataccaactaaatgaccattgtgtagacttgtgtatacgtgaaagtaaaattttaaagtcaatacagtaattatccaattggtatttaacggtgatattcacctgacacttcaaatttgaaaaaaaaaaataaatataaaagaattttattattccatcttattttgttttacaattatttaaagatattatattattatagtgttttcaatatataatattttaatcatataataaaaatattgtaaaaatttgatattaaatagaaagaaagaaaaaattatttatcttttgaa

SEQ ID NO: 12884 - DNA, 764 bp, Cannabis sativa
aatgacctgagtcgccgtgtttatggcttcggagactttttcttcggtggtcggaacttttttctggttgtactcgagaaaaagctccggctgagaactcgagctgttttggagtctcataatgagtgggactcttgtacaaataccttgtccacgtggcaggttgattcttgctagggattctaggacggaggacttgccggaagactggtctccgacgacgacgatggtgggaagctgtattccttcctccatgactgccaggtttcgaagcttgtccacagcatcgagcacaggacgaatcttatcgttgtatgaagaaactattggtgagaggcttccaatgccttcacgatcatcatgatcagtaactagggtttgttttttcttatcagtactccccattttttttcttatctgagattgaagagagaatatagttaaaaaatgagtgagtgagtgagaagctagggttttatataacaatatgatcattatatatatatcaattttgttttgaaagagaacatcaaaatcttcgaagttattcttttagtgagatagagtacgtttttcgtatatgaaaaattatatttttaataagaaattagttacttaactattaagaaaagttaagataatattagtacgtagctaggtttgggttgcttgacacgtacgtaaggcacgtgaaggaaagtaaacctgcatgcatggcacgtacgtacatatagtattataggtctatcagtctattaattgaa

SEQ ID NO: 12885 - DNA, 682 bp, Cannabis sativa
  modified_base (120)..(125): a, c, t, g, unknown or other
ggttacgatcgtttattttgtatcttgtcattccatttaatttagagattctggtttacgtttttcgggtaatttttagggtttagccatgatataaatttaggtttatcatattctttnnnnnntggtttaataaatttcatccaggaattgggatttttttttttttttttttggtagaaacgtcccaatttggttcagaattttattctccagagttcatagaaacagaatatcctaagcaattagccctcccattcaaacccagaaatttccaacctcggtccaaattggagataaatgataccaaaatttgagaccatttgattaagttgaactaggaagaagttaccagtcgttataggcaatttctacaagagattttttagggtaaatgtcattttttccaagacgcagcctggcctgaacccacaatattatcttctattccactcgcgagaccaatatttttacccgaagtcactgttgcttttgaactaggtgaccttaagtttgacattatgtctcctaagcctcacaaatctaagaccccacaggatcccagtgtcaccttcgaggctgaactcatcgaatccaaggttaggtcaattggggcttatgttggtggcatactaaagtcatgcagcatcgcaaagaaaaggttgcatcataaggtctgtgg

SEQ ID NO: 12886 - DNA, 732 bp, Cannabis sativa
catcatgtatcatattttgaatatatgtataactatgtatcatgtatcaaagtttaaaacctttcttcaactatatataaactaattacatatttttttaagacttgttaaataattgtaaaagataaagatgataataaatacaatttaattaatatttataatttgtgtaaaaataaagtagcaatttcaacaaaatagattagtttctaaaaataacttttaattttttaatattatttgctggaattattgttcccaagtttataaaaaaataatataattttgaaaaatatttttagttacttgctatagtaagtcattagattgccacattataaatttttttagtacccatcaacggggaatacctattaaaaagtgttccctagcggactaaaattagagttgagtgggcaaaaattaacactttgctaggatttaacccatgattatatctctaatgaattgtgtaaattttatactaaatttgactcaaaaaatagttaactatatatttggtctaaattttataattgtactccaatgctaaaaataataaaagaaatcatattttaataaaaaaaaagtcaacaaaaatatttaatttttatcaaaatataaaaattatattaaatgtataaataaaaatataaaaaattattaccagtagcaaaaaagtgaataaaaaagtgataattattgtaggtagtgtaaaatttgactcatgtt

SEQ ID NO: 12887 - DNA, 508 bp, Cannabis sativa
gagactacttcaaagattatgtaaaccacatctttcgtggattgacaatgcttgggttcgggtttgaatgtactagttattttagatttacttattgttatgttccacgttctacttattgcaatgtttagttatttttttcttttttttcaaggacaatgtttagttattgagtgtttcttttagattgtaaaactgatatctagctttattttctcagtttgattttatgttgtaattgtagtaatttttttatatacatacatatttttatgttccccgttctactaattgcaatgtttagttatttagtgtttcttttagattgtaaaattgatatctaagtttattctctcagtttgattttatgttgtgtaattgtagtaattttttatatacatgcttaggttagagatgcttcaatttataattcatagaatcataattagttcccctacaaggattggggtaataataaatataaagtgattgcttcacaaaatggagt

SEQ ID NO: 12888 - DNA, 773 bp, Cannabis sativa
aaaggttggaatcgggttaccatcgaaaccgattatcttactgtggttcaagctattcgtagtccacttcctatgttttcctattttggaagtgtaatttcagactgtaagacgttgttgaaagatgttaatgatatgtctattttacatgttaaacgatttgccaatagtgttgctcatacaattactcgagtttcatcttgtgccgttaatcgtgtcattaggagtaatgagtttactcctgatatccgtgatataatcgtgaaagaagtttattaataaagtttccttagttatttttaaaagcctaacaaatcaaaaagagatataagacttcattatgaaataagcaacaaaagaatattagttttttttttattattattatttaccacattaacttattttttaaaatctaataaatcaaaaaaattagaataacttaaataaatttaaaataaaaaaatcaaaagaagaaaattcaatccattttatgaatcttcatttacccttacgtatttaatttttttttttttttgagaaaattatatggtatacctattttactttgcttattttaatttttactttcatttttatatcctttaagatatacttatcctagacttaaatagaaagtgaaaatatattgagcaatccagtaaaaaaaatatatattttaataaaatataatatgagaatatttttaattagtaagtacaaaaaaatagtatttttcaacgtatcttattttttttagccaaaaatctcaa

SEQ ID NO: 12889 - DNA, 1182 bp, Cannabis sativa
aactcatctaatccgtacttttgggaatcggattggattaaatttgagttattgtgcagattagattggatcgaaaatatgaaatctccacacttagtgcgaatcggatgcgctatgagcaaattaaatagtatggattgaattgaatgaatacccctaataactgatgcagaacaatataatgtgaaaacatcctcacaattagggatggaaattgggcggtaataggcagggaatgctccatcagtctccatccccgttaaatatattacccatctccgtctccatcccgacatattcctcatcgaaggcggacgggaaatccccactggggcaggtaatactcacatgggacctatttattttaaaataaaatgaaattatgaataaaaaaaagtatattatataaaatttaaaatattatatatgttttttatatattgggggagatgaatttaaacttgggacctcctttctatgaggagaagtgtggaactattaagttatgcatatgagcacaaaatattataaatgtcaataatttaaagttgataatgttatttaaaataaaatgaaaatatttaaattttaggatattggcggcaaactaatcgaactttatattgtttaacacttaaccacaaaaattgaaattttggtggcaaaattacctaaaccccctttatgttaaatatttgccccttccgtccaaaagactatgttaagtgtcacagtggacatgccacagtatacacaagtgtacacatgacaaatttttagtggtccacgtaattttaattattaaaatgctataaaaaataaaaaaaaaatagttttaaaaaataattattaaaaatttattttttcttttcttttcttttttcctttttcttttcttttttattacaaaaattattttttttccttttttatcttttatagaaatatcaaaattattacaaaatatgaaaaataaatacattaaatattaaaataaataataaattaattctctttttttctttttatcccctttccttttccatttcgcctacaagtctctcttttcataatctcgtgcgacgcctctatccccccgatgaagccatcaccgatcctccaaacccagattcgcggtcccaactctctctggaacttactcgatttaccctaggaaccttg

SEQ ID NO: 12890 - DNA, 612 bp, Cannabis sativa
  modified_base (264)..(269): a, c, t, g, unknown or other
tcttcttcaatgagaaccacctctgggttcctaggaacttccttggtgggtcccctcggagtcatgtttgctcgaggatgctcttgcatctccagttcagggctgtggatgcgggccaaaatcacacatgattaacgttgcatcaatccacaatcggtggcagcacctcctcaaaccaagatagctcatcatctaactgaagggcatgctttgctaaaccacgagctgcaaaattcttatcgcaagccacatggaacaaaactnnnnnnaagaatttaaacaataaaactataacattctctgaaaattaagtgatatttttttataacttttaatatttcacattgttagtttgacaaatttcacacttctatcactccacccaacatgtgggtactataaaataaccaaataatatataagaaaagatttagaatttttgcaagtttctttggatagggggcaaggggcatgagaagattggccatataaggtgtttgcgtaaatgggcaagacaagtagaataggcactactgttttttgcaccttacaatagcaaataaaggcagaaagaattgaagtaagagtaagaaagaaagaaattgtaaaagc

SEQ ID NO: 12891 - DNA, 630 bp, Cannabis sativa
cttttctgtagatttttatttgatgtattatctctgtttacttatctttattcttggtagtgtttaagactgtttctttctcccatttttttattcttatactttttttcagatttttatttgatatattatctatatccactggtggttttcttctttaagtagctacttagagagaatataactaatgctgtctatgagatttgtggaagctaaagtaatgttaatgttttattttgtaggataaggatgtatatgtcttgcgtttttataatcgcttagatgaggagaagaaaggcgaggtaaattgtagcttacattctccagtttgtaaattattggtagcaatgaatgctaaaattgcatgacaattttgtgctgcatattctttttagaagttgggtttgttgattctgacctaacttaggatttcgagctgttccaaactattcttgttcccaagtattacaggacaaatagcttggtcaccttaaactcacctattcggagaatactgagttggttttatttattttactacaagtagctcttttggttcatagcttcctgtttgtggcaataattggtaggtgaagtttcatgttctatggaagagattttagttataaa

SEQ ID NO: 12892 - DNA, 732 bp, Cannabis sativa
aatcataaaaagtttctcggcagttgcacacccacaaacaaatggacaagtcaaagcagtgaataagacattggaagacaccatgaaaaaatggctcagagaagccaagggtaattggctggaagaactacgagaggtacttttgtcatacaaaacatgtaataccctaagattaagaatcggataagcaaaccctaattagttaaatgtgtattaatgtggaattatattattatataatttgatatatatatattatactaagaaatgacatgttaagatcccattggtgagccacgggcattttcgtaattttgacccgagaagggtaaaatcataattttatggtttatcgtgcttatggactatattattatatagtatatttattctgtctttctgcaagtattttctgacaagtcggcgcggtatagtcacaaccggatattttaggccgaaccagattcgggacttaaaacacatttttaggatttatttatggcatttatatgataaatgggaaaatatgatttgtatgatttgtatgagtgagtgaaatgacatggttacccttttttatgtgtatatggagttatatggccttaggggcattttggtcatttgaccacataattgtattttaacaaaattatcttttcaaccaaaaaaatgagattcatttttgggtttttattcattccaaacggatccccactctctctctctctctct

SEQ ID NO: 12893 - DNA, 519 bp, Cannabis sativa
ttttcctatgactatttccaatgccaaatttttaagaaaattaactaaatattatagtatattgggtaaatagcggtataagtatcctaaatttcaagtttgtaagtggcataactcaatgtttatatttagcggcataagtactaaaggtttgtaaaactgtaatttttttctaattttctcagtacaaactgttattgttttaaacaggacacatataaagctcatattctagatcattgggtctagacgaaaacatatagtatcagttacttctaaatgctcttttaataaattcaaagcggggttagtactgacgaaactgaatttatgctgctaaaaacaaatattgggtacttatgccgcttacaaacttaaaactttaagtacttgtgccgctatttactctagtatattatatgttatgttatttgaaaacaaaacatataaaagtctattaaaaaaatgctaaagggatcagtgttgcttaataccaccacgaggtgagaatttgttaat

SEQ ID NO: 12894 - DNA, 586 bp, Cannabis sativa
ccagacccaaactaagaccctgaattggacccaaatctctacacggatcatagactcgaaccccaaacccacaccccgaccccagatccaaacccagacctgaaccctagacctaacccctgtcccgaccccagaccaagatctagacgctaactctgacctcaacctggacctcctccccgactcgaacccagacccattactagacccagaccctagacctcgaccccgacttggacccttgatctgacctcaaaccccaaccctagacccgacataaataaaatcaacaatgaaaataaaaatgaattttgtagaacacattttttttttatttttaaaaatcaaaattttacttttattgttgtgattaaaaaatttaaaataaaaatgttattaaatgtcaccttaaaacaaaaatggtgctcctccctaaaatattccgtgcagaaaccgtatattattaaatttagataccataaatccaaccggaagttatatatgtctgataagacaaattgtgtatttgaaatcttaactcttttaactttgaaaaacaacaaaaaaacattaaatcaaacaaatc

SEQ ID NO: 12895 - DNA, 587 bp, Cannabis sativa
tgaatgccaaatttgtaggctggtttaggtgagaccttgcagtagttctcatcgtttgcttaaatttgaagattggcaagtaattattatggatgcatgtctctagtacgtttgataatttcattatggaaaatataatgcgaatataagaaatatactaatgccaatgaactataaatacatgttatatatcaatattagatatgtatatatactataggttaattaatattacagcaactatatatactatttaattaattagttcttagtatttattttggttagatatatttgtagttatatatataattagtttttttttttatattattcgataaataacgttatttttaatttaagtgatatttaccgagaaaagtaaaataatattcaaaaaaaattattaattataattttaatttaatcgtaatattttaattttataatagtctttatttttatagaaatattatacttttttttaaaaaaaaaatattaaaaatatatttttgttgaggtaatagttgttacaacaatgattttttaagaagtataaatattttttctattttattgttttaaaa

SEQ ID NO: 12896 - DNA, 600 bp, Cannabis sativa
aggcggaaccttctaagcggactcggaagggggacactctggcgcccagcaatgactccgggattcctttcgaggtggaggaatacactgtgccacacggcatagtgttgactccggtgcctgcagatgaggagaggcaaaatctccgcgtggccaagcacaactacgccctcgacgagtacagtcgggggcatgctgaggtggaggctttgaagaggattttatgggaggagcagcagaacactctccatgaggaagcctttcggaatccgtgggacctgaaaatggatccgctaacggactggttcaaccgattcgtcgggcccactctggctccttttgcctcggagatgactagccagttcgtctcccacctgacgcaattcccgcctagaagatatgctgcttgcgcctctctgaactctatctactaggtccaagacattagctctgccatggctgtggtgagtactctataatttattccatcccttgatattttgtctaaggcatctgatctcactcttgtctcttttttcagattactgctgagaccgaccgccttttcaagactttaattgaccacagcttcgtcatgtc

SEQ ID NO: 12897 - DNA, 504 bp, Cannabis sativa
atttttggtacaactgggaatttacttgaccataagctgaaccaccctatctaaggacccaaacttacatgtttattatataacaacaaaaacaatgaaatatttacatacatataaatttgtgatgaagagtgtgtatagctacgaaaatcatttcacgtgtgaatcatatatatttatatgtgggtttttaaaagatgatgaatgagtgtgaaaatttttgaatcatggaaatgattcttcttttttttttttttcgtcctttaattttattttaaaagtatacaagggattctcaactacgagactattgtttttgtaatacaaaaggagggaaaaaaaaatgctattttgtataatttaatacgttgggatattacttattggagtcttttaattttcagttacattttcatatatacgtcatttaatcatattttatcaaaagagttttagtttgataaatatgatagcataaccttttttcacaaacaatttttatct

SEQ ID NO: 12898 - DNA, 503 bp, Cannabis sativa
cactttaaaggtttttgaaagctttccattttttgaattaaggcaatatgtggcatcacttcattggtttatgggattaacgatcttcgaggaggcatttgaagtagagcttattaaactggcagctggttatttcggtgcaagtctagaaaataatattatcactaagatttccttggttcaatatattatattaaatgtatgaatgatggcattctcgaaccgttggacatgtttagtgttttctaaaaattgatattggtctttgatctaaaaattgtgtgaatctctctttttgagtataaatattgtgaaataccatcatttatcacttttacccaaatttaaaacaagacttgagttttcagagaagaattgacgactacttaaacaattttggagtagtacattgatttttacatcaatcttcttcttcagatcaatgatcgtgagtatccatatgcaccacccccagtgactgttcttgagtctcagacgttact

SEQ ID NO: 12899 - DNA, 581 bp, Cannabis sativa
tttttctgtgtgatttgaatataaatagtaggatgaagtggtgatgtttgttgcgctgatggtgggttgtggaaggtggtggtgggtgatggtatatgtgaaagtgaagaagtgaaaaaaaattaaaaataaagaatgaagaagaagaaaaaaaaaagttagtttttttgtttgaaaaatataatatatcttttatttataattttttaaataattttttatgtggagcaataaaattgtgctgtgtggacacgtagatgtacacatatgtagtccaacatgacacttaacacttaaaatagataagaactgtaaattgctaacgtttttctaattttaggaattttactattaaaatttgagtttttgggattaagtgcaagcaaagtaaaagtattaaggattatgctccaattaactctaaatatagtgaattacatcaactataaagattatatgaaatattttgaaggaatataaatagaaattcaaaggggttcaaaataaattgtgaagaactaaagaaaaatgttaaaaggacatgcattttagtgtgaatttaaaggctaattaagattttt

SEQ ID NO: 12900 - DNA, 535 bp, Cannabis sativa
accacaaagggctagtccagaagtatgatggtccctttgagattgttcagaaagttggtgcggtcgcatacaaattgaagctgccagagtgctttaaggtacatccaacttttcatgtgagtttcctgaagaaatttcatgaagacaactcagaaggaacacagcagggcgtgagagcacctcctactgttaggatgcaatttgggaagaaattggcgaaagtccttgatcatcgtatattgggcgctagcaagaaaaaccgaaggagggagtatttggttttgtgggaaggcgaaagcgagggagaaggttcgtgggagaaagccgtcaacttgtggcaattcgaagacaagttgaatgcatacctcagaagtgtgtcgacgaggacgttgacttctattggtgggggtggtttgtgagcccttactcaggtccgcgcatgcgggcctgggcgttgctcgagcgagctgggcggcgagctgagtgacgtgcgcatatgcatgggtgtgcacatctgttgagggaacaggtgcaa

SEQ ID NO: 12901 - DNA, 665 bp, Cannabis sativa
tttttttaatttttcaaactgcatttgtaccgaaaactaaaaatttacaaaaattgcaccgcaaaaaatggtgcgatacggtgcagttcattcagtttagagtataaataattaaactatcacaaatacaacaaagcttgaacaacacttgtcaaaaataccataaggcttgaaaatgaatttgtaaaaaaaagtttcaagtttaacaatagaatagttagtgagcttggattgggccttcacatattggacttaaataaatataaaaattagtatttttgtaatatgcggtgctgtgtggtttgaacgcctatgaacaattgaaaatcgcaaactgcaccgcatgcaccgcgctcgtttaggaaaaatttaaactgtgaccacactgaaaagaatttcaaaccgcatttttttatgcggtgtgtggacggtttgagtggtttgatgaacacccctaactattatagatacctcaggtataacattagagtgatttaatatttgtttctatagtttaaatattatttttattcttggacgtcaataagcatcacttagaaatatgatattatatttttttaaagttattattttaaagttaatatgacattaaccagaatgctcaaaacaacaactatttcttaacatttctagttaaataatac

SEQ ID NO: 12902 - DNA, 646 bp, Cannabis sativa
tatctctctttctcgttcttgacttcattgacgcacaccatagtagtccaactcgcgctttcttggctgagaaaatatcaggcaatggcgccaagaaggttattcatcttctcttatgtctatttatttttcagcattatcttttgttctttgttggagaatgacactttcctaaccttagtctctttcacaatttatatatatattcgtatcattcattttttatatgtttttattttagttttatatttttaagtataaatctgggtgtattgttattaaagtaaataattttattttttttatcacaatttttttctttgaaatcatgattgtggtttgagctttttgtcctattcttttagttaatattaatatttataatattgatgttttgtttgattgacattcaataaaatgtcttctatgcactctttgatttgatcaatatattatttgattttgtgtgtgatttatactaacttgtagttttttttgctcaatttattggcctatgtgactcttttgttgttgttgtttttcctttagttatataattattttaaattattatcaattataataatgttcttgttatatgtttattttttttttaataatctgatcaattttctgttttgaattt

SEQ ID NO: 12903 - DNA, 713 bp, Cannabis sativa
tattaccagagtgctaaaatgatggtatattattatatttactataatagtgttctaaaaaaaaaatatactaaatttagtgtgaaaagttgtatttacataataaataatatttttttatttatttattaacgttactaattattacgattcatttagttttattaaaccttacggtttttatttattacattaccattatttaaataataaaaaaataaaaataataatttttatatattttaaataaaataccaaatcaatataattaatttttttttttacttattttacctcatgtatattggagcacattaatataaatagtgaggtaaatgtatcacaaatttatatattttttttgtgacaaatttagcatagatcttgctgaagatggacttttacttcactattttaaagagtcatttatgtgtggttagagctattttttaagtttgttcctattttagtttaaaaaaaatgtttacagggtattagctaatataattacatgctttattacaaattaaatattaatatattattacaggtggcataatcatttagacccatctctaaacaaaaatccatggacagaagaggaagaatccatccttattaaatatcaccaaatttatggtaacaagtgggctgatatagctaagtttctgcctggaaggtaagatctctataacatattatatatatatata

SEQ ID NO: 12904 - DNA, 547 bp, Cannabis sativa
caactattgtgtaaagtacgtaaatgtactaaatactccttcagttgaaaaactttattattcgcagctactaacaacaatgtaattgtgagtcattgaagaacaaagaagaaccaccaacgaaacaaaacaaaataaaactacgtcacatagacaagactaaaaacactcaaaattatgttacacacaagaccaaaacacttaaaaatatgtcacagagacaggactaatcatagcaataaaaattaattggtagcagcaaaacacaactctaaccaagccgtacttaagcccaaaggcttacgatggccggggacgaaggtagccttcgatagctatagatttaagaacgagaaactctaatttttctcttgaatttaatttatattattataatttatgaaaaaaaaataaaattattaaactaataatgtaaaatactataatttgtaaaataattttacttaatttacttcatctaaccattagtttaaatttgtgatcgtttgttagtttgttaattaaaaaatgttataaagaatacttt

SEQ ID NO: 12905 - DNA, 671 bp, Cannabis sativa
gaagggttgtgaccatgcttagcttcgagaaaagagttacgaggaaaatacctggctttaaagagcgaagcaagaagagaatctgggtttttaaaaagtctccaagcttgcttagcaagcattgcctggttaaaatgaattagagatctaaaacccatccccccaaaaaattttgactgacacatacgtttccaagatttccaatgaatttttttagaagcacccgcagaaccccaccaaaacctggccatcacagattcaattcccctgcaaagcttaaccggcaaacgaaaacaggccattgcataagcaggaatagcctggataacagccttaagtaacacctctttaccggctctagaaaaacactttcctgaccagcccctcagaacagaattaactttatccttaagaaaagcaaaagagtgatacttagatctagagagacattgaggaagacccaaatatttacaaatgaaaggtctatcttcaagattaaaagtgttgaagaagagggcacgaatatgagattgggtattgggagaaaaaagaatagaggacttagaaaaattaattacctgtcccgaagctctagaataaatgtcaaaaacttcctgcaaagcagagcacgatgaaccattagcagcacaaaaaaggaggctgtcatcagc

SEQ ID NO: 12906 - DNA, 656 bp, Cannabis sativa
aatacaatttttaataaaaaaaaatgacaaattcatatatatttttttatcaaaatatgcactacatgatcctttgtttgacacaatgtatgaatgtaatgtactttttatttacttgaaattttaaagagtattaatagtgtactctaatatatcaagatattatatcgatattgatgtgattaaatatcaaaatctcacacacattttaattttagtaattaatatagaaaaaaaaaaagactcctaacttgtaatgatattgaacaactctattacctaatggcaaatctattcactaaaaaaacactagctatatgtaaaagacttaatggatatttcacattaaaaaaatatatttttttaataacaattttttagttataacaaaatgttccttgtaactaaaatataatatttagatacaaattgttactaatttagttttattcacaacaaatattgtgattaaaaatacatttaatcataataaattgtaatttttataattaatacattttaacacagatattttaatcacaattttttttaattttagtcacaaattttattgtaactaaaattaagatttatattttactacctataatttacatattattacaaagataagaggtaaggtagctacattaatt

SEQ ID NO: 12907 - DNA, 662 bp, Cannabis sativa
ttatattaataataataaatttgtctgacggttaaaacttatggtcaacttgacccgcttttggttgaagctatggcgttgaaggaggtgctcagttgggtgaggggaaggtgggttgaggggggtgtgcctgctggtgtggttatggagtcggactcgctactgctggtgcaagccgtgcaacagaagaagattgtgttgctcttatgcaatcctctcttttgtttcctatttcaattaattttgttaaacggtagcgctaactttttggctcgttcttctggttctattcctggctgtatttcccgcgggggttttgtccttgctggtttggaagctatcttggtagctgatttgatttaataaaatttaattttttggctcaaaaaataaaagtgacatgcttagactcaccataggtaaatacataagcacataatcactcattcaaaaatataattatatcatcaaaaaagcccataatatatcaaaaaaatttatcacatgaatataattatgtttcaattgataaataacacatattaaaattgtgagattataattattagaaaataatttactttagtttaataatgtgattatgagtcaattaatcatttaaattgaccaaacacacaatataatcttacaattaagtgaga

SEQ ID NO: 12908 - DNA, 598 bp, Cannabis sativa
tatttttaccaagatttaattgtttaccgtttgatcatcatcaatggccaagatcagtccaaagtgaattttcatatattttttttgtattattttaataatattttaataggacccctcccctataaaaggagagctccatagtttatttttcacattcttctaagtccccataaggtcagagaatctctctctagaaattatagccaattttcttataattctcatgagaaataaaaactcaaagtagacgtagctctattactgtcatgacacggggagtgaactattataaatttcttgagtctctctatttatttattaaacatatttctcctttcaccaatctagcgagtgagtgtttgccagatttatgcgtcaatattttagtacttttattaagagagacaaatcgagatcctaatcaagatggttgcaacaagatcaagaactgttgaaacaagcacttctacgtcaatattttggtgattttattgagagatacaactcgagatcctaaactataattctattcatatattttggcccaactttattcactaccaaaattaatactttaaggaaactaatattcgat

SEQ ID NO: 12909 - DNA, 546 bp, Cannabis sativa
taaatggtatgacactagaaatagaaatatccaagaagatggaaattttactagtgtgtttgttcgtgatctatggtgtcaagacgatccatttatacttgcatcacaagcacaaatggtattttatactaatgatgataagaatggatctgattggagacttgcacacaaagtcagtcatcgaaatatatgggatgttccaaatattaatgtcgatgctcaagcagatgaaaattactatgacatcccaatatttcaagaagataattcttctaattttcgcatatggattgaactttcagcgcttgataatatgcaatttcatccttacgatgatgtcgaagtagaagatgtcaatgctaatgtagatgaactacttcaagtaagggtgaataatgaggttttagttgatgatggtgattttaaagatgatacacttgaagaatatgaagataaggaaagtcatctagaagatgatgatgatacatctgattatgaataataagtatataagtatatttatctctttttattcttttcaatttt

SEQ ID NO: 12910 - DNA, 647 bp, Cannabis sativa
tattcaacaaaaagggaaaatatgtgaaaaatatcttatttctacaaaacatttatgaaatactccatggcctaaatcatattcatcaacaactcaaggaaagcatggaaaaattgaaaaaataatgccaaatcgagacagttaaaaagattctagaaagataaaaaagagaaacatacctgaagaagaactagatggggatgaagaactgaggccaaggatttggagatgaatcatacgagtcttactgatgagctcttcaaccttcgcttgaatatccagtgttcttgattgcgttgaaggatcaacaattaatactgggggtcagtacacctagattcgctcattcgcgaatctaaaaagaagatgaatgcaatgatcgatgtaatactatagggtgctcttgttcgtcgacatcatatctctgcaaatttgaacacaattttaaattttgggtaaaagtggtaaatgggaaactttcaccatatttatacatgaagaaggtgatccacgtgttcccaaatcaatggtcaagatcacatttaagaaaatacaagaaaaatccaagggttcgggaaaactgtaagatacacatttaatgcgatgcatgaaactaagatattgaatgatgatattctcctcaagac

SEQ ID NO: 12911 - DNA, 524 bp, Cannabis sativa
gaagcttatccccctcacatccaaaagagagcataaacatatcagatgattcagaaatttttacaggaaatcgcccatcccagtgatctgacatttgattttggaaggtggacaaccaaacttttttctttgttaaaacattggcatacaacacagtatcaacagcaactgcaggtggaagagcttcagaatcatggaattcaaacactgattcctcatcatcagttaaggtgatttttgctttcattttatgcgtgagcggatccatgttaaattaggaacactgattggaagatgaagaagagaagcaggggaagatcactaccaaagaaattgcccagaatgaaagaaattcaaataaaaatcaataactgcataaataactgataaaaaactgctgttttctgaaaaaacaatgaagaaaaaccggtaaaacccatatgggacaataactgccacagagcactaaagtggccagactctctattcataactaaacctaattcttttccttccttgagaaa

SEQ ID NO: 12912 - DNA, 566 bp, Cannabis sativa
ttttactaatattcagtttgtaagtacaaacgttctgctaataaggcagcgcattttcttgcgcatagtgcttgttctttgtcagatcgtgttttttattccaacaactgcctttcggagttgttaagtattgtattggctgactccttaagttaataaaacggccaaacttccattcaaaaaaaaattgattaattgaatgattagttttagatctattgacggacctacaaattttattttgtggaggcttatttattattaaaaaaatatttatacttacattataattactcttaataaatttatttaattttgtggagttttttttattattttagtctatatttattaaattaaaaaaaaattacatttaattttttaaaagataatatttttattagtgggactatatccccacatgattactagtgggtccatccctgaatctatgatatgccactatctcaaaaatgtctttttgcattagtttacactttgatcaatccctaaaattaacacaattgattacttcaaaaattgacacaaaccaatatagaatccca

SEQ ID NO: 12913 - DNA, 587 bp, Cannabis sativa
ctaacttacccacaacacacacacacactacactttccacatgacatgggggcactgttcttcaatatcaatagaaaaatttaagtcatcaaaccaaaatgagtaatttacgttataaataattgagtttaattctcaattataaataaatatttaaatttaatttttagcaataataatacttaatttatatttttaaaactccataaatccattatcgttaaatgttaagttattattcatgtgtcatttttaattggtatatttaaattaatttttttaacaaataaaaataaaaatttaataacttgaactaatcataaattgccatgtaacaattcactacttaactacctacaaaagttttatgtatttatttacaatcgaaaattaaactaaaatatttttaccacaaattactcaactgaaattcataacaatatctttttattttaggcataaaagttaatattcttattcaatgaactttttgctagtattattgaggaccaaatgaaccaacaatagagtccttatgaaagcagtagtgacaaaaacaatagtcaatacaaaattggcagataaac

SEQ ID NO: 12914 - DNA, 623 bp, Cannabis sativa
aaattgcaattgagagatatcagactgtgtgtgctcaaagttggcctccacattatgttgtacaccgctggcatggagtgaatcgacaggttcttcaaatgaaatttctctactgtgtgagtccaccaaattactctgcatatcattgttgctcagaacctgcaaaataaaataaaaattttcagtctgaatatataaaaagctaacagactacagcttcttttttctttttctttttttaagtaagactacagcttcttgtactcaaagtaattaactaattcaatttattaaacctcaatagcggaatagtaagttaaatttcaataaattaagttcttgtgtcggtattccagtttaaaattttctttatctacaaccttggcttgtgctaattttcgttgttaacaaatccttattctttgttttgttgctcttgttataatatcaataaaagttaaataaaccaataatgcagaacgaacaattatttaatcatttaagtagaagaaaaaaaaaataagggatagcattagtggaagtcagctcaataacaaacctgagattgtggtggagtgttgtcagcataatctttgacctctggcaggtcaagcaaaggctca

SEQ ID NO: 12915 - DNA, 683 bp, Cannabis sativa
taatatttagcgatcgattataattagatcgatagattttcactggattgaatcgatttatgcatacacatataatattttattataatatatatttagagaattaatataatattttatttattattatatcaatacaaaatacttttaaacatcataaaaaagattagttatttaaacatgagagtatgagacaataagcatatagaatagatcgtacaaatatttttaccatttgttttggacaaatgctaaagcttccttcgatggtaccgggtgcaatttaatattaaattttacttattttactttaattaaaataagagtggtaattataaattcttattataattttttaatcaaactttacgtttgaaatcgcgtgtcaaaatatttttttcattttttttttcatagctattttcgtaagagttaaagtatcattcttgtaaatttttaaaaaattccgaatagtttacagtaccgaaaataaagtccctcacattctaatttattcaaaaaacttcaacggcactataaactattcgaaaattatgttgtaagcataataaaaaaaatattccaatagatattttcggaggtaaaaattaaataagagattaataaagaaatggtattgttgtttatgatttaattaataaagaaagaccaaccttagtggt

SEQ ID NO: 12916 - DNA, 1159 bp, Cannabis sativa
  modified_base (149)..(149): a, c, t, g, unknown or other
gagatggaaattcattgaattttcaagaagttgaagaaggagtacgaatctgcgatgtctgaggagattaaaaagtgaactgctgaaggaatttcaacttgatggatgcaaggagagcttgtcttcttggatctaagagtgcttagatntattgtcttgactgtgttcaagaattaggtaacatcgtgtaaagtttcagattatgtagtttaatttgtaaaatctaaactgatgtatataattgaattgattttatagtggttattactttattcgatttttggaaacccaagcactactcggttggaatgcgtttccaatgcagaggaagcttgtaaatctggtgttcattgatttagctttctaatcttaattcttgtaatattcatttaagttcaattacttaactattggagatattagaattagggctgcacacccgcaaacccagaaaacccgaacactcgccctgacccgctgccaaaaaaatcgaccgcctaaaaaccttatagtcgggtcgggttcaacccgaaaaggactgtaaccgggtttcgggttcgggtcagcttatgagtttattttctggtcgagttataatccgtaacctgaaaatataaaaatgatttttttttattaaaaaactaatactttaaataattaatactaattactttactgttgcctattcgtattcttctatagtattagtaaatactattttaaatttttaatcatgtccaatgaatcaatttcaaacaaatacaaaagctctcactgcctattcgtattcttcaatcttcactaactattcacttcactttcacttaagtgacagactcacccacacccaccgtcccacccacacgactaacccacacccatcgtcccacccatacaagtcgactgactcaactcgtccgactcacccacaccagtcgacttgagttgtcacacaccaccggcaccctacccttaaaccattaccacgcatcagaccaaagcttcttcttctccaagaccggcgacggagagtcggcgactggttctcttcgccagcgaagtcccatcccagagcagcatcgccagtcggctcagtcgcatcccgtaccaagtaagtgtctgtgtgtgtactgtgtaactgtgtgtgtgtgtgtgtgtg

SEQ ID NO: 12917 - DNA, 515 bp, Cannabis sativa
aaggaattaaataattatttattcccccttcactttcaagggagaatggtgagtttcatctactttataagatgtcttttttccaaagtttagcatgagtgtattgataaattgataatctagaaatatcaagaagcatatcttttaagtttggcataagtttgtaagattggctgagaatgtacaagaaatatcttatatgtttctttgactggatgggttgatgattacagttggtgctttcatcaacatcaacagctagtaatagcatttcccttgtgcaccaagtcccggaaggtcatgttggggcatattggagaggaggtgcccttctgaaggcaatttcagatccaggtcctaacttcagacatcacttctcctaatcttacatatggtctctactttgaatgtttgtagtaatgctgtatcttcaggttttcatttcaagatgcctttgcttacccaatatgagcctgttcaagtaaccattcagacagatcaggtaacttttggct

SEQ ID NO: 12918 - DNA, 581 bp, Cannabis sativa
cagccctccaaaggccaaaataatggaggcaagtgtggcagcaacaactctggcccagcaaaaggaaaaagggggaaatttaataattctcccaagccacaagactcacaagagaaggaaaggagatttacatgattcaccctcctaacagcaactcctgaaataatctatacggctacagagtccatagactatgactatgagggagagggacacctctaaattctgccacttttacttttacaatgattttggccatgataccaacgagtgcaagcacttaaaattggaaattaagttcttgatcagaaagaataatctccatctacgtcattatgtgaaagacgactaaacacaggcacaaggtgcccaaaatagagacctagtaccactgccaatggcgggtcacctaggggtcatattggcataccctatatagcaagtgaaaccagtaaggccatggagcgctatgctcagactctccatcatgagcgtaaaaatgacatcctagctgtagaggaaagagattccaagcagcttaagcttggagagcctgatatctccttcataggaagagatgt

SEQ ID NO: 12919 - DNA, 511 bp, Cannabis sativa
tagagcttgtgttttgtctaaaaacaacttctatggcctgtattttaaataatattcatctagtactttgtatttataccattaaaattaaaaattaaatatttaaatgaaatgcctaagtacaagtatttattttgtcaattacaacattctaactttttctattttcagctaatatattaaagaaattaatgcaattaagtataactcttttttgtattttaattttgaaagtattgtgttaagaaattcaccattcacaagccatcgtgatagtgtttaacactataacaatagaatattattggtgcctatcattttttataagtggcgtcccacgataattagtgatattctctagaagttattttcgtaaattatataaaacctgatatttaattacatcaataacagtatgacaccgaaaaaaaatagtaagtaccgataataccttttaagcattctcataacaacgctcaataaaataggtaatcaattctgccgaaatgat

SEQ ID NO: 12920 - DNA, 850 bp, Cannabis sativa
tttcagggggtctggccagccatggggacacagtccctaggctggccagctgttatacccaaaattcggctggaggacacgtgtcaagataaagggaatgtgaatcggtgccatatctttttatggaataactcattaattgcgtaagtactagagtatatctgcaacccgctgactgtaaagtcttaaaagtcttatgcaaagaatgcaaagaatcaatggaatcaatgtacgaactggtacttagagtatgaacgagaaaccatatgtcgctaagggataatagcgaggtaccagagaaaaataatacatacctcagcttgcaataagtagactaagtataaaagtcaaaccgactcggaacacaagagtgcgaggcgaccatctcgctacgaggaaacttcctataaattcatccaactaacaaaagcgagactcacaaccctggcaattcagtagaattccttatatctacgatcgacgtgaaacacatcttgtccatcctgaaaagaagagtggttccagctcgccattaggatcattacaatcaagtttctgtcgaggcatctccagaatcaataatcaaagacgtgtttaatacatgatatttttgatccagtaaaagtgagaaatccacagctgaatgattttccaaatcatgcaccgcgtttacattttgtaatgtgtagtcagatcccacgatttaagggataatgactgtaattacatttgggtcagctttgtaattaactgtcactatgcaattataaatagtggcaaacaatctcaaaaaagggagacaaaaaaactcttacgcaacattccctgaaaaaacaacactcaaaaatct

SEQ ID NO: 12921 - DNA, 553 bp, Cannabis sativa
caaatttatttttatcctattttcgaaggttctagtaataattatgactgataaattaggtaattattcaaagttagtcaatttttatttaaatttgttcccacatttattaattaatttaatattaatgtaatagtcttatatttttcttaagtaacttttaattctgatcatgtttttacaaagaacgtgttttttaataattatttcatttttattttttgaaaagaaaatataattttttttttcaaaagatatatattataaataattttgctaaagtatttaatttctttattttcatattaaagatgttacatattaaaattggtaacaatctttcccgtaaatttcgcgtgagtggttacattcaattttattgtcaacactgcacaacgctcttgacaaaaaaacaaaataccattgtcaacattgcgaaagcttcaacaaagtccaccaccaagtaaagatcaactattgcaatcgaaaaacaaataggaaactattatcacactacaacataccctttgaaaaagtttctaccacctataat

SEQ ID NO: 12922 - DNA, 712 bp, Cannabis sativa
aactcactcttctcatctaggaaaacatcttttattttcaaacatttcggtaagcttatcagtcttatttccattccaatagaaacttcattaccctaataattctagttgaataccacacctgaaaggtcatctaattttttttttttttttttttttcagtcgctaaggtcatagctcctatctcaatagatacaaaatggatactccgtccatctccttgatacttgttgactcaaaatttggtcagctaattgcagagccttattagttgctgattatcaccacgtgtaaataacaataatgaatagtaaaaataacacacgaatttatagaggttcggtcatcttgataaacgagtaaggacctcccttttttgttatattgactcttgagataataccatgcagattataggcctagaccttataatttctagctatggctctcttcagtattacaattgtgagaataagtgttacagataaagaattggtgagatcttgtgaagaacttatgaagagacttgacttaggcattgatggaatgtgaaaattgagagagagggaggctttgggcgtgtgagaagcttaatggagcccctctagtgcatgtagaatgactttacccccaatagagtgatctaatgccctttctatagtgtagggcttactagagatcctcattaaaataggtaaaaatattcctttaa

SEQ ID NO: 12923 - DNA, 602 bp, Cannabis sativa
atataactatgataattatattttaatatgatctgcaatagtttactaataggtaaaatttttattttagattcaaaataattataattaattatatatttaaaataaattaattttttaattaaaatatttaataagacatttttcacaactaatgtttgtaaatattttttaattttttatttatgagaaaataaataaaattaagttagtatcatgttatgagtaatttattaattatttttatttaatctctaaattaatcacaaccgtttaacatgatccaacaattaaaataaatgtaagcaccgtaattatatatttgatgtaactattaaaaatattttgtaaataataaaagaaaaatactaaaaggcactattgctgtgtagcatcctcctcaatgttatactgttattggagtgattaagtatcaggtttcatataagttaagataataacttttaaaaaatatcactaaccaatcataagacgtcacctataagaaatgctataaagttcatgataaaagtccatattaatgaagaaaaaaaaaacttgggttggattatgatgatccggaatggatctttacgagtgat

SEQ ID NO: 12924 - DNA, 514 bp, Cannabis sativa
ttcacaactttggtatcaacttttgttttagctctcaagcactaaaatgtttagcgaaatttttaaaaatcaattataattatatttaagctaaataaatatattaaagagtaagaacaagacaagagtttttatgtggttcaaggattaacgacctctagtccatgagtcaatgttatttggctagaaaagttacataattgtttgccaagtttatgaaccctaaaattttccttagctctcaagtattgagattctaaccctttgcatgaatggattttcttatatttatagacctagggttcttatttgtaaaccttgctcactaatagtaaatataaataacttattaacttcaggtccatttggtgaagctcggctcatgaggcatgatcttctgctgacgtggatgtcgcgtcatgttgatagttgtcaagacatatcctacttttatgaaaaataaagacacatataatgcttgattgataattactacattttcttatttagaata

SEQ ID NO: 12925 - DNA, 838 bp, Cannabis sativa
tcactgttgaagaataagacctgaactgttgttagaaaaccagcagggtgtaaattgatctgttgtaaatggatcttcagagaaaatgaggggatgtcaattgatgattgcaagagatacaaggctagacttgtggccaaagggtttactcaaagagaaggagtagatttcaatgaaaacatgcctcaattagagcaatcatggccaaggcagcttttgaggatctagaaattgagcaaatggatgtgaagaatacctttatccatggaaaactaggagatcatatacataaagatgccaaaaggttttgatgaagatagagacaaggtctgcttgctgcagaaatctctctacgggctgaaacaagctcctagacaatggaatctcaaatttgatgattttatgatgagaagtggattcaccaagagttcatatgatccatgtgtatacttcaatggtacactcttccttcttttctatgttgatgaaatattgttgatagggaaaagcaagagtgaaattggagaaatgaagccacttttaaacatagagtttgagatgaaagacctaggtgaagctaagaaaatcctaagcattgaaataagaagaaacaaacctgaatgtctgactttgactcaaggaaactaccttagaaaggtactacaaaagttcaaaatggataactcaaaacctgtgtcaactcctctagcagcacatttcaaattgtctaaagatcaaggtcccaagacagaacaagaaagagagctcatggactcagtaccttatgctagtggagttggaagtttgatatatatatgttatggtttgtacaaggcca

SEQ ID NO: 12926 - DNA, 1233 bp, Cannabis sativa
tgtaggcagtataatgtatcttatgatctgtactagaccagatcatagttatgcaatgagtggggtcacatttatgcgacaacctggtgtggagcactggaaagcaaccaaatggatacttaggtatctaaagaagacacctgaggttggcctcatatatggaacatgttctaatacctcaaatgtagtaggatatgtgaactcggactatgctggtgaccttgacactaggagatcacaatctggctatgtgtttatgctaaactagtgtacaataagttggaaatctaatctccaagctattgtggctctttctactacaaaagcagaatacatagcttgtacagaagttgtcaaagaagccctgtggctcaaaggaataacaagggaactagggattgatcaggagactgtttgtattcattgtgacagtcaaagtgcttcgcatctcagtaagaatcaagtctttcatgagagacctaagcacatttatgttaggttacacttcattcaagatgtcctatcaaatggcaaggttcaagttgtcaaagttagcattgaagagaatgttgcaggcatgcttattaagtcactgcctgcagcaaaatttgaacagtgtcttagaatcttaaaaatttcagattccttgtctaaaatctgatacacattattagttcaaggtggagaattactacatcatattccttgaaatgtggatctaacctgtcaagtgtaggcttttggttttatgttgtaagcccaactgtcattactgccatctcgacagtcatgacagttggtcctctttagtgtttagattgatataaatactattagactctattttctgagatagagaaccaagtgtaattctcagcttgtaaagcttactcaaaatcaataaaactaaatttttctcaactttagtttgtgtggtagtgcttttggttctatgaagtactttcgtgtgtgttcattggagttcccttgctttgtatgtgtgtgtgtatgaatacagtttggcattggtgtttccaacaagtgattaagcccaacccaagccatatttttatgtaataccagaagtggcaagccacccgttcttaatgtgttttgtttatttgtacaacttccttttgattattatttatgacaattattgtcttttttattttatagttgagtggattctgttttggcatcattaagcatgtaagttttgagggatgatat

SEQ ID NO: 12927 - DNA, 695 bp, Cannabis sativa
ttagtccaaatccacctgtctttcccctggccacaaggcctcccctctttcaggatattcgtaatcgtgtcagagtcaaacaaggacttgagtatggagatatctcagtccccatgattcgtgagcagatccgccaccttaacaccctctcatggcacgaagaaatgggcttgatacacttatatttagtatattaattttattctaatatgggtatataaaatcaaacttctctactcataatcttactaataaatcaactgttccatcattcacgtgaaccacctttcacttttaccacatcaaaatagtaaatttattatttattattatcattttttaactagaaattgcaacttattattatattatagtatcaaaattttttagttccaatttaaggtaaaaatttgaatcaattccaattacatataaagatattcaatgatattaacataattacatataaattcgttatatactaattaatattttttttttgaaacaatactaattaatgttcggatcttcacatttttttttctgtaaggttcaaattgtttatgaaaccacttatctacgaaccagctctatggtgaaacttcagctccaacacaccccatagctatagtcttcttattagttaccatatattcatagcaatagtagagtagtcttgatttttgagaccatat

SEQ ID NO: 12928 - DNA, 914 bp, Cannabis sativa
ggaaaaataaataaataaagatagaaaaataaattggaataattacataaaatattattttttttaaaaaaaaaatacatttttaagttgaaagatttcttttaagttgaaaatatacatttttaaaagtaatagaaaaatagcatctaaacaatattaaaacaataacaaaaaatataacatataaataactaaaaatcaacaataaattaataaaaatataatataaaatgttttaaaagaccctattttttgtaaataaaaccataaaaatagtaaaaaaataaataaaattacgtataatcaattttttgtaatttttgtatatttgtgaaataatcccaataaaattttgggttactaataaatgtaatatgaccttctttaatatgaaagatttaaatattatactaaacttaacataaaataaacaaatattatatttgtaataatatttgctatcgaaacatttaaatacaaataataacaaaaataaaatgttattaattaataattataaataaattaaatatttaaaaaataattcataacattattgtagtgaaaaaaaaatgtattaaagcttataattaaaaatcaatggtaaaattataattaagaaatatatagttattgtgtattaaatttagcacaatattatattttgtgtcaaatttagcacaaaattaagaacaatattggagagatttttttaaagagaaatactaaaagggtattagtggtgtctagcaccctcctgcgtgtcaatatcgttattgatgcaattaagtatcgagccacatataatttaattaaataaattttagagagtattgctaactgttacttcagaatttcgttaataataaataagatcttctttatgaaataaaaaactaacgttaataaagctt

SEQ ID NO: 12929 - DNA, 565 bp, Cannabis sativa
  modified_base (138)..(142): a, c, t, g, unknown or other
atatactttagtccatccattcttaacagtcaaattatctttgttagattaaactatagtactcatccttgctttttctactctttttttttatttatttttgaaatgattaatcaccttattattattattattatnnnnnttattattattattttgaacaaaagtcactttaaaagtttatgatttatatttcataatgaagacatcattacttggtgaaagataagtcattgttgtctagccaaaggatatgtttagcaaaataagaactacaaaaagattgttgcgaggcaacatcaataaaagctatatcgatagcaatttatacattgagctcgttcggtctgtaatatatctagaatcataaataaatatatttttggattaacagaataaattatatcctaatcaatacttatttttcgaaaaaaataaaaaataaatagcttaaacacccttatattaaattaaatagcccatatacttatttttggatgcatacttatttctaatgacccctaaattaagtcattaaaattttatctaaacaataaatcacatt

SEQ ID NO: 12930 - DNA, 673 bp, Cannabis sativa
acattccctttggcaaaatccgtacgataacgatcatagcctgaggttggaagagcagaacccttcatagttggtccatattccaattcaggttcttgtccattgtcaagcaattcaaggaactccaggcatttgttatagggatgacccaatataccacactccatacaatactcaggtaaccgctcatagcggaactccacccagaattcatcacggatctggtttaaagtgatcaatcttccacgcagcaaaggtttggagatatcaatattcacacgaattcgcagaaagggaccccatccctcatttaacgaatcctcaaagacatcaatgtattcaccaattatgtttcccaaagctttagctaaacctttagttttgctaagaaaaaggagtctgtatatttgaacccaaaaaggtgagtaaatgagtgattcagaggtaacattttgtccaggaattggtgaacataatacaatgtggtgattttggaaatgaaaaggttcacgagacaagaccctcgctttgtcaccttcacatccaaaggttaataaaaacagatcagaggactcggaaattttaactggaaatctcccatcccagtgttcagccatctgattcctcaaagtcgatagccaaactttcttgtttgttaagatgcgagcataca

SEQ ID NO: 12931 - DNA, 797 bp, Cannabis sativa
ggtgatggctaatttttgatgtctggagggtcttgcttcgagttacccaaagcatattttcgttacttccttggatataaatttttgtaatgatatttttagaattttgactagagtgcgatacttgacatgatagagggattaaatagctttaaaactcaagtttaattgcgtcaatcagataaaaattgagtgagttatagctgttatactgaaggcagtccatgtcccagtgcccaggttgacatccagcgccaagcttgacgtcaacctggacgctgtataagtgtaaaaacatccaagggaagtcctttaagatgcctaaatgatggtttgataccccttagttcttttatatgttttggtgactctggtcacacattctcggagatgttgctgttttgcagaaatagaagactcgaaacttcttgcttccgaatgagtcaaaattgaagttgtgaatttgaatgatctaacttcatggatcattgcactcatgaaaaactatatagacgatcaaaacgacatcaaatttgaataagtagaacctagcgaacatggccatttgttgacttgggccctggggcctttaaaccgagcttttaggattctatttttaatactgttaatgcttatgaacttgaggatggggtcgcccccccaatttttgactatgttgggttcaatgggcacatcaaatttggcatttgagcaattgaaggtagcgtcccaggttaattgtcaacttgagcactacgccctgtctctaggaactcgagtttgtggcttctcccccc

SEQ ID NO: 12932 - DNA, 1020 bp, Cannabis sativa
accactaccactaccactacactactactagtactacttcaacaacatgcactaatatatcatcgcacttcatcaacattaataggcatctcgccgacttaggggggtgctatcaacaagacactgccgcaccactttctcgtcatgattaggtgtttatagtacgagttggaattttgttttttttttttttcaaatcaaattgtttatgcagtttttgtaatttcacaaaccatatttgtactgtaagattttaaaaccgcagaaattacattgtaaaaatacagtgtagtatgatttgaacagtttacactatcattattatcatatattataattaaaatttgggtaaatactattttggattttgtgttttgcaaaagttaccaattggaccctctattttgttaaataacaaaataaaccctatattttctaaaatgctaaaaataggatctaagctcaattttcaaaaaatttattttttaatataaccaactttatgataatttctaacacaaacagatacagaaaatgtaaccaattttatcttaacatctctagatcaaactattattaaattttattttgataaaaaatcagttcaggatcctatatgtacaattttaaaaaatgcaaagtctattttgtcatttaacaaaacagaaggtcaaattggtaatttttgcaaaacacatgggtatttacccttaaaatttaaaaatcaatctaataaaagtttaacaatataaaaaaaaatcttattaaagttttaatatcataatatatataataattatcaagttattattttaaattgtctttaaaaaaataatgtaatatacacatatactaaatatatttatctttatataaaaaaataaaaatcatattgtaaaaataggtaattttataatatatagtgtggtgcaatttgaatctcaattattaaatttaaaattgcaaaccgtaccgtaccgcacggtttgtcaaaaaagcaaatcacaattgcaccgcaaa

SEQ ID NO: 12933 - DNA, 547 bp, Cannabis sativa
atatattgttattattatatatacaggaatatttatgttagaaattctttttaactatttgtaattgttatccatatggttttaataaaaaaaaatagtcgtaaatatattttattttacaattttactgcagtcgtactctcttaactgttaaatatttgtttaattaaagaaaaattaatttagttttctattcaaatttgtatatttttaattaataaatatgataaataataattatttaatatgttgtctaatatatatcgacatatatttttgagttgacacttaacaactaaaatgatattccctatcgtgcgttgcaagtgcttaatgggagatggaattcacaagacgattctggcttttggaagaagttttggtatttaaaacttcccccaaaagttaagaattttctttggagggctccctctaattgccttctcactcttgtttcacttcaaactaagcgagttaatgtgactaatacttgtcctctttgtagtggagatgttgagaccatatttcatattatggttacttgtcc

SEQ ID NO: 12934 - DNA, 520 bp, Cannabis sativa
ttgtcaaatatctttatacagtaaatatatatagagaaacttttagctaggtcactcatcttttattctaattactaattagctttgtttataaccactcattttcttttacaatatataatatataaatatatgatttttcctcacatgtgattaccataatttttttgtgtagtataataaatatatatattatttatttccttgaccattaattttttccatgcaaaaaatctcaacagtgaagacaaatattatctaattatttccacggatgcatatcatataatagtattggtcaggtttttctagtagttttcaaattaagggggtgtttggttataacacttttgtttttaataagtaaaatttttagtgttttgaaatttttgtttttaaaaaataaaaaatacattctatttttacttttgtttttaaattttaaaataaataataaaaatgtattctataacttttttattaatttatttaagttgggtctaaggctaagtctggggcc

SEQ ID NO: 12935 - DNA, 977 bp, Cannabis sativa
atctccagttatttctttcccccaccgacctagaacctccacacacatgctaatcttacccgaagtactatcattagattgagtatcccaacaatcttgaacaagctgataacacatgggctcagaaagccaagcattctcaaaacgaaagcgacgaggagtacgaaaagagacccttacaatcggctctagaaaaattgggcagtgatccgatgttgaagcttccaaattcgttaaacaagcttccagaaacagagtacgccaagaattagtgaccaaagctcgatcaagacgcacctcgatccattctctagtacctctagctctttcccaagtgaaagggtagcccaagagctccaaatcttccaaaccgcattcatccaaacaactttgaaagccttgtagtaaccattggggatacggacgacccccttttttgtcttcttgactaaggacattgttcaagtctccgattacacaccatggaagagtcgagttccttgttaatgtcttcaaaagagtccatgtttgctctctttcgtttcggttgggctctccataaactcctgttagtctccaccaacttccatcaagtgtagcaactttcatgtcaatatggttctgggaaaaacccaataaagatccctcatctttatttttccaaagaaaagccaagcctccactaagcccgtgggcttccacaacaaaaattccttcataacccaaagcccgtcccacccaattaactcgatctttttgacatggtgtttcacacaaaaaaaacaaaattaggtttcttatgagaaataatctcttttaggaattgataagtccgctggttcccaagcccccgacaattccagctcaagacattcataatgcttggcgggcctggaaaccagaacccgccccattcaagttttttggactcccactctccactgttggcatgcttacatcttggtctaacatttcaa

SEQ ID NO: 12936 - DNA, 674 bp, Cannabis sativa
tcagatagaggaatttacaagagctgactttaaagtagcagctggttatagaagcatggcacctgaacatgaaagagtgaaatggagtaatgaagtgtggtcacgactcaacatcccgaaacatagtttcctaatcgggtatgctatgttgaacaggttgaagactaaagacaggttatgcaagtacaagatgtttgattcgaatatatgcccctgctgcaatattgtagaagaaaacatagatcacctgttttttcagtgtcaattttcttagcaatgctttcaactgttgaaggactggattaagtggcacactcaggcagataccttggggaatttgataaagatcatacggaaagcaagacaaactaaattcaggaaaggggtcaaagcagtatgcataacaggactggtgtacctgatatggagaaggagaaataatctgatatggaatggagagacccagcagccagccgaacttctgcagcagctgaagaagaatgtgaaaactagattgatggtagcaatgccaaaaaaagtaaaaagtaaagatagagaatggtttgacagtttgtagataaaattgtatagagactattgaggccattattggtgcttataggatgtaaatgagagtttgtgcaatgaatattcacttgattcataaaaaaaaa

SEQ ID NO: 12937 - DNA, 624 bp, Cannabis sativa
acaattctgtcactggagtttctacttatgattatcaaataaaaagataaaaagaatataaaaacaaaacattccacatgtaatatagtagaaacctaggtgaaaactaatcgcataccaaagagcatatggatgacatgatatatcataatgaactaaggcattttaagtagcatataccacaagacaaatcaacaaacataaatcagaagaactaaaaaaatgagaagttactataaaaataagttctatggtgtcaaatcacatgttctattagtgcataggttacgaaaaataaactatacctttcactcttaccaaaaccaaagcgggcgccaaaataaaacgcaatagcaagcaaccatgaatcgctgtgaactgcgaccaatgacaaccagcccttctcttgcatcccatcccttgcaaagtttatgcccaaggccagttcaaaaagcttgggaggtacctcttaaacaggtaggttaacttcccatatctcatttggaagtccatccagacaaattttccttttatgtacaacacaatggctaaagacctactgtgtgaagctgaaaaatatatttaatggttgttgaaaacaatgtggatgggttaaaaccaagt

SEQ ID NO: 12938 - DNA, 561 bp, Cannabis sativa
tctgcagtgagttcatgaacaccattatacactagctacttatataattccacgtcatcaactatgattatctttgttacgtggaaaatgaaaaatgcagttgcatggtgattatgtagtaccgcaacgtatgaaatcacgagtcccttctttttttttcttagctgaatattatcgatcgcttcgttgccagaagcccatggaaacttaggccataatagcagaggaagtgtttttcaattcgcggaggggaaaacatggcagaatcgacgggacaatggttgcagtagtcgttgatcgatctatgccaaaagatggacacaggtatggctttggactcagatatgatttcgggtttagtctcctactgtgagctcgctgatccttaagacgccaaagaatatctcgacgtaatttcccactttttttctctcgctttctttccatccaaactggttcctgaaatctagtttatagcgcagaatctttgaattgaattttcatggctgagatttgttaaatttcattacttaggcattgatagttcttggttattgaaat

SEQ ID NO: 12939 - DNA, 674 bp, Cannabis sativa
  modified_base (135)..(140): a, c, t, g, unknown or other
  modified_base (298)..(317): a, c, t, g, unknown or other
taaaagaaatctctaagtttaacccaaaacaatacaataaactttttttaatagcttaagaataagaatatcaagtacagaacaccaaaacctctgaggaagacactaaaggggcgtttggtatgaggtgttcannnnnntttgattatagggaatattatgaaggagaatatgattataggaaaatgtgtaaaccgtgtttggctgtgtagggtaatatgaatcatattactgttaattaaattacactgtttggttaagtacagaaatcttatatatatatattattttaaaaaannnnnnnnnnnnnnnnnnnntattatatctatttgatgttaattgtatataaaaataaaatagttatttattaaaaaaatatatttattgattagtaaacattaaattttattatattttttattaattaaaataaatatttttatatattttatcactatattatttatttttgttcgatatgttatttatgtacaccatccgcataaaattttttataataaatatatatgttattgctaataatataaaataactcattaaaaacagtgtgttttatttgcctggaaaatcaacatcttctagcttaccttggtgaagccctagcagtccctatctcttcatccttcttttgttgaaccaggtatctctctctc

SEQ ID NO: 12940 - DNA, 684 bp, Cannabis sativa
cggctgcattacaggtgcgagatgtacaatcagatactgaagtgactgagaagtggtggcgtcttctttggaagctcaaaatcccaccaaaggttaagcattttgtgtggaagttggctcattcttggcttccaactaatgcggttcttgctcgccgtaacatcccagttgagccttactgtaacagatgttttaatggagtgtatgaggatgtttttcatgcaatttggtgttgcagagtgaatcgggaggtttggaagtccactggtttttatgggaaaattcaaagacaagggagtgaggatgtgctagctttcctcatgcgtatctcgaccattttatccaaggaggagtttgaattttttctggtgctgtcatggaatctttggtatgttcgaaactctgttaaccatgggggtcataaaccacaagcttgtgcaattctggaatggtgcagtaagtttctcagcgagtttcgtgaaagtaatacgcctaagagagatcgacaggttcgggaggctgcacgttggacaccaccaggtattgatgcttttaaaattaatgtggatgctggtgttcgaacggaggcaggtgtggctagtattagctcggtggttcgtgatcatgctgggatggttcactcggctgctgcaactgtgttgctgcagaatatgaccccattac

SEQ ID NO: 12941 - DNA, 584 bp, Cannabis sativa
cggctgctggcacggagttagccgaaagtcatttgcataatcatactttgtgaaaactaaataaaaaaaattaaactttaaataaaactaatatttacgtgcctcggcacgtaactactaactagtatatatatatcttacctattatataaatgtttatctaactatttttgttgtgcatttaacatattcttctattttttaacagaatattctccaaaaaaaaaattaattttaacagaagtataaattactaatagcatttcttaagagttgcatccttccacatatagatacaactattcacaaataagcacttattcacacaaaccatcttttatatattgtcatcaacttcactaattgtgtacatataatatctgctgtatatttgtaaaacacatcttttcatccctcatagaattccttgaatcatacacttaatgttgcagtgagtgttcaacaaagtgttagaaggagagagttatatataggtaaccctaagaataatagtgacaattcttccaaattgtataattatgtttttacaagtcatcaaaaacttggaatctgtcgaaaactaa

SEQ ID NO: 12942 - DNA, 514 bp, Cannabis sativa
tttcaaagaatgatagaggacagtaccataatagtcacgagcaaaccacccaatcctataaaagttaggtctaaaaataaaagatgtatatacatattaactttaatcgtatataacactcgaaactgatcaatactctacactaacactagcaagaagctaacagccaccataccatattagcaacagaacttttactttgtcacacatttcaagttcgctaaagagaccaacaaatcataacaatttaacatacactttcaacttaaaaaaactcaacatgcctcattaacccggtgtcagcatgcctttgctatataagcaagatcaacaaatatgtgaagaattaattaattccgccatgaatttgattaaaattaaacaaaatattattcttttaatataatataactataactcataattaattaatatatggtataatgcgttacattattaatggatattatttattttgaatggtattaacgcatattattgaacatctccaata

SEQ ID NO: 12943 - DNA, 1206 bp, Cannabis sativa
tatgaccataatacttctggtagtccctccggccagttccccttactttcttcaagtcgttttttcaaagtgcatttgagtgtattattgactgcttcgacgtgaccattttattaagggtgtgccattgcggagaaactgtttatgatttcatggttcgtgtagaaatctgtgaacaattggctatcaaactgtttgccattgcctgagactattttgtgtgcatgtccgaatcgacatattatacttttcaccatgaagtccaatactttcttagatgtaattgttgccaatggctcgacttttgtccactttgtaaaataatcaactgcgaccactgcatattttattccacccttatctttaggaaattttccaactaggtcaattccccaaatggcgaaaggccaaggactttgcatctgagttagctcgttaggtggtgcacaggttatctttaaaaatctttggtatttatcacatttctttacataggcctttgaatcatccatcatggtcggccagaaatatccttgccttagtattacttcgataggcttcgcccagctgcatggttgccacagaatccatcatgtagttccaacagaagccgtgcagcttcttcttttgtaacacatctaagtcatggcatagagaatccccttctatacattactccttctacgatgatgtaccatacaaccttccttctcatcttccgagctttatttctatcatttggaagttctccagtattgaggtaggctacaatgggtgtcatccaggtcgggcctgtgtctatcatttcaatttcctctgcacaggtgatgctgagctcttctaggaattgaattgggactaaattagccttatcagttatggtgttgctcgcaagtcgggctcaggcattaacaattgtgttttcttctcttgggatttgcatgagagtgtaacccttgaattgtgcgagcagataatgtattttgcttagataagctattattttctcctcccgagcctcgtactccctcgacacatgattcactaccaattgtgaatcactacagatcttaatgtgtttagtgtgtagtctcgagcaagtttcaagccagtaatgagggcttcatactctgcttcattgttggaaactttgaatccaaatttaactgccccatccagattttgcccccatgtgtgacaagggca

SEQ ID NO: 12944 - DNA, 699 bp, Cannabis sativa
ccagacttggatctgatggtaacctgatttgaggtcctatttagaaaaaattagagcactataaagttcatctaaaagttcatcaataacaggcattggaaacttattagtattgtcactctatttagagcgcggtagtccacacaaaattgccacgagccatctttctttctgacaagaagaacgaggctactggtggtgggttgaattattcccaccataagcatgttagacattaacttttcaatataatctttttgagaataagcatagcggtacggtttaacattgattggggttgttttgggctataggataatggcatgctcatgggaacggttcggggtagacctttagacatttcaaacacatcagcaaggatttgagaatattctggtacagtttgacccacattatcggtgtcatggcatgtgtaattgaactctaaaatgatgccttgttgctcaacttgaatctttttcattattttgagagataccaaagacaaatcaaatgaggggtcccctttgattagaaccctttgtttgccaagataaaattctatggtttataacttccagtccacactattcataccaagtgtagctaaccattgcagccctaagatgatatcggcactttccaaaggcaaaggcaagaaatcatcccaaacattaatagcctagaagtgtagattca

SEQ ID NO: 12945 - DNA, 535 bp, Cannabis sativa
tgtaaaaggcattaaacacatatccttataagctatatccaaactacataagtgctctcgtcttatatctaaatttattcatatttcactatagcataattcatactcacttctcagatctcgtatcaaaatctaattgatggccaaacaattaaaagaattaagaatgaatgaaataaaacacacatagaaaaatgagagaagaatcaaatcatattaaaaccataaaaagatgtctaataatatccatcaatactttaacaattgtttatccactcttattcatcgtaacaattcaacacaaatcaattataacataagaagaaaatagagaagaataaattatcaaagaactctgttgaaaagcattctcggtcactttgtttctcttcaactcgtactttctaattgcttcccccaaaagtgtgaaaatctcctcctttttatagtcgaaaaagaaataaaaagatagaaaaatatctcatttttcaaatatagggaggcaggcttcgacactaggcccttagtgtcgcgg

SEQ ID NO: 12946 - DNA, 531 bp, Cannabis sativa
tactgatagcattgatgaggattctctttcccaaaccttcgctgctattccacatatggtaacaactgacatgaataatgagctcaccaagccttttttagccacggaagtcgagagtgctttacattcaatggcccctgataagagccctggcatagatggtatgtcctcaatgttttatcaacaaaattggtccatagtgggagaatcggtcaccactgcagttctaagtgtgttgaatgatggtgttgatccaacaagcctgaataggacgataatcacccttattcccaaaattaaaaatcctcaaagggttcaagattaccgaccaattagtctctgcaatgttgtctccaagctagtcactaaagttcttattggtcgcttcaagaatgtccttccttatgtcatatcagaaacgcagagtgcttttttgcccaatcggttgattacggataacattctcgttgctttcgaacttgttcatgccatcaaaaataaaacaaagggtcgggctggtattgccacttt

SEQ ID NO: 12947 - DNA, 599 bp, Cannabis sativa
gcagtgacccgacgaccgccacatttttcccagtgatgtgcaattagattaagatcccctatcaacatccaagggcacttacgactcacaatcctttgttccagtgcatcccagaacaatttcttctcactttcgtaaggtctcccatagaccgcaaacaacaaccagttaaaccctgttaacgactccaccacttggacttcaaagaccccattactagcattaataacttctaaactctcaccatcaatccataataaagcaaaacctcccccagtgtccactgcggggataacctcaaagtaatggtaccccaacaatcttgctaactccccaatctcatcctcattagttttagtttccattaaaaaataaacactctggtttaaagcgccttacccaagacaaaagcgcttgggttgccgaggttctacgaacaccccgacagttccacgacaggagcctcatggcgatcgggggggcttgctatgggccgcctcctcacccgtcaattggcttgttgtctcatggatagtgatgtcaattaggtccgtatcaaaagcgttaatattcgtacctgaagctttaacattttcgtt

SEQ ID NO: 12948 - DNA, 615 bp, Cannabis sativa
  modified_base (231)..(256): a, c, t, g, unknown or other
taatatagtcaaaaatgaaattacaaatatgatgcagtaaccgaaaacaaacaaattaaaaatggtaatttgcggcataaatatgtaagtaattttcgattgcaaataaatatgtaagtttaattttttgcggtaataatatttaaattatatttttggaactctgtaggtagttgaccattaaatgttaagtcaaaatccacgtatcattttttattggtatatttaaannnnnnnnnnnnnnnnnnnnnnnnnnatttaatgacttggaccaattaaacattgccacatggcaatttacttaatatttaacagttaagtacctcaaaagttctagaattataacttagttattattaccaccaaaaaataaatctaaatattttttgtaactaaaaattaaacttaaatatttatactataaattactcaattaaaataaatactataattgtattctctctaaataaattaaccatatataccaggaaagaaaataaaattataaatgtaaaattaattgtggcttttttttttctcatgcatgcatcttattatataaaccatgttcatttaaagaatataggtgtgtaatatattttttttttaaaaaaa

SEQ ID NO: 12949 - DNA, 511 bp, Cannabis sativa
attaattttttattcattaatatacattttttaaaatattttgcaaacatttaaaattcttattttaattcattactataaaattagctttatccatcggtttataattttcttttattatttcgcatcggtttctaaaatttttggctatgtgggtgttataaaaatgtggaattttaaaagacagtttttaactgttagaaaaagttattttaaatgaatgtttaaaattgttagaaaaatttatttaaaatgattgttataactgttgacaaaaaatattatgtagattaaaaaaatacatataagctagtttatcatatatgaattattatttgaatttcactattttgtattacaataataatataaatttaatataaataaaaaaataaagaaataagaatcataaaatataaatttaaattattatgtttacaacattttcttagcaaaatataaagtatatacaaattatcggtttaatagacaacaaattcttaattcacaa

SEQ ID NO: 12950 - DNA, 531 bp, Cannabis sativa
aaaagtgtcattttcccaagagactcatatgacaatgatagcagacccaaataaaaagtaatatttatacaagcccaagctcaagcccattatgatagctcaagcccaagctctcttatcagctttcttcggttcttctctcactaaaaaccttggaaagaaatatttcttcagttcaaaaaaaaaagtatgatatttttaaaaagaattataaaattaaaagtattacggttaaattaaaattataataataattttgaatattattatatatttttttttatatatatataccattaaaattaaatatttttattaaaaaatatattatttatccctcaaaaaaataaactaattatacaactaaagatataaatgatcaaaattaaaataaatataactaagtttattgcaagtaatattaacttagtctattattatatatgtctaattgtgtaaaatttcctccaaaacaaaagcaataatattttaaaaaaaattaaggtgattttggtaacacttttttaatta

SEQ ID NO: 12951 - DNA, 567 bp, Cannabis sativa
taagctctaaatcacagcatacatacatcataaaattagatttaatccttgttcaaaataagcacacacttgagcaaaaatcaccaaaatctcatacccaagaacttaaatagctaatcataaattcagcttaccatcaaccataaaattcagagtattcaattaaattcatacacaacaacattttaaaatctcatttaagttaccaagaacatactccacaatcttaacaacacaatcatgttataaacatcaagattaaaatcaattctatccacatgcatacaagaccaacaccaacaccttttttatgcttttcaacatctaaatgtcagcagctacttaaatataaacaagggatagaataccttaaaatcctcaataacacaagcaccgaaaattcccacaaatcaagctccaacccaagcaattctcaacaaattaaaaattagaaagatgaatatagagagagggggggtcggttcatagggctgagaaataaatgcaaaataattcattattttgttcaataatcactttgttacaaaatagataaaatagctaaaa

SEQ ID NO: 12952 - DNA, 547 bp, Cannabis sativa
taggctaattaagatttattcttcgaaactttaatacatagtaaatcatacccttaatgtgatagtcagagtcttgtgatctgcaagagaaatgattgggagttgtgctatttcatatcgcttggggaagattaagtgtgatgattttaagactgtgtaggtatgggactacacaattgaagatgacttaaatggattgattggtactacatatatcgacaaagtgcctattattttttagtagcccatcatgaaagaattccatagtttgaagcggagacgttatacctaaacttttgaggctgttaaaaatccacacctaaattattgagattgttagattcaaggaccttcgttcaatttcactaatggacgcttgatgtatatgaaagttcgaggggacataatttggtacgtggacaattttcacattaggcgtctactagtttattaaacgaaagtccttaaatctaataattttaaagaaaagattttatgttaaaattcaaaaagtaaaaaaattataatttgtcataaaaatataaag

SEQ ID NO: 12953 - DNA, 694 bp, Cannabis sativa
ttttacattaaatataaaattatatatcatttttcttatattttcttacctaataacttttgtatctttaagtattttttatttcattgaaaataagaaaaaaaatgaggttgaagaaaatgaaaagaatataatagtgaattgtttgtactttgtagaagagctaaccttcatttctttaaatgttgggatgaattggtgaactaaattttttgtttatttattgggattactgcagatggttttttttttcctcattttcttttttcaatgtgtttacatttgatatttataatgtgacttttttaaattctattaagtttatactcggttttatgagaaaatttgacacttaaaaaaaatattcttttattaaaaacaaattaaacttagtaaagtttggaatatgcataattaatatttgttttattaataaattaattaaaaaaactatattttaattctggaagaaaaaaaaaatattttaaattaactagtgtttctttatttattattaggtatcaatctaaatttcacatcaaaaaaataattaagagttactttgaatataaatgttctacatactctagcattagtagatcgaggtcttttcgaaaggtgtttctacaaagaaaattgtgagggagtaatctcccgacaatattaattacgtgatagccgaaaaatatgaaaa

SEQ ID NO: 12954 - DNA, 859 bp, Cannabis sativa
tagcacctggaatgttgcaaagttgcagcactatcttcccatgtaccaggccaaatctgttctccaaatcactcttgatcccaaccctgttgatactttcatttggggttttcatcaatctggcattctcactgtcaatttagcataccatcttgcttgttcttctgcaaatgttcactgtccctcctcctccgatcctaatccacttaagaattggtggaaaactctctagacactcctcgtccccccaaaaattaagcacttcacttgaaaagcgttcaaccacattttgccttgtgctttaagcctgtttcacaagaatttcctacatgaccccttttgtcatttctgtggaggcagaatagaatcggtaactcatgcacttattgattgtaatagagctcgtactgtttggaagcattcaaagtttaagttttttttcacacagatcatcgaaggcttgatattcaggagttctaccttcaaggcattcacttaatatcaaaagaggatctccctctttttgttagtttaatatggcatatctggaataccataaactctttactgtttcaaaagtcttgtgtttcttacaatgtggaagagtttgtcttaaattatttgcaggagtataaggaggcccaaaaaattcacactgcagctgtttcagcatcaaattcgcgctagcagagttcttcttctatctccacaacaactggcataattcaggatgataacccagctctgtatgtagatgcaacattggatcatgataattgtgtcacaggttttggttttgtttttaagataggcctgaatcaaatcatggcttcatcaatggcccataaaccaggagcat

SEQ ID NO: 12955 - DNA, 536 bp, Cannabis sativa
tttggatgcattggatatgtgcatatcaaacaggacaagttgcagcctagagcaaccaagtgcatgtttatagggtatcctgatgcgattaagggatacaacctatggtgcctagaagaaggtttcaagaaatgcatagtgagcatagatgtgatcttcaatgagaaagtcatggccatgaaaccagaacacaaagctgagacttatactgaggctagaaatgtacaagttgaagtaaggttagaagtaaaggcaagtgacaattgtgaacaggaacatgtcgaagaaacaaatcagactcaagacagctctcttgatacctatcaacttgctagagataggatcagaagagactcaagggcaccagccatgtttggttttgtagactacactgcacatgctttaaccatagccagtgaaattgagaattttgaacctgcaacttatgaagacgctataaattgcaagaacagagacaagtggcttcaggcaattgatgaagaaaaaaaatcactgttgaagaataagacctgaac

SEQ ID NO: 12956 - DNA, 555 bp, Cannabis sativa
  modified_base (317)..(318): a, c, t, g, unknown or other
ataaatattatcttcacctttgtgtaatcgaatggagccaaactattttccgcgcaacaaattaaatgacctcaacctttgtggatttaattaatatgctttaataaagcaaaataaataaataaaatattaaatggattccacccaatttagttaagatttttttatttttttatattttaaagtagtttttattttatatttttatgaaaattaatataagtaataacttaaattgtaactaaaatctagatggcaatctatataaaaggtattagagaaactaacagagcaattcaaaccgtaaatttaaaaannaaattaaaaaaataatatatagagtaatttttctaaatactgtattttaaaaaaaaattatttattaaaaaaaaattaaataacttgactgattccccttaaaaagaagaagaataaaataaataacttgatttaatatatagatttctattcataaaaataattaatttaattcacacatatttatataagtacttataattaatactgagtaatgctaatgacaaatacttattg

SEQ ID NO: 12957 - DNA, 617 bp, Cannabis sativa
tggaatgtaagttagttttagactttgaaggtcttaatagtgcaatcaagaagttaggatttgttttgtgaattaaagaggtctaccatatgcaagacataaatatggctggaaaaaaaatatgttgtattttaaatatgaagtgatgcgataacaagagggttagtataataaaggaagcaatcattgaacatatatgtcggcattatagatttaaacttcaccactatatcgatgtaataccaaagtagacaaaagttagtgtggacgctatctaacctcataatcaagtcaatttgattgaaaggagtaataaaagaccaagcaccataggagagattagcaaagaaaatacaacagagtgatgcaagaaagagactacaaaagaaccaacaacagttacctaggaaaataggaaggcgtgacaagtacaatgaatacatgaataataaataataaaggggagaaatgtagagggaaacttgtgatttaaaaccaaaaaaactgaataaatttcaaagacaaccaactaaaattgtccctaacacaaaaatcgtatgtattttaaaacaaaaataaaaaaagaaaagaagaaagaaacacacaaagaagatgat

SEQ ID NO: 12958 - DNA, 842 bp, Cannabis sativa
tgatatagcggcccctctatataagatagggatactgttaaaggtgtttattggaccacatctaatatttttaagtttatttagattcaatctaattaattttagtaatcgaattgatccaacatccattagatgttaaattggagcagttttatacaatagatatatttcatatatatttattagtttactttggatttatctaatattttagacctattattttttagatcggattagatccatctaatattttaagtctagtatgtattagattggactggatccattcaatccaagaaaaaaaaaattaatgttaattttaatatatacatatagattttacgtataataatataaaatctaattgctcatctaaactaaatgagaatattaatcagtcgattagatgttggatgtattggatttttggacactccatccaccatctgattcgatctaattgaatatttaaaaataacatccaacctgatctgatcacaattggatatctaatatttggcggtcgattataattggatcggtcagttcgattagatcgatttatgcacacccctaaagataaattgagaaatatctattttttgtatacattaatcaaaaataatcatatattatatttcattaaaatatatccacttttgtgaatgagttgcccaatatactcttaccctccacttaagtttagcacataatttatattaatgtaaggggtataataagaacatcatctataaaaataagtatatcttaaaaaatatagaaataatcataaaaattaaaataaaaacataaactaagcatataatataatttcttct

SEQ ID NO: 12959 - DNA, 532 bp, Cannabis sativa
ctgaagacaacgttaaggtgatcacggagatcgctcctatgaacttggtatcgccctcctcgcagtgtttccaccaaacctgacctggtgtacttgctgggagtacgactttgcgaagacgaagagccggactcaatgtcattctcttcgtctcgcggttggggtctgctgcaaggattacatcgctctggatctatctccgtttgcgcctcgcggttaaagttccttgcagattgatttctcgacattggctaattcaaatcgagcccttcctgatctgtccttcattccctacgagtacggttatttggacgtctagaattgttacctgggggttatcaggttatcaaagctggtagcgggcactcgaggaggacgtcgggtcctattccgtgcatcgatctcggcctacaaagcacgtatttgatcctgtattgccgtatactgatcagtggttagttaaacgatgccctcggatgctattgcaggcgtaataggtggaaaatgtcccgtcgtagccgccggtgtggat

SEQ ID NO: 12960 - DNA, 529 bp, Cannabis sativa
  modified_base (271)..(272): a, c, t, g, unknown or other
tttattttattgtcttccaatattcttttcatggattaaactgatacctactgataacttccactcaacaacatatgtctagtctaatgcataccagagcatatatgagacctctcattgttgatgcttaaaaaattctttctttgacctttatcttttcttgaatgattataattgttccttagataaataaaatctatatctaggagccaaaagacttctttataattagccattaaaaaaatattttagcatcttactaaagtaagtnncttgcactagagtaagtaaaataccaaacataccataagccatatgtttacataatttcaaacttatgatactaggatcggaaaattttgttaagtccattaaatagattgacacttctcatttatttttcaccatataatgttccttttcaaatttataaaatgcatatattgttccttcgacttatctagaattaaaaaaaataaatgttcccaaatattaaagtcatatattgttataacttatcttatattat

SEQ ID NO: 12961 - DNA, 665 bp, Cannabis sativa
cttgatttttaattaatgtaattttctctttttttttattaaataaataaatataattttttcctattataattattttaattaaaaattaaatttagggttgtgataccaaaattaaatgataattattggctaatgatgatttttatttttaaattttgacttgtaccaaattgtactttctaaattttttaggtcgttaaaaattcttatcggattattgaaaatattgaatttaaagatttttgaccaatttccttcagctatactaacggaagccagaaatagatgaaagttcagaagacacagtttgatacatgtaaaagttcaggagacacgatttagtagatatctaagtgtgcctcttgaatctaataatctcaataattctaaaaaaatatttaataatcttaaaaattcgaaacataatttaaaatatatcatcatttttcatgaaaaaattttaataatataaatatggaaagttttaaataaatattgtatatatatatttgataaagcaatattacaacatactgccaaagaatagaatatagttggctttaataatcggcaaggaacaaatgttcttttggttagagcaccatcacttaattataacatcattaaaaggtgttcactttttataattattattattatta

SEQ ID NO: 12962 - DNA, 817 bp, Cannabis sativa
attgaacttgctcttactggccctgaatagttgtttttaaaaatttagttttttttttagttttaccccaaaaaaaaataataataataataatattataaaaaatacttttatttggctaaataaataaatatacagtttaaataaaaaaaattacacaaatacctcttacacacctttaacttaggatttgtacttcctaggcaaccttcagacaaccacgcagcaacccaacgcaaccgaagcgaaaattcaataagaaagagaactacaattattaattccagcgacttcacctgaaaagacaaccagaatcaataaaaccggagctgttttaaatttatgaagaaaaaaaaaagtgtaaaaaaactactacgaaactaaaattcaaccaaaaattcagtttaattcgcataaaactaatgtcttgactttaattttcaaatcccaaacaatccaactcaaatataattcaaaaaaaaaaatacatcaatattatagtaaatgtttatcctagtgtattttcgttgttttccaaatttctcatggtgaatttgtttatattaattcacgaagagacatgtagatagagttacatacatggaaacactgttctgatttttaatgtttcataacagttgcattacagttttataaacattttgctaatagttatttctccacatattactattaaggtacaagtaattatcgatcaatgacaaaaaaaatactgacaaatagtttcttacatatacacatcacccttatcaccctgcaaccaaaggtgaccaaaaacagaccatctacatgctca

SEQ ID NO: 12963 - DNA, 518 bp, Cannabis sativa
aaataaataaataaataatcaacctcaatttttcattaattaattcctctccaaattaattaattaaataaaaaaacatttattttttattatattaattattaatttcggtttgtgtgtgtgtgaatatgacatgagactttttcacaaatattttatttagtttttgaacaagaaaaagaaacaatagtgcactctctagcttaattcttttgtacattaattctcttttcattttttgaaaaaaaaaaaaacaaaacataaaattcttctatcaaaaaattgcttccttagaattatcacctatgcttattaattacaattataagaaagttttttttttttttttttacattatcatggttaataaaaattataaaaaattactaattaattctaaagtgtaattttatagtagtgttttatagcaatgctcttataattaattaacatgaacattttgattggacaccccagtacctcttataggtggtattctacaattagttaacgatatt

SEQ ID NO: 12964 - DNA, 851 bp, Cannabis sativa
atcccacccatgaaacacctttactaacatctcatccactttattattttttagtttattctcaataagagcaccaacccctactttattaagcttcaacaaactaaggatatcaccctgcttatcccttttattcataccccgaacattccaactaagtatgttggtgcaatccatcttcaccctcgaaagataagttacacttttcaacatccttcccatgttcctgcagaatcttgaaagtgttttgaaccgaagcttgctcaatcacttcaagagatcttatcacttttgaatttccaactttctttggggtcttccactcattaacacaatcccggtttggagtagtaattccagattcaacaccctttttcccctccttagtatcaatcttcttcacagttcccataaagtcattatcttcagcaggaactaaattttctcccaccgaatcaaccacatcagtaggatgagtatcctccactttcttctcaagttgctggtgtttcttagtccaaactttcggaccataaacaatcaccgaattttgtatatgtcaaaatttaagagaggagtatgatttagtacataaacaatcaccgaattcgtaaaactaaataaaattggacaaaaatccttaaacccaacaatctcaataatttcataaaaaaatttaactattagaagaaaccaacaatcaactcacttgttttgattttttttttcttcttttgtaagtatatattaatttggtctaaggcccaacaaatctcctcatctgacccgctctgtaattctcactatacactatgcatattttttcaagtgtaattctttcctctcataga

SEQ ID NO: 12965 - DNA, 510 bp, Cannabis sativa
ttagactcaactaaatgacactgaatagaagtgtttgacagattattgaagctatcatcaccaagaaggtatagaccatccttaagcttccctttgacaagaactgctcttgtttgtttatccttgacaaaacaacaagttttatagaattcaagaaagacattattatcattagtaatcttggaaatattaatgagatttttagtgatagaaggaacttgtaaaacagagtttaagtgtaaaaaggaagggtgtttatcaggcagaaaggattttaccaatatgagatataacaagtttcttactatttcctatagcaattgcttcctggccagagtaaggtacttcactattgagacaagccttattgtaaaaaaatgtgatgagtaactcctatatatccacataccaaccttgataatctccaaagttaggaacagtttcagcaacaaaggcaacatgctcataatcaagaaattacccagcaagatgagcttggggttgggaatt

SEQ ID NO: 12966 - DNA, 526 bp, Cannabis sativa
actatctctcttcaatttccttctctttccttgcgtttcttctcccctaaggttttatttgcaaatcttttgcatttaatactgtctgttcatatctattttcatcatttcactcttggagattggaaaatgggggcggaggcttctttggctgatgaaatctactccaatttcatcattgcgcctcttcgaatgggggctagggatgtgaccagagtttattcgagaaagcatctacgggggctttggtttttcctttatatagttaaattgaggtatggtccttttcatcttcctctttctttgctttatttctgggttgagttatttttctctgtgtttgtctggtttgttttgtctactaccatggatgagtttcttaatagtgtttcaagtgctttagtttttcctcctgatgaaaacaccattttcacctatgatgctagttcctcttcctctactcccactaccattagtctccttttaaaactacacactattcgaccttataataggccatctttga

SEQ ID NO: 12967 - DNA, 546 bp, Cannabis sativa
ttgggatttgttcgattttaaaatgattaaaattttccaagttcttttgaaccttttctaaatattttgctatttttaatccttttgctttgtactctcccaggacttgatttacaatcaattgtgagtcactaaagcacgtaacattttgacctttagtgcttcagctattctaaaacctgccaataaggcctcatactctacctcgttatttgaggtatcaaatcagaatatcaacgcatagtggaattcaaagttgttaggctacatcattataactcctgccccgagccattctcatttgaagccccatctacatataatttccatgtttctgtttcgcgttcaacagctgggtcttcttctgagtttattccttcaattagaaagtcagccaaagcttgacctttgattgatgttctcaggttgtaggttatgtaaaattgtcctgattcaatcgaccattttatcaatctttgtgaagcatcaggttttgataaaacttgccttagtggttggtttgttaatactttaattgggtgtgcc

SEQ ID NO: 12968 - DNA, 596 bp, Cannabis sativa
  modified_base (504)..(516): a, c, t, g, unknown or other
ttctaagctacaagatgagaatggtgcttgatttacatgagatgatggtcttcctcagttagtgcaggagtatttccaagatctttttactgtcttggatgcaaagtggggtaattatatataaaatttactaattaataaaagatcataagtcatttaatgttacatgattcacatgatttatttcatgattatatgattaatgtataaattctatgaattcaaaacatatagttattcatgattatagtgttgtctacacattggaacataatcatgattatatgtttcaagaatttatgtcccatgatttgtcaatacactgatttacactgacatgataattagcgataaagtttacttacaccttggataaatgttatgtcctttccaaaacattggtaaagtatgctagtatcggatgtatgaagtatacatctgactggaccgatattgaacttagaaaatatattataaactatcgttgtatctttctaagtcaannnnnnnnnnnnnatcttagatcaaaagatcttaatcatgatatggttatgttctatcttaagagtattatttgtgctattagagttgttcgt

SEQ ID NO: 12969 - DNA, 631 bp, Cannabis sativa
taatttataaataatataacacaactacacaagtgtatattttatatttttcaatttaattcaatcagtacaagtgaagattcacagtttgcagatttgattagatttaattagatttaattgtatgaattagatattgtacaaagagtcgtatgttagaccttttgtttaagcttacgttaatttttataggttttaataaaatataggttgattggatagttctctaatgtgttagcctatatttttagtgagaaatagttaatgagcttaaaatctatgtgtgtaaagtctggttaaagtagaagtgtggatttttttagttaattgaagtattttgatgagtaagctcaatccaactagggttatgtaattaactcccctttccaactctatacatacatattatctcatcacaattgtatactttttgataattagataaaataaaaatatttatgatttagagatctaagaagaaagagttagctgatagtattacactatcaaattgatataattactataaatcaataaaatatgtatacgtaattattgaataattattattgtgttttagattatatagttttcttgattttctaatatggtagggtcttgaagatgacaa

SEQ ID NO: 12970 - DNA, 1003 bp, Cannabis sativa
ttacctcaatcagccatgggaaagtgaaatttgaaagacaaccctcctagctctacctcactttttgctaccaaatagaaatcagttggtgaatcaacgaagaagaggaaatccaaacgttctcgacctctagtgtaagattctgactcagactatgaccaagagaatgaatatttagagatgcccaaagttcataagataatttagttaattttgtgttttttcaaggtttttatttcctttatttttatttatagatatctatgtttgggttttccaattgttcaatgtttagtgtcttatttttttatatgtgtttgactatttaggattgaatatatatattttattgttacttgtttatgtttttttattattttatgattgttttaagtttgttttcttacatttttttatcatgtttttcaaatattctagttctgctttattttaaaaaatgtttgtattatttaataaaaaatcaatctctattaatccaatcattaatatttgaattcaatgtagtatctaattagtcgaaaagtcatataaagtatgtaaacacatcattaacattaatttttaatagtaatagaaaaataataaaatttgtatgtaagttcttttctttagtatcttatactccaatacatgttcaattttcctcagttgttttaatgttattttttagttattctggttcttttcattgttgatgtcttctcctgcatgttctcttgttgtgcccttgctcctcacatttgctgcatttgttaagttgtttctttttctagccagcttctatcctctttttttttttgggtcttccaaatttcaccatttcaatgggaggcaagactattacgtctttcacattttgtggtacatcctactcactttggtgtcccattgtgtacattgttcattaataaatcgctagccaattttttgtagtgtagtaatctgaacggagcttgtatagtaacctgttgcatgtacatgt

SEQ ID NO: 12971 - DNA, 555 bp, Cannabis sativa
atattcaataggagcatcatttataggtgccaaaagtacggatatcatcatagaatattgttcttttattttttttattcacataagatttgacatattttttaataattagtaattttccccctaaatttattgtactatcaagttgtgtcccatatataagttatttgatctaatttgtacaacggttatgaaacaagaacactccccacatttcacatattttatcgaatatgtgagaaatagcatgcaaccgcttttattttaaataaaatatatgtcctatttcacttagtttttattttttgtcacatatagttgtcgagacacttaattgtttgatgtaatgtcctcaagaaatttgtcaacttttggatgcatgccttaggtccatatttctcaaataacatactaattgtatttatgagattatgagcacgagcaaaagcttaagcaagttaagcctatcattattaataatgtcaataccagaaatattcttaaatactttggcaagcttaacatcttcaattatatattagaaatatgttgtct

SEQ ID NO: 12972 - DNA, 635 bp, Cannabis sativa
gggctctacattgggcctatatcggacctacgtcttcaaccttaatccctttccaacaacataatgcattaggcctacattggacctgcatcggaccaggctaaaaacccaaattgttctccaaaatacagatctgaccaatccaaccctaaatctaacccaaactcaaaaaacacaaaggtttaaccctaaatctcaataaatctatcaataatttcatacattttaaccctaaatcatgcaaaaataaaatgcatttaaataaatagacaaaaggaaaagaaatcttacctttgatgacattgtcgtggtcagagaagtcatggtcagtcaactttattgggtctgttcagagagcgagagagaatggaccgagggggcgccggtggtgggtggtgggtcgagcttgttggtcagttcagagagcgagagagagaatggaggaagagagagggtcgggtgtgttgaaatgagaggaatagtttggattttatgaaatgttaacctattctataaatttagatacagttaggtttagtgtaccaattttagcccaataaatgcattaaaattcaaatttcccaaaaaatatttggatggtggggactgattctgatattttagaaatatttagg

SEQ ID NO: 12973 - DNA, 557 bp, Cannabis sativa
atatactagataaataaatgctatatagtacaaaattaatccaatctagtccaatcttaactaataattcaatttaatttaatctagtccagcatatttttataactatacctgaaatacaatacgtatcataaataaaacgcaatagttcaaacaacaaatgcaacgtatgcaagtttttttatcacgcttacattgcatatgcctctcaagaattaaaatctcatattaaaatttagtgtctcatactgtgttaaatctatcaaagtttgacacatcaactaatctaatttatattaaatatgataactacttttattgactttattagaggtttaatttttttataaataaaaaattaatgaatgtgttaaatttttattgactttattagaggtttaatttttttataaataaaaaattaatgaatgtgttaaattttgattggtgaacacaatataggacaccactttttaacaagagatcttgaaaaacaaaaaaaggttcatttccaacccttgctcttaattgtataacgaggacacagtgaaatatta

SEQ ID NO: 12974 - DNA, 781 bp, Cannabis sativa
taattttgttaaaataaatagaaagacagtttcatagcttttaatttataattaggttatgtaactatgcttcgcgcagttgttataataattgatttaaaataaaatagtttaattatggcacagtcgttatgataattgatttaaaataatagtttaattgtgattatttaaatttaaaatattttatattgttagtataaaaaaatatgctttatatagttgctattaattttattaataaatgttatgataaaaacaatataatgatttgttgtttaataattattttttttattttaaataaataattatttttagtaattatatatttctttaaatatacataaaatatatatgagaaatcactaatattagataagtttgtaattcatgattttatacataaaacataatttaaataatattttgaaatacttctttgtaaataatattttttatgaaggttctatcttctatctcatcctcctcctttaatataatcaattcttctcttgtagtgattcgagagatagcaacatataattgaccatggataaatactcacttagaaaaatataacccaacatgttgaagagattgtccttgacttttatttattgtcatagcaaaatatgatgctaaaggaagttgtcatttattaagcttgaatggtcatttcgattcattgggagacatgataatttttggaattgtgacattttcatcgatatttgttttagaaataatatcaactctaataaactatttttcaagatgt

SEQ ID NO: 12975 - DNA, 505 bp, Cannabis sativa
  modified_base (273)..(273): a, c, t, g, unknown or other
  modified_base (360)..(370): a, c, t, g, unknown or other
atatatatctcttaataatttatatataagtacctatatatagagagtagcagtcggccaaaaagaattctatttcttatcttttaggctaattagaatttttacccctgaactttgacatgtaccaaatcatacccctgaacttttaaggtcgttaaaaatgccccctgaacaattgagattgttggatttaaggatatttttccaattttagtaaaaaagtctaacattgatgaaagttcatcaggggctataatttagtacatgtcaaanttcgagggacatgatttggtagatatcaaaatctggaaaacatagtttatagtacatgaacaatcaatgaaatagtaaaattgaatnnnnnnnnnnnaaagtccttaaatctaacaatttcctaattcaaggagtattttaaacgaccttaaaaatttagaagacataatttagtacctctcaaagaaagcaaaaatcctatttacccttttatttttatatagaaaaattt

SEQ ID NO: 12976 - DNA, 531 bp, Cannabis sativa
tcttaaaataatatatattataagttacatttgtaatgcattttactaaaatataggtctactattgcaatttttaactacttcggtatctataagaattttttagtttaattttttataatcatatatgttatagttaattaagatattttgtaaaaatttaaaataatttataatataaaaattgatgttacaatttatttcacatgcgtataaaataataaagtcacgcgtgtaacagactcattgaatcttgttttcaatatgttaaattttctaaattttatgaaattttatcaaatatcttaaacaattataatgtatacgattataaaagaacattgaactaaatagggaaataaataaaaatatataggtgtacttattttaaagagatgtaaataataaaattctctaatattatatatgtgtcatgtaatgactaaaatgtagaaaagtaataaaataacattttatatagaaagagaataaaataacagaataaattggattaataaactcaccatgtat

SEQ ID NO: 12977 - DNA, 583 bp, Cannabis sativa
attactgtgcacacctctactaattaaaagatttttcagaaattgtgtcaaatttaaacttttgattaatctttaaacctttataaatatacaatcgtacataagagtctagatcacgtctttaaaagtttataataatattcaaactgcattttataagcatgtcacacctcgactataaaataaaggtacaagtcgttccgagaccgaactctccagatctaaccatcttgatatgtacaatcatcctcaagccctagactcattagtcctcagctttcgccttccttttacttacacatgtaaacaataactttgagtcgacagactcagtaagaaaagcacaaaatatataacataatatcgacttgtatctaggcacccatacacctacttacaaggcttcggatgcattaagaacgttcttaatggaagtaagacctatataccacgtgcactaagtactcgtcacgtactagtgttggtaggaatgaaccgcatcttaagtaccactgagtgttgtaccacatgcactctgcactcgtcttatactaatattggtaacactatgttataccctttt

SEQ ID NO: 12978 - DNA, 771 bp, Cannabis sativa
gaaaagggtaaatttcactagaaaaacacaaaatataaaattaaacagcaattttcagcaacttcaaataataatacatatatatagatagatagataaattactttaatcaaagactatacaagaaataaataaaataaaagtccttataagttatagcaaccataataataacaaaaaaaatagagtagctccagaaggcatgttttagtaaactcttatgattaaacctaaactggatgtcatcatccttgcaaatgttttattcaaaaccaaagaaaattgttatttcaaacaaatttgtctatgtatcaaagcccaataattaaattaccacttgttgaatgggaaaagtatgttacaacttacaacacaacttagtatcatttccaataggccgcataattaagaggtcctaggttcaaacttgaggccgccaccttacctcttcccctcactgtcctcaccactgagctagcctcagtctctatccttcttattaaaatggtacagaaactgtatttgtacagacaaaacattgaaacctagggctccataataactaaatattaggtttaatcctttgttattaaaaccccccaaaagtgccgttctatataaatataatattaaaaaaacaaatgtcattttgatcaaacttcttactgaataattttttttttcttatacagcagcagaacaattacaagaatagagatgctgacatattcatataactctccatataataaacacaagtgatcagcatct

SEQ ID NO: 12979 - DNA, 628 bp, Cannabis sativa
tgaagagtatcgagagaatagtggcctcttggatgctttgttgacggaggctcaagctctatctcgcaacgaaaaatctaagcgcaaagcatcagttttgccggcaactgcaaaatccaaacgtgcttcgtcagaaaatgaggaccgagaagttcacaccgttggatcagaatcggttttcaagtatagctgtgagactggaagtaccggcgatgagaatggacggacggaaaattttagtacttcttgccattcctcagttggtaagttataaaaaaaaaaatatcaatcagattgatttatcaaattcaacatattttattattgtgtaattaagtaacgggtacgtgttaatcgattgattaggtttttttttccttattataataatatgaataattataattaatatttggttttgtacagggatagaacaaaaggaggagccagtggatgtaaactccatggatgatgacctaatcagcttgctcaacaactttccgacatcgatgccggttccagattggtacggtggatcaggtgaccgaaaccattgtaataataagaaggaaaaatcgagcgtaacaagtagctttacaaggagggttgatgaagacgacgtggtgtt

SEQ ID NO: 12980 - DNA, 655 bp, Cannabis sativa
caatatatatttcaaatataaataaaaatttattgtaaattacaaaattattttttaaaaaaaataataaataatgagcacgacccatgtggtgcctactgctatggctggcaattttaaagatttcaagtaggcactacacctgtggtgccatttgttcaggcagttggcatgatgttatttgtggcaccagtttttatgttttggcacgactaaaatggcacgacaaatcgtgccaatataatgatgggcactaaaaaataagtttgttggcactaatttaatcgtaccaatacccttttattcttgtagtgaatgctcactagtgactcaccattatagcactccatcacaattcggtccgacgataacttagctttcatttcagcttcaaacggtctagcgttgaaattcaaacaagtaactaaagcaaactccaatcgactaaatctacatattttctttccaatatgaaagtggactttctatgattttttagtgctaaaattgtgcaacattagttgatggatcaatgcacccaagaattttaatggctccaccataaagaactgtttgaaaggggattccttcaccctctctattaacttttgtgccataaatttctcttttatctttcctacgtactagttcccac

SEQ ID NO: 12981 - DNA, 566 bp, Cannabis sativa
atactttgttctcttctctgcagggactaccgtggattgtaaaaaagacttggctgtcaggattttgtaaaaaaaaatctttttgaaaaataaaattgtgttttaaagtcccttttgttttttatgtttaaaaatagaaaataaaagtgtgttttataaaaattattatttgattttatttaagttgggtttaagtttggggctaagtccgaatcaggggccaggttcggtgtgctggggccgagtttgggaccggtccgggtttagtcggaattcaaaatattgattcagacaaaaaaaactatttaaaaaaatatcaaaagtgactttctttgtgttttcaaaattttaatttttaattaaaaaattaaaaagtggaaaaggtttatagaatataattttagaaaatatttttactttttttttttattttataaataaaaaactgattaaatttttttttactatgctaccataataaagttgtgaattgtgatttatatcgattttgtgtttactatctagtacttaggtcttaaatccttttaagtttcaaatcttttatt

SEQ ID NO: 12982 - DNA, 651 bp, Cannabis sativa
  modified_base (308)..(309): a, c, t, g, unknown or other
caatctcttggacttcggcgtccccctcatgatcctcctcctcctcctagacgggtggatcttgttcggagctgggtaaggtggcaagctgggccacgtggggatcagatgcattgaccttacgcatcgtctgctttgttcgagccatcatcctgtggctggacggaaagcttaaattggaaaatccgtcacttgaagaggacgaactggcacaaagacgagggtgatcctcgtacaaaagttgaagcaagtcctggtcaattcggtgttcgcttcccaaaactcatcagggttcatctacaaaaggnnacacacaagatgagtgtttggtcaggatatcgaataataaacaggcaaatatgcagacggagtactcaacagattaaagaattaaagcattccacaataagtcgaagcccagaagtttgaaatttttgggtttagggaaaagtttcacgaagctttgaataagcaaggtgaaagatagacaaggtacgatcaaagaccaacgtcatgaatcgtgaagtttcacagattcttacaaagaaaattgcaaagttttaaacctaggttttctacctattttctacagcaagatcaagaacacatatctaaaacccaaaaactaaacatgcaaagtgaaagaggaag

SEQ ID NO: 12983 - DNA, 664 bp, Cannabis sativa
ttggtaaatagcggcaaaattctcaaaattttcatttttgtttcacttaatctcaaaaccaaaatttaagcggtaaaacccgcaatattcgcattctgttagcaatttaatattttcatccattttaagtgttaagtatcatgttggactgtccacgtgtgcatctacgtggatacaatgtacacatgacacaattttattggattacgtaaaaaattatttaaaaaattaatttaaattaaaaaaaattgtaaataaaaaaatattttttctttttttttctctctttattttcttttttccttcttgtctgctcattttctcgatatcccctctctctcgctctatctctctctctctctcaatctcctctatttgtctctctcagtcgttttcaaaacccggcagccaccccagcagttctctaaccaccctaagtctctctctcaatctcgatctcgtctctctctctccctttagtcccgaggatggaatctggttcacaacaacagtaaaatcgctgtgctcgattccttgggcaatttaagttcatctgatgattttacatttatatgagcagactatggtggcaacgctcaaagaagattaaagatcgattatgatggaaatctaaggtaacacactcgacgtaattcgagcgaga

SEQ ID NO: 12984 - DNA, 740 bp, Cannabis sativa
cgagaatgttaatgaaataaattgagaaaattacataatgcattattttttttaatgcgttagtttatatttagccaaaaaaaaaatgcattactttataaatagggagaaattacataatccaaataaatattagcaagaatgaaagataaaaataaataaatgacacgagaaattttatggtggtgtggtcgcaagtagtaatgatctatttcactgtagttttactaggagagacatgatttaattttccaaaaaaaaaaaaaaaaaaagatagacatgatttagagatcaaaaaaattgattttttcaaagaaaatctagaatgcataatgatccttagagctaattttttttttttaaaatatagaaactttaaaaatttaaaaaatcgtactaaaaacacgttacaacagatgttttaaattcttttattttaaaattaggtacaatagtcgctcttatgtggtgcttttaaatatttatttttatgagttactttagatattttatttttaaattatttattaattatattttatattttttgagttataatttatgagtaaaatatttttaaaatctaaaataaaaatagaaatctaaattttaaattttaaaatatttattatgaaatgacttgaatatttttaattgatatttgttatgaaattaaatttatacatcataaatattttaataatatctattaaatttaattaattgggataatttttttt

SEQ ID NO: 12985 - DNA, 782 bp, Cannabis sativa
ttgtagcctccaacttcgaaagaagaactattgtagtttccccttgactttgatagcgagctgaaggagtcaactttcatcaaatagtgagctggaggaacatatcttatgcaccttgaaaattctacaaaacaataagagaattgctaaaaggtactactggtgactagcatttttctcggtgctataccgttattaatgaaattaaatatcgagtctcatataacttaataaaataatttttaggtaatatcgctatacgaactattggtgcccaataggaatgctaaaacaacaaatatgtagttattatatcattctttaatatgctagttattactttacaataaaaatatataatcagaaataaaataaaacccaattttaattgtgtcaaccaatgttggataatataaaaagacaacttcatatatttaagatatatatattttagggttaaactctcaagttgaacataacaaaacaatcatatacaagtttaaaatcgttttcttagattaatgaaaaaccctaattaaaaaagtatgacacacacaaagaaagaaagaaaactataataattggtaccaagaaaagagattgagttgaataaaaaagaaaaaggaagaaccttgaggttggttggggcaatgcttcatcacttccactgccgttggagacacacccaccattatgaacaaaatgatatggaattcaaaggggatgatatgacggcaaggttacttatattcaaatgtttaaaattttaaatttaaaaaaaa

SEQ ID NO: 12986 - DNA, 775 bp, Cannabis sativa
  modified_base (381)..(394): a, c, t, g, unknown or other
gcaatcatctttggtagttaagtaacatgtcccatataacttaagataaaataagatttagggaatatcgctaaccaatcatagattaccacttatgaaaggtgttgggcactggtgcccaataacaatgctctttagttataattatgtgatacttgacattaaaattatcatttaaaaaaaatgtaaagtagccttttgttaaaaattaattaatatttttaataaaaaatttaaacgtggtaaaaataattaaaatattatttcaagtatcacgtacaaccgattcttttattgttattattattattatatcttaattttttttgaaaaaaaaataaaaaatgtacacattagagttatcatttttatattattatnnnnnnnnnnnnnntttttttaaaaaaaaagccaaaaatgtgttaaggtatatatattgattgatattttatgtatgtatataaacgaaatttatgattaattatatttgatttaagttttaatattttttttttggaatttaatttttattttgtaactttttttaaaaaatattttatatttttataaaaaaaatattaaaataagtcaaatatcgatttgtagatttatgtttttttttttaaaaaaaaaatattaaaataatagtaaaatatcaatttgtagatttatggagagaaaaatagttttagaggaattttaaaatgtcattatatatattgatatatacatatatgatgttttcttaatgggtaatacgcattgatgagtacta

SEQ ID NO: 12987 - DNA, 608 bp, Cannabis sativa
  modified_base (183)..(199): a, c, t, g, unknown or other
accaaaaaattctttaacaaaaaaaggcctcaaatctatttcttaaaatcactatattttgtatttttactacttttattaaaaaactataattattttctaaaacaaatacttaatttatgttttaagatactacatttgatttttattaaaaaaaaaatatttaattatatttttagaaannnnnnnnnnnnnnnnntattattatatatagaaaaaaaaaatataaaattttcatataaaaaaagtcccgttaaatttttggctcaagaccccaattagcttgagacgggtcaaatgcttgtgctactaatcactattttaaactttatttttaacaatataaattatttataattttttaaaaactggtaaaatatatattataactataatatacaatgtcatataaaaaaattcgataaatttctctatttgccaaatataaaaatccgcccctaattaagaatgaagcaaagtaacaaaattgcatatttatgtttattttgaatatgtttagcttaatcaaaacataatatatatatatatttttctaattaaatgtaaattggaattattactgcaggcatttccaaaagagtctccat

SEQ ID NO: 12988 - DNA, 581 bp, Cannabis sativa
actcctctaacatagggttagtgtctagtgatttagtgttatgctgttttgttactttgggttatgttttttaataaggtgtcccattcgttggcgcatacttgcataatatacacatactaattttccttccaaaatacactataaatcatataaacgggcacatgcttgcataatatacacaaatccaacaaaatttcactgatgaaaagaagtactagtttatttttgcttttgttgtgcaccacaacgaatgaaaacaagcttcatttttcaagtgcactaaacacttgaaaagttgtttattaaaatcaccattttattgtgttgaaacttcaaagaaccaagaggatataagttaaacatttcaacagaatttgtatctccataactcaaacaaatctcaaaacttagttactctagccgactctattcaacctcaatcaaacagcattaggcattcaaattatttagtttcggatctaatgtaaaaattgcttgaaaccaaaaactggaataaaatgataccacataaattgagatggagctacttgagttggcgatctttaatggctacacgt

SEQ ID NO: 12989 - DNA, 766 bp, Cannabis sativa
acctatagtattgacccgcaaaatgatactgtacattacctttgagacttagatagcaacactatatttatttattttttctttttgatatataattttttattattttttaatataattttgacacattaaatctattctgattaaaaaaaatatatatattcaaattatataatctttttattatattcttctttaacaaaaggattagaaaccaaattgtaccaaaaaaaaaattgaaacggagttaatgattcaacaaagttcaatacaaaaaaatctaaaatataacctccaaactaacattttataacaaaattcaacttatacaacacaaaaattccagatcagttaaatataaatctaacacatttagaaaaaaaaaaaataaaaatctgaacaaaaaaattacaaacacggccagcataaaccaggagcccagacttatcaacattcaaacatcgagatccacaaaacctgccatcgtagaccaggaacaaaaaccactagcgttcgaatgacaaaaacaacaaaccccaccaccatggaccacaaacaaagtttaaacaactagatccacaaagaccttcaaagacaatccacatgaaaaaataagagtcggggagagattttaacccaaaaaaaatatatatgttgagggagacaaaaggaaaccatgggtgtttggaggcaaagaagtcgctgatggagtaagggagacgagagcttccgtctggcttcatagagggttgaacacgaatgaccg

SEQ ID NO: 12990 - DNA, 510 bp, Cannabis sativa
gatacgaaaagtaaaaggctatattaagagttattataaaggttaattttataaaattagtagtaagtaattaaggagtgctagttcttactctagaattataaagggattaattatatatataatttactactttttgtaaatattgtatatttttacgtttaaataatttttttatagtattctataaaacaacaccaaaacaataagaaaattatttaaaaataacatcaaaacaacaacattaaataacaaaaaattaataagagtataacataaaaaactgtattttttataaataaaatcataataatcgtaaaaatatttaaaatttcgtacaaccgtatttttgtattttgtgtatttgtgaaataattcttactataaatgatcctaaacaatgaataattatagtagatttacattttaatttttttttgaatatataattatagtattttattattacccctactatacatgactaaatataaatgtgttgacccccta

SEQ ID NO: 12991 - DNA, 532 bp, Cannabis sativa
agtagaagtggtattagtggcagtagatttggtgttgaagacatgaggtgatgtgttttgaggaaggtgattcatgtggttgagagcatcagaggtgggtaagttattagtgacacaagagccaggctgagcagattgaggaatgtgatgagatgaagataaatggccagtatttagtgcaatttgtggaggggtaaagatagcaggttggtgagaaccaggggaaggagattggagactggtatttgctaaagattgcaggatgtggtcaggggtgtgaatgttgggctggccatggtgtgaatgttgtgcaggaatggttcgtgaagattctccatgatagagaattcttggctgtggagggacacgggaagagggattgggcagtgatgaagtaagggtgtttcttgccaatcgtgtgaggaacggccacgcattggccttagaaaagtcggtgcgatatctgtcataactatttgttgggagttttgaacctttcatccaaggaccatattgaaagtcatcatcgttg

SEQ ID NO: 12992 - DNA, 1270 bp, Cannabis sativa
taaggtaattgcttgtacccttgccgctctggttatcctaaggactagttcacctaaactgttttcaccatatttgattttactttttttttttaattttcacaaaaagtttttttggaaaaaaaaaaaaagatcatatttgtaaattttaccaaataaaaccataaaattaaaaatttcccattttaataaaaagatgcatatttttaagttttaatcttttcaaaagtacaatcaaccaaaaatatactgcatataataatttatattgttctattgaaaataatacttttaaatttttaaaaactaaaaaaatcttaaagcccttttccaaaaaaaacaaaaaaatcttaaagcccactgtggaaaagatttagagtaagttaaggagaacgaagagctacaagccttcaaaattgatctcaataacatagggctaaagaaatgacataaatagattaattaagtaaatatgtcttttttcaaaaatttagcaaaatgactaatataacaaaactaaatatattatatgataattaattatatatttatatatatgttgtgtatcacgatatatttgatacctgatacggtaacataaaaaatcaatgtactataataataaatttgtattctataatttttttaacaaaactaaaattcgtatattattacttaataatacatataatattaacaaaattatatataccgttattaaaatatatatataggatgccaaaaatatttatatattcattatatgtaatgaaatagaaactaaatatcatattaaataaataatatactatatgttgtctatattgttttatcaaattacgtaacaaatagagaatagactacgcgtctatagggcccacaaaaacatcatgacagatcaatattacatgttaaccttaaaaacattctaaaagcacgggagcatatgagggtgcacaacaattctaaaatgattgttgaaactaagctagtgttagagtttatgccctaaaagtaaatttttattggataatatgttagttaatatatgagatgcaagtataagataaatgaatatgttaattatagaaatataattcataaatatatgaaaattctatattcatatagagaatgtatgatcatgtaagaaagtacaagaaaattaagatcatacaacatgaataaaataagttagtagtgtactaaaatatggaatctttaatatgaaattaccgagtacagtttactaagcactgtactctagtat

SEQ ID NO: 12993 - DNA, 581 bp, Cannabis sativa
tagggttaataactctttatcatcgtcatcacaactgggatgtgatgatggtgatcgtcgtcatcatcttggttttgactcagatgatgatgacaagaccgatattaacatccctgtgattagtctggaggatgcgttctcctcagacaaagcccttagagaggctactatggctgcgatttcgagcgcttgccatgagtggggtttttttcagttagtgaaccacggcgtgagccccgagctgatgaaacaagctaggaacacgtggagagagttctttggccagcctgtcgaggaaaagcagcggtacgctaattctccgagcacctacgaagggtacggaagccggcttggggtggagaaaggtgccacccttgattggagtgactatttctttcttaatttattgcctcaatcgataaggaacccagacaagtggccttcagtcccatcttcatgcaggtataatattaactaattaatatcaataaaaatatgaataaaaataactaacaatattaattgatacaatctctaaaaagatttcactgcttcatgaaaacgtgtttttttttctttta

SEQ ID NO: 12994 - DNA, 520 bp, Cannabis sativa
atttataatatcttttctttattttgatttctattttgtatgatgattcttcaatctttaattttctttccctataacgtgtgaagatattaatttattagtcttcaatttagaaaataaaaaatttaataaaataataataatttttttttatcaaaaatataaaaaattttaaatttagtataattttatgtgttcttaagaaaataaaaggaatttgtccatttttcggggtctcgaaggggcgtggaaacacataagaactcttgaatggaaatgacttaattattttaaaataaaatacaactgcacgcgaagcgcggtttgtttcatagtatatatacaaaggagaagtatgaggcggtgacgtggcggattaaaatcacttcaattatcactatctctccttaattctctcattttttaattttttattaagtttataaatatcaattaattaactaaataaaatattcttgaaaaatcaatatatataaatagaaaatactgtaaattttct

SEQ ID NO: 12995 - DNA, 639 bp, Cannabis sativa
attattttttacgacaaagtccaaagctttcttagatgttatagttttcataggttcggcctttgtccatttcgtgaagcaatccagtgccactattgcatatttaaccccaccttttcctgtggggaaagcccctataaggtttattccccacaccgcgaagggccacgggcttgtcattaaggtgatttcatttggcggggctctagggatgtttgtaaatttttggcatggatcgcacttgaggacatagtctatgcagtctttcttcatggtagaccagaaatatccttgccttaagatttttttggagaggctcgggcccctagtgtgatctccgcaaaatccttcatggacttcttgtataatccgtctagctttaggatccgacacacacctttaatatggcatgctgagcccccttcggtaaagaataccatcattcattaagtattaatgagccttgtagtgtacctttctgtacatagtcctctcttgaggcagttctcctgtcattatgtacttgataataaagtccatccagcttggtgtttgctcatttgtcgctactttcgctttttgtttaatgctaggctccgcgagatactcaactggcactacccccagcttttctacctc

SEQ ID NO: 12996 - DNA, 855 bp, Cannabis sativa
aagtctaccaccacaacaactaccgcgatctataatctactactccacttatctataattttcattacgtaatttcttttcttttttccaactgtacggcgtttatatattacattgcataaactcaagacctccaacacatacgcacccttctatggctacttgagcgctagcctcaagttttttttttttttctactttctagtagtagttatttagagcattctcatcaaatttatgctatattttttaaaatataatatgaaaattttattttattttttattttatttttaattgagattatttttttaaaaaagtaaatatcattttaaattttatacttacaaaaataattgattgaaccatatattttattaattgacaacataaattttatatttttcaaatagtacaaagagaatcttaaaataatattttgttaaaataaaacttcaaaataattcaatatgataaaatttattatattttctagatttgtttgtgctaaggccatctacaaccaaactctaaaacaccaaatatagtgtagtttcacactataattactccaatgagacactaaagttatactcataaatagctttgtctacagtatcccactaaatttaatgggacactgtagaccatactatttttttttttaaaaaaaattaataattaaataatacctttaagaagaaatactaaataattatatatttaatattaaaatattcatattatattaataaaataataatataataaataatataagatttagtgtaatttttagtgttgtagttgaaattgaaaaaaaaataatactgaaatagtagttttttagtgttg

SEQ ID NO: 12997 - DNA, 637 bp, Cannabis sativa
tttatcatgtgatgggcttaaagcccaattataaatatgggttaaattttttgacacagtacgagtacgattcggtatgaaaaaaatatgtgtttaggcacgatacgacacaactcaaaaaaatataaatttagacacgacacaacacgtaagcacgaataaattagtttaaaagcttaacacattaaaatgttcaataatttaataataataataattataaatatttatttatcaattataattattttttatttgttggtgtgtaaatattattaaaaaaagatataaaagtaactaaaactataaaatacacttattttagtatttaactcaattataataaaaatgcaaaaatataaaacataaatttgagcatgtataaaaaaataggttggtctatttaagaaaaacgagtctgcccgaataaagcactatacaaatccgagcacattacgaaattaccacttacgagttgtgtcgagcttatcctgtaaaattattgtatggcacggcacgacacgacacatattttttttacaatccagcacaatacgacccatattttaataagtactaaaaatatgaatcgaactagcacgaaacatacctattacaactatgctttatgatacta

SEQ ID NO: 12998 - DNA, 551 bp, Cannabis sativa
atggggatatcatcgataaaagtgagaatataaaataaagataaaaattagaaaataaaaataaaaataaaataggtatacaatataattttctcaaaaataaaaattaattttcacaaagcgtgggagagagaaaaattagtgttgcaaaatatttatcctaatttgttgatcacactataaaaaaatagttatgtacttttagtgacaactttttaattacaatataaattttctgtgattatgtacaatttttagccacaacaaaaaattatttatgactaaaacataatatttgaatacaagtgtcactaatttagtttttagtcataacaactattgtgattaaaaatacatttagtcataataaattgtgatttttgtgactaatatctctatgaattttttagtcacaacataggaatgatgacttataattagttttttttttaatcgtaaattttgttgtaactaaaagtaaaaagattttgtagtgtgacaaacaaaaaacatgcaatctaatgaatgtatgccattattaatttggtgat

SEQ ID NO: 12999 - DNA, 515 bp, Cannabis sativa
gacatgccttatttaattgcaacaaagctaaggaggtttggaaacttaccaagttcaccatagaccatacacatgcttataatatgtataatggtgattacataatccatttatccactatacattctagacaggattttgaatctattgtgtgtactatgtgggcaatttggcatgaaagaaaccaggttatacatggtggtgtctctaaaaatagccaagctattgttgattttgctgctcagtatttggacaagtatatgcgatcaaagcttagaaaccagaagcaaaatactgtctgcaacaatatcagtaattctgctactgtgcaagcagcagttcagcatccgaaaccaccaattccatggactccaccgacctttgcaggcttcaaattaaatgtggatgctgctgtcaaccatgatctcaagatcctgggtgttggtgctgttattcgagaccatacaggaactgtagttgctgcactttccaaaccagttcaaggttgctttcgt

SEQ ID NO: 13000 - DNA, 506 bp, Cannabis sativa
actagatgctttcgagtgattcctggaaatacttgtaacacaggtattggtgaaaagaagaatatgcctggaagacttctcaagaaaatgtttggaaatggcctaggttgacaatatgtcaacttgggcgttgggcccagcactaggtcaacgtgggtgttgagtcccagttctgactcccagaaggctccgtttgtttctcgaaagcacccatatgttaattattgatgaaaacagtgaatattcttagaagactttgcttgaacttgttacttttatggtattaaatcaggtctgtagcggaataaaagtttctgtttactatcgtatcatatccttaggatcaccatatatattatatctaaaataaaatagacaaaaaaaattaatttacctcttgaagcctatcgagctatcctcgagtctttttgtatgttgtaccctgaattgatctcgaaatactcgcaccatagttttctgaatcttctaccacacacaaggactat

SEQ ID NO: 13001 - DNA, 556 bp, Cannabis sativa
agtaaccaaggatcttgtagaacactaaccccaatacttggctcaatagcaaaatgaccacctgatctcaccatattctgagcttccaataaactttgccaaattaatttaaacttgggttaggaccaagttcaacttccagaaatgatccccttggatagtaatgagacttgaaattttgaccaaccaatgattgtggattggtttaaagcctccacccttgttatcccgaaagaacaatattaaaatcaagaccccctactctttagaaacacacatacatcccaactcatccaatggatactcttagtttgcttgtttgaggatcgccaccaaaatctacacatcatatatattttccaactctttacacattcctttagtcaacaagaatacactcattgtatagttagaaagagattgagccttaattaaaacttcattcctgagacaaaaacttaccatcccatccctcaattctcctcttcatcttatcttttaaaatctcaaaataacatttttctttttgctcattgtatttggtaattccaaattg

SEQ ID NO: 13002 - DNA, 572 bp, Cannabis sativa
ataaacttagattgcaacctctcctataaataggaggctgattcagttcatttttaaaatacacattcgttctatttagagtttctctctctaaaaatttcagctctcaggcattctttttgactttagatttgtgctctaagtcagatttttaatactcttgactaaaaacattagattgaattgtgctctaagtgtcttttgatcaataaaagctcaaatcctattaccgatgaaatcaaggagtaaattacgataaaaatatggtgttcatttttcctttatgctcttctcaacaactatcgcttattaaatagtatttttgttggccatttttcagtgtcaataaatctataatatacttgatcaaagttaattaaaaaatacttagtactaaaatgtgttaaattaatgtgctataaattaagtatatttatgtgcatcaccaatgcatgatgctacaagaaatgtttggcataagggcatcacttgaaaatattctagtaggttgcttgtgtgatgtagtatcaaataatgatgaggtggtggatgagataaagttcaattttatg

SEQ ID NO: 13003 - DNA, 649 bp, Cannabis sativa
tttaaattagttggacattcaaatctttattggtatagattgtattttaataaatctcattcattgaaaacaatttagtttcattaaaaatttgatttagaaacactaattgttgttatgaaaaacaatctagttttcttaaatgatcttattttaatgagtaatatactctcactaaatatattttataacttatgaatttaattaatgattatgactattaaatttaatttcgactcctcaaaattatcctctttttaattgttatatttattgagatttaattgtatgaacactttctattaattattctcaatcttgttgtagtccaaacacatccattaaaacacttttaatttatttaaatcatatcttatattgatttaaatagttagttacaatctattttactaaatagattcaactaataaatgtttaaatgtgagttaatccaattagactattctaattgaatgtttatgtttatactaatgcttccttaataaatcattaatcatacatgatcagaatgcaattccatatccatgttatatatttgaataataatttaaaatttttcaattaaatctcatttaattcttaagtttagtaatgtagaattaaaattacattttaattcattataaac

SEQ ID NO: 13004 - DNA, 536 bp, Cannabis sativa
aggaggagatcgaaaccaagtcacatagtgtaattcttctcaatttaggtgatgaaatcctaagagagatgtctagtgaagacaaggctttaggtttatggaacaaactcagttccatatacattaagaagtcgctggccaataaactgcacttgaagaagagaatgtacactctcagaatggatgaaggaaaagatttgaggaatcacttagatgaattcaacaaaatcactctcaatcttagcaacattggagtgaaatcagaggaagaggatctggccattatactgttgagttctttgccaagatcctatgagcattttgttgatactatactttatggcaaagaatttcttataatgtctgaagttaaggctgctctaaattctaataaaattcagaagaaaacagaggacaatcaaggtgataatgggaaggcttgttcattagaggaaagtcacaaaacaaagattttaagaaccagaaaggaggctataaggaaaaccaaaaagcaaagtcaaaggatgactcaagga

SEQ ID NO: 13005 - DNA, 515 bp, Cannabis sativa
aaaaaatactaaaaatttatctatgtcatcaagtatccttcatagcattttggacttcgtgttttgtaaagattacccattagaccctttgtattattaaatgacaaaatgaacattatattttctaaaatagtaaaaataggaccctaaactcaatttttaacaaatttattttttttaatataaccaactttaagacaatttccaacacgaacaaatacagaaaatacaaccagttttatcataacatctctagagcatattattattaagttttattttgacaaaaaatccgttcagagtcttatttgtacaattttagaaaatacaaagtctattttgtcatttaataaaatagagagtctaattggtactctttgcaaaacacaagttcaaaatagtatttaccctttatatatttttaaagtataagtttgtaaaatatgactttttattcaaaaaaaaaaattattttatggaaaaatttagacaaaaattataaaaatatgaagaaa

SEQ ID NO: 13006 - DNA, 500 bp, Cannabis sativa
gagaatttgcagaaggataagataagtctgtattctagaattatttggatgatttgaactagaaagaatgctcattatttaaggaaagaacatcatgtttcacaaatgtagaaagctatgtttctgaattgttgcaagattacatggaagcccaaatgaagctcccttgcaacaattgcagtatagatggggagagacattgcaacgtgagcaattcagtgggaaacgaacctattcattccagactgccatcaccatgatgttataagttgaatactgatactgtcttgaatgaaaggaaaagaaaatctagtacatggagctgtcttagagattctaacaacaatgtagaatctcaggccttatatcaagctttgaaatggatttctgcagtgcttttgctgatttctcttatagaggtggattgtcttcaattagtcacaaggatcaaacataaatggaaggaccgctcctcgctttttgatttagtgtccaaggtt

SEQ ID NO: 13007 - DNA, 512 bp, Cannabis sativa
tttgagctaagttagggtttagagatcaagcttagctcattaacggtagtttttgattcaaggctatatggttggatttatttgatgaattatgtttgtttagccttatttgaagttctagatattatgggaaggattagagttattttgttgtagttttaggattttagaaaaaaaattgctgtaaaaacggcaggccgtttctggtaaaacaacctaccatttttctaggcagaaaacccaaaaaaacggcctaccattttcatagaaatggcctactgtttattgggatacttttctcgaaatctcatttttttagcaattttcttgatatgtaggatttagtcacgctttttattgataggaaaatttttagttttaagtttaagtccccgaaagtgatttagcggatcacttaccagttttacaaaaattgtgactcagggccttatattgtcgagcaacagtttccacttagagttaccgggacgcttacattcaaaattaaggta

SEQ ID NO: 13008 - DNA, 554 bp, Cannabis sativa
tgcattaaatgcggggtgattgtttgagtataccctcgtcctcctagagatgctttattatatgtctgtcctagagaggaaagggatgcctattgcatttctctgggggctcacatcctgacttcacttgtctgtttgaatatgcctccgctaattcttgggtgaggtgtccttttggtccatgtgtaatacgtgatcagggccacgtattttgggaaaaacctggggcaacatttacccccaagtcttatttagtaacaggtaaatgagacttgtatgcggcctcctgtccttaataaatatagttacacgtgcccctggcgcgtgggtcacatttatgatcgtcatcattgatgttttttctccttttccaggcaatgattcatttcttttccattgatagacctttgcattaatgtcgatgtcagagacgtactcaagtgtttcgaccgtcctttctccttttcacacctgttcgccccatccgtttgatcacagaaatcgaatcgctacaaattatcaccgtacggtggtgtttgatcacagctgccttg

SEQ ID NO: 13009 - DNA, 514 bp, Cannabis sativa
tgtaataagctcttacaaatgagacgtggtgtgattatgatttcagtaggaagctaaagtccattacaatagtttgccatgaccactgcaaagaaataaaaaatcaagcatagttagttcttgataataaatgtgaagtaaaatagaatatttaataagctacaaacgaatacatgttacaaaatgttacttttaaaagttatatagatgaacggttaaaaaaatatatgtataatataaggataaaaacatagtcaccaccataaaattattcactatatatgttgtagctagaatgggattacttgtggtacatagaatggcgagtcaagtcgaatctcccaaacaagcagcaacaaagtataatccattcataactaatcaagtaagccgcaaaaactaattgatttttgatatcttttggctttttttttcttcacaccgagatgtttcattgttatctatctagaatttaaccatattttcatcagtataatatgtaagatacaagtaa

SEQ ID NO: 13010 - DNA, 548 bp, Cannabis sativa
aataaattggataaaagcaaaagtgttgcgtggacaaagacatcactactgtctagttaagacaatggtggcgccacattcactgtattaagccacagtgataggcgcctattagataaggtgagccctagaaggtgagccctagatttatttttctagatttatttttagatttatttttagattattagattaattaattaattcaaaagataaatatttatttgaattcaaatttgaaaagtagttacatatatttattttggttgagatattccctcaaatagttgagagattctctccaagtgattgagatattctcccaagttgttgagagattccctcaatcatttattttggttgagatattccttcaaatagttgagagattctctctaagtgattgagatattctctcaagttgttgatagattccctcaatcggttattagatatttagtttaaactaatatttaaattcaaaataaatatctataacagaaccagttaaagatatttatccaatatttgtatcttatttaattatt

SEQ ID NO: 13011 - DNA, 628 bp, Cannabis sativa
ttttttttttttttattttgttacaatttgggaaaacatgaatgagattccattgatcattttatatatgataatttatttccacacataacaatgtgggactaaatctaatacacacaccttcctcatgtttgtgtctggaaagtggaggtataacgaacgacctttaagaaaccataggactgtcgtgacattttaaagaatcccacaaggccaaatatagagaaatttttgggtgtacatgttgagatatttgtggatttttaaaacaggtcaaagaccccaacactaaaactggcacacattggccgaaaggtcccagatagaggtttaagaagagacagcagaagtatctttttggaccgacaacactttggctcacaacggatcacaaacagttttttgggctggtgacattttgggctcacaacgaatcacaagtcgttgtcataccaagttagaatttttgattacatgaataggatttcatctcaaaacgaattggtaatgaaggaaatagctcattcatcttatatgtgacaatttatttctacacattagcaatgtgggacgaactctaataaattatgtttaaaaataaatataattttggaaaacaaaaatgcgt

SEQ ID NO: 13012 - DNA, 1019 bp, Cannabis sativa
ggatagtacactcagtttctgttaggttgagagcagcagatagagaagaggttagatcatccattgagcagacagatggggtgtgaaataaaacacaaatcagtaaaaaacaaagctgagattgcagaagttttgttgttggtgtggaatggaagggaattggagagcaaataaccaaacagatacacgggcaaatggggatgctggattgaaagagtttgactgggataacaaatactaggaaaaacaaatctaatttaaaccaaaataaactgcccttactaacagagggtatataaaactgactgatatatatatcacacttaactatggtcagcgtattatggggaaagaagaacaccaagaaacaagtggtatgagattggagaaagaggtatggagacactaggatagaccacagagaaaaaggttggtaggaagtcaaggcttggacggttaaactaaagagaaagggagcaagacaaagatataaccaactgaaaacacgcaataagctgaggtacgtataactctgaaggggagggaatatgtttgagacaagatcgcacacaggggaactgcttatatgcacggctataaatagaaaaatacctacagaggtaagacaaaacgcagtagtagtagtcacttctgtagcatttaataaggagtagagttgctgcctaggggatttgaaattaacactggagagaacacatttgcaggtaaaattaaatgaggatttcaaactcaaattggcaaaagggattaaaacccttctgtcgacggatttgagagggttcccattaccccaaatccctttgaaagtacaaattccaggatacaatttaataggcagaccaaatatatatctaaattgctcaataaaaaaccaatttctctaagcagatttgacagtgaataggagaaaatgtaaggggaaatcaatacctgtaagaggttcatttaaacctgtactgatcgacggatttggaaggaggccggagtaaatgttgatt

SEQ ID NO: 13013 - DNA, 508 bp, Cannabis sativa
aaaaaaaaaaaaacaaacaaacacttgcagttgcgggagaattcaaataatttttagttgaataacagaaattaaattatttttaataagaaattttatcttctaaattttgacatcaaataaatcgtacgctctgaacttttcaagtctttgaaaattcactatgaattattaagattgttgacttaaggacttccgtctaatttaactagcaaaagtttgatgtggataaaagttcaaatgatacgatttggtacatgtcaaatttgagggacatgatttggtacttatcaaaatttggagatataatttaatacatgggcaatcaccacgttagtataattgaacggaatcgggcaagaatttttgaatccaacaatcttagtagttcaagaaaaacttttaacagtctgaaaagtttagagccacgatttgatacatgtcaaagtttggggagcgaaaatcataattagctgaaaaaaacatgtaaattgttcaaaaaaatcaa

SEQ ID NO: 13014 - DNA, 507 bp, Cannabis sativa
tcatcatccacacattccaaccacatgttcattgctcgtgttcttacagagaactatgtccataagccatcttttattgaccaaatgtctggacactggaagggtcgttttcctgctgttatttctgcatatggtgaggatttatttaaggtttcttttggttgtgcgggtgacaaattaagggtgatgaataaggaaccatggcatttccaaaaccatctgattgtaatgtacactccaagtgctctgcagaatgtctcaatgaatgatctatccttccctttttgggttcaaatttatagattgccctttttaagtaagtcaaaggcgcttggaaaagctttgggtaatctcattggagagtttattgatgtttttgaagattcacttgatgagggttggggtcccttccttcggattcgtgtcaatttgccaattaacaaaccccttcctcgtggccgtatgataagccttcccaaagttcgtgatgaattttggattgatttt

SEQ ID NO: 13015 - DNA, 502 bp, Cannabis sativa
ttttatcctgtctttttaccaatggtagctttaactttttttctgtgcaggtcaatctgaacatggcctacgcctactcttgagccaaatccacggtcgtgaagaatcttgacaccaccaacaatctgtagagggaggtggatgcggccatcaagagggtcctggacgtgagaaatgagttgggagaggtaaacaagaaacttcttgctgccaacagcatggtcgaggagctgaccaaagagatccaagagaagccatcaactgccaagctcgaggcaaataatgacaccttaactaaagaggtcaacgagattaaggacgagagggagggcctccttactcttcttgcgaatttaaccaaggataagacggacttggaagagtacgtcaaatccaggcaaatgagggaaggtaaacccatcaactaccaccttggagttcttttatgaattttggaaggtaaacacattaggaaatattgattacctcgaagataccaaag

SEQ ID NO: 13016 - DNA, 735 bp, Cannabis sativa
tttctgttgaccaaagtggttagcttcgcatctttaattgggtttattaataattttctataatttttattaaaataaaagagtaatttgcggcataaatacttaagtttaactcctagttggaaataaatatttaagtttaatttttggcggtaataatacttaaagttatatttctggaactctgtaggtaccttaacgttaaatatcaagtcattatccacgtgtcattttcttagtggtacacacaaattatttttttaaaaaaaaattaaaaattcatgactttgaataattagggattgccacgtggcattttacttaatatttaacaaataggtacctacagagtcctaaaagtataacttaagtattatttttgccaaaaattaaacttaattatttatttgcaactaaaaactaaatttaaatatttatactgtaaattgctctaaaataaaataaataaaatttaatattaaattacactattaattatattataatttttaagagtcctagacatttctctcgttcaaaaaaaatgtgtatattttttaatcaaatataatatatatatatatatttataattaaagctaacattaataatagagccacatcatgcatgattgcattcattctacattatgacaggtaactacgtaattgttgtacagataaaagcaaccatttataaaaaatccaaaaattcctatattattttaaaatataa

SEQ ID NO: 13017 - DNA, 950 bp, Cannabis sativa
  modified_base (724)..(728): a, c, t, g, unknown or other
  modified_base (812)..(820): a, c, t, g, unknown or other
gtgggtgagtagtgacattactttcccatggtttatttggaccgttattgggcctaggttcagtcctgtttttagtttttttttgaaacagtcctgtttttagtttatcaggagtttttacaaggaaattaaattgtatacttattttattttatttattttaatttttacatttatttttatatttctttaagatataatcactcttatagatgatgtccttattatattctataggttaatataaatcatgtgctatacttaagtaaaaagtaaagatatattaagtaattcactcataaaaataggtaaattttaatgaaatataatataagggtatttttaattaatagacacaaaaaaaagtattcttcaacttattctaatttttacactgtctttgaaatttttatttttttttccttttttttatagtgtagggtaaatttttttaaaaaaataatgtgtaagttttatattatttactgtgttaagttttcacggttgttccacgattattttgaattccaactaggggcgttcatccaatccaatccgcactattttgctcatagtgcatctgatccacactattttgctcatagtacatccgatccgcactaagtgcagatttcatattttgaattcaatccaatccgcatccaatctgcaaaagtgcgaattggatcggttattttagattggttacttttcaatattaaannnnntaatatttattaaaaaatatatatatttttcacataattagcaacaaaataaaatattttatgtctctaacaacaaattaaaannnnnnnnntaacaaattcaaaagaagaaaaaattatataaataaagaaatgtaaaaactatatataaaaatggaatatacatttgatctataaaagttttgaaatatatgtgtttcatatgtattagatttttaaatt

SEQ ID NO: 13018 - DNA, 587 bp, Cannabis sativa
tttagggtgtaaggttaggataaaagtccatagggccttagtgggctatgactaaagatcattatggagctttcatgggctcagaccgtactagagcccaaaaacctaataaggtcaaaaagtagtccataatatgatatgaccttgaacaaattttagggaaagatgagttttaattataattttttttattataattcaatttttacatcttaaattatatatcaaaatattttttttcatagtagtattcgttatagttacagtatcatctttataaatttttaaataatttacattaccaaaaacaaagtttatgatattctaatttactgcgtgttcaaaaaacttcacatatttttaaatactgtaaattattttaaactttttaaaaaattataagaatgatgttataagcataacaagtaccgtctttgaaaaatatattccaacatacgttttcagacacgaagattgtaataggaggttgaggatagtactctctttaaggaatttaggaaaaattacagcatcagttcccaaaaacttcaatttgatgcagataagctcactattttcataaatct

SEQ ID NO: 13019 - DNA, 514 bp, Cannabis sativa
caattggtgtcaccatgtggcttatttcgtttccttggtttatttgtatctggtattgttttcactctttaattttttttttttttgtttttccttacaagtttcgtattattaaattgaaaaagtaaagtaatatactctctattgtagaaagaatattgtgcgaacttatttgtttatcttttaatttgctgaactttgctttccaggggtattttttttctctagccagtgagtaaatttatgtatgtttgaactggatttggtctaaactactgtttcttttttagtcttaatggagagctttaaatgatagtttgatttgcatttttaataggttcatgagcgttatgttatgcgattaaagaaaaaagtgaagttttaagaaagaaaacaatctaacaaaaaagggtaagtttttatttatgaatttatatttcataatgattttgcttattttttatttatgaatttatttttctttggcatgtccaaattagtgaatcatcaatgc

SEQ ID NO: 13020 - DNA, 710 bp, Cannabis sativa
ggaaatcgatgcattagagaaaaatcacatttggattgtggttcccctaccacgtggtcaacatgtaataggtaataaatgggtatatcgtatcaaatataacccagatggtacaacagagagattcaaggctcggttagtagccaaaggctacaaccagcaacaaagaatcaatttctttgatacatatgcccccgtagcaaaatttaacacattgaaatttctctttgctcttgtagcaatcaaaaactggcatcttcatcacatggacatcaataatgccttccttcatggtgatttacatgaggaagtgtatatgaaactccctcaaggatacactcccaaaggagtgattcccaaaaatgctgtttgtaaattgcaaaagagtttatatggtcttaaacaagcctcacgccaatggtatgctaaacttagcactaccctcatcaaccaaggcttcaaacaatctcaaaatgaccattccttattcatcaaaaaccattcaggaatttttcttggatttctcatctatgtagatgacataatcgttgcaacaaacaatatgactgccttaaaaactttcatttccacacttgatgctcaattcaagctcaaagacttaggcaatctccatttcttcctcggccttgagattgctcgaaacaacaaaggaatctttgttacatagagacccttcacagttcagctcc

SEQ ID NO: 13021 - DNA, 540 bp, Cannabis sativa
gggcaagagggacatgtaaaagttttgcagatatcacaacgacttctgccacgacactaatgagtgtcaaaatttgaagagggagattgagtacctaataaggcataacaatccccacctacatcggtatgtccaagacgaccaggcccaagtgcaaggaggacagaatggagatctgatgccaccacctgtggcaggacacctaggggtcataataggcagaccccacattactagcaaaactagtgaagctagggagcgctatgctcggacactctgtcacagcccaaaggtgaagtcctagctgtcgaggaccggagctctaagcagcagaagcccatagagctcttgatctccttcaggttggcggttgatgatgtaatgtaataaagagcttgtcataaaatcccacgtgctcaaaatctctcaagagaagatactgcaagctcccggaccaggatacactctaaaagcttggggggtaaatgttatccacatttttgcaatcatgatacatggattttaatcaagaaaggttaa

SEQ ID NO: 13022 - DNA, 965 bp, Cannabis sativa
ctttatgccatgttgctgccgagacgaggaggaggaggattcttagctcatattgttagtaatcaatagttaatgagcttaacattcatgtatgtaaaatttagttgaagtaaagcgacattttctaattaactgaagtctttaattagcagtcaactataaagttatataactaagttctcctcataaatttataaatacatattgtctcattattatggtatatttttttgataatcagataaataaaattattttttattaagaaatttaggaagaaacacttaattgataacattacagtattaaattaaagtaattaattactatgaatcaatcaagtatgtatatatataattattatctaattactattattatattctaaattattattatctaattatttttttggtttaacacaattagtaataataagtaatttacgccataaatatttaaatttaacttccaattgcaaataaatacttaagtttaatttttggcagtaataatacttaagttatattttagaacttctgtaggtacttgattaagtaaattgccacatggcactcttggattggtctaagtcattaaatttttattatttaaaaaaaatagttcaaatatagcaataagaaaatgacacgtggatttaatgactaatatttaacgattaggtacttacagagtttcagaaatataacttaggtattattaccaccaaaaattaaacttagtatttatttatcactggaaattaaacttaagtatttatgccgcaaattactctaacaataataataatatcacatttatatgataattaatttttgtccagcataagtattttgtagtttaacttcactttcaaaaacaaagaaagtccctttatacagtagtgcaatatttgtgttgttttcgtgtatgatatatgcattcactcattccatacgtgtgtc

SEQ ID NO: 13023 - DNA, 502 bp, Cannabis sativa
taacccaattaagaagtttcacgtggactttcactttttaagttttcagaaacatattcaagttctaaataacaaaaaacagtaattgaaaaaaaatttgtgcacacctcgactcgaaaatggtgcatcaatatcttaatttttttttaaaagtaatttgtgattaaactatttaaatttttgtatttcgtaggatgaattcttgaattaaaattttaggaataaaaccctcaaatttcaattctattttggtctctattttttttattcactttggtttgttaagtgctaatgtgaactggtaatgtgtacgtaagtatatacgtaacaaatttttattagtacacctaatattaattatttaaatattacaaaaaatgaaaagcttttttcctctctctctcttccatcgttcgtcggtattaatcgaggatcgaccccgatctcactgttgatgttccattcattcctggtctcttcgttgttgatgctccattcattc

SEQ ID NO: 13024 - DNA, 926 bp, Cannabis sativa
  modified_base (336)..(339): a, c, t, g, unknown or other
ggggggggggggaacatcaaataacacaaataaaatgaattggagatttcggtgactaaaactcatttttaaagagtgcatgtccataaaaaaataggataaataccattttagaccctgtgttttgcaaaaattattaattgaaccttctgttttgttaaatgataaaatggactcttaactgattttttgtcaaaataaaatttaataataatctgatgtaaaggtattatgaaaaaaccgtttacattttctgtatctgtttgtgttaggaattgtcttcaagttggttatatcaaaaaaagaagttgtaaaaaattaagctcagggtcctannnntactattttagaaaatacaggtttcattttgtcattaaataaaatagaaagtcctattttttctattttagaaaatataggtttcattttgtcatttaataaaacagaaagtccagtcaataatttttacaaaatacagcgtccaaatggtatttaccaaaaaaaagtattttaattttaatttttgaaaatattttatacaataagctataaaatatgaatcaagaaattaaaataaaaatataccgataataaggttagaagactaaagtatcattatatcaaaatttacttgtaatttttaaaatagaaaaaaaaaataagagatgtgtccattaatattatgaatgttatactttgtatattccactattattatacaaatttatatatatttgtaattaaaatatgtacagatatagtatttaaaaattttatagtgcactgatgcactcttggagaactagccttttatcaatttttttacggtcgtgtatacattgttattatttaagacatcttctaaaattttgataaattcaaaaaagtttaaaatactgaaaacaggtgtaacaccctaactatct

SEQ ID NO: 13025 - DNA, 650 bp, Cannabis sativa
aaaaaaaaaaaacttaaacatatatacagaataagtcatcatagataagaatgaataccataaaaaaattaaaaacttgtatattaatttttcttctatgtaattaaaaccagtttcgtgatgaaaaactcagtttttttatgaagaaaaccaattaaaaataattttgttaagacaatgaattaagaaaccaattacttctatgtaatcaaactagttttttaatggagcaaccaattacaaataccaaaaattcatataagatttgtttattatgaaaccgatttttcagtttaagattttggtttctagatctccaactgtggcgaaatttgttcgatcctatgaggttttggtagtagagatctcatattcagggtctgtttgagtcgtcggatgtgtgggtcgccagttctcggatgtgtcgctggtaaatggaggtcggtaggtggactgtcgagggttgaggtatgaaggaaaataaatagctttgagatttttttaaaaaaaataattcatctaaacatcaaatatgggctttaaaaattaagtttacacacatatgacataaaaaaaatacaataaaataatttaaaaactaaaatatgctataaaagtagccaaatccacataatttgtgcttagtctcc

SEQ ID NO: 13026 - DNA, 527 bp, Cannabis sativa
gtattcagatagccagccatctattagtctttgtaagaatccagtttatcgtaaaaagagcaaacatatagatataagactctactgaattagagaaaagatagaagaagggctggttgatatagagaaggtcggtatcgaagataatcctgctgatgttgggactaaggtcttaaccttaaataagttcaagcaataatctcagaagttaatatactgagatttatggaacaccaacaaatgatggctgcattctttcttcatcatcgtcattcttttaatttgaagtaactaggtggaatttatggtgtagttcctccaattgaaaaggtctccgtgatcgtcatttttgggaagctattcactcgctagttttgatctcgaaaggagttgtgtggaatgatagttgagtctcgcagggagttttcggatgagtatatatcatgtccactccgggtccagtcttcaggatagctagcccttccctgaaaaagagtttcagctagctagttatccctccttgaatg

SEQ ID NO: 13027 - DNA, 809 bp, Cannabis sativa
  modified_base (691)..(692): a, c, t, g, unknown or other
cttttgctaatcaagattagaaataccctatttcgtttgttaggaaaaaaagttctaagtcattatcatagttctacttctccattaggataaaaacatgtttattaaactcataaagatgaaagagtttagaaagaaaaataataataataatcataaaatcatatgaaagaatgaatagtgtttaggtaaattccttagctatgcattacttgatgtatataattttttaaaaaaaatttaaagaatgatatattttattggaagtgttctaagaaatggcatcttccttttggtttagttgtcaccctcactcaccttagtaagagcactctcaacagtttctctattctattctttaaaatacctcactaaaactttattttttttattttacctcacacatttacattacaccatacatccgtttctttatatttttctctatatcatttaaatattatatcttcacatatattttattaataaaaataaaaaaaacaatacacaaatgaataaaaagaagaataaaaaattaattaaagaaacaaaaaaataaaaagaaaaaatataaaatatgtttatctcttcactattcattgagctatatgtagagaagagtttcttggagtttagaaatatgtataatagctaagagtttaaagtatttgatggagcttaattttaaacnnttagctattttattttaccttttagctattgtaacttatttgttgtgagtgctctaactctggttagtcacctatgtaataatgagttttaagataaaagaaattgaattactcatc

SEQ ID NO: 13028 - DNA, 678 bp, Cannabis sativa
tcatgaagtttaagtaagtcaatagttaacttaaataagctttattaatattgctatttgtttaggctaaatactattttgaacttggtgttttacaaaagttacacaataaattctcttttttaataaacaacaaaatagatcatatattttctaaaattgtgaacataagcccttgagctcaatttcaagaattttattttttaatataaccaattttaaaataatttctaatacgaacagatacagaaaatgtaaccagtgttatcataatatctctagaagaggttattattaagttttattttaacaaaaaatcaatttgggatcttatttgtacaattttgaaaaatacagagtccatatatattattatttaataaaataaagagtctaattggtaacttttgtaaaatacacaatccaaaatggtatttaccctttaaacttatttattaatattgtctaattgagagaattaatttcttgtgaattgttaggacaatagaagagggaatagctaaagccaacaacacaaaatatgggttagcagcagggattgtgacgaaggacttgaatgtggctaatacagtttcaagatcaatccgagctgggattatttggatcaattgttaccttgttttcgatcgagactgtccttacggtggatacaagatg

SEQ ID NO: 13029 - DNA, 535 bp, Cannabis sativa
gcccgatgtcttcatgacgagcttaatgaatagaacttaacatttataaatataaactgatggtaattcgatagtagctgatgctactattttttatgtacaaaaatataaaaaataataataattaatggatagcatcggattaccatcaaattactattagatcaatatggatgtgggtatagtaagtatgagtggtgaagttagaagaaaaaagaaagaaaaaggatattatgggtattaatataaagtgttctcatttttttaactttggtaaatttatgctcaaaaaatttaatgtataccaaatgtatgcatataaaaattcaaatttcccaactaataataaattataataatttaagatataaaataattaaataatatcatagtgcaaagtaaattgtaataatgataattatgcatatgaaattaatttagggataattaactattttttataaaaaaaaaattatatttttatgtttaatgaatttttttatatttttaataacacgaaataacaaaaaaaaaa

SEQ ID NO: 13030 - DNA, 674 bp, Cannabis sativa
tatattctatattatatttcaaagatagccctttgactataatctcatgacatcctcaaattatgctacgtacatagagatttttgtgacataataagaattaaggatgatgaggccccttaactacaattcaatccatatgaaaattattcacattattatgcatgttcacctctttcttttagttaagctcaagagttttttttactaatatatattattggttgttattggtattattatcttcttaatttatactaattttgattaccccaaaaatgaatagttttctgttcaggcaccaccgacaacatccccattatgtttttgcataattttgttgaaagtgattgtggaggtttagtagattatagtttaaagaacaaaatatgttttagcaaaaatttgacaaattcaaaattatttaacatgtcgaaaataggatccaaacagtcttatacgggtatgaaataaactgtttgaacactgtttttttatattttctatattgtaaattatttcaaacttttcaaaattttataaaatgtcttaatcaactataacgtacacgactataagataatagattaaaagattatttaggatatcaaaaccccttttaggggatacatattgtatagaagcaacctattataacgctcctactttaagct

SEQ ID NO: 13031 - DNA, 635 bp, Cannabis sativa
ttatgtattaaattatattctttagatttaacatttaccaactcatatttttgaacttttattcatgttagattttttttactaattaaaattaaaaaaaaaaaaaaattaataatctaaatagtttaaaataaattttgaataaccttaaatgttcagggtcatgatttagtatatcaaaattcgaaaataaaaatactaattcacatattaatattaagataatgactggtgaatctgaaccgtacacgttagcattgaggtaggcccaaggttgtacgaacgttaaggagtgaatcaagatcatcagtttaaaaatagtatcacatactgtgttaaactaatctaaatttaaaacgttaattaacttaattttttttaatatgttaactatttttgttgacttaattaaaggtttaaatttttaataaatacaaaattaattgatgtgttaaacatagattggtttaatactgtggaacactactttcttacggcaattttcctggtgattagaacacttctttttcatcttgtattattctaataaatagataagaaagagttaattttaaacatttgacaaaaaataaataaataaacatgtaaaacaaattcagaataaatttcaataa

SEQ ID NO: 13032 - DNA, 847 bp, Cannabis sativa
aatactatcatgaccctatttaatcgagagagatgatcactagggtcggtatctccagtatacttggtcatttcaggcattttgaaattcttggggagctcaacttctaacgtgttcttagcgcatggcttccgatcatcattatcagactcggagtcatcacgcctctatctctgggatactttggccaaatccttcgagagaatggcaagtttagctagtatttcttcatttagtacatcccgctgtggtgtcgacttgcctcttctagtgtttaaacgaatcatgaggtccccttggttggccttggtcctttctctcaaatcaaccagggtgtcttttctgccaatcgctcggagttgtgttgctttctttgcctttagtgtactgatatactttggcattccttatagtcttggggtttgcacttccttcaaggaagcttattcccttgctgacttttcccttataggaggtcagaacacacccctttagggtcgcgatttactctgctcccttggtactgtaatagggtttgccattgaaggaggagggtcctctggaggataccttatttgacttggcaccctttccttttgtttcaagtttttctaatgttgggaagaacctgcttcttcattgcgagatataggtggtatggcaacaaaatttacattgaggcttgcagtggtcaaggcttgtctcatggcagctaaggcttcctacatccttctgttagtctctttttgctttgccagcttagcattgtgttccatggcttgccgtcgtaatgagacaagttcaacatactcgtccttctcaaagtcctcaaggtaaccatctttcg

SEQ ID NO: 13033 - DNA, 660 bp, Cannabis sativa
tagcatagcatctttatatctttcgagtgtcggtgtcttttctctcaattagtggataacatatagcctcatcaagcatgttttttctcttttatgccaatatttcaaggaaatagtagcatggcataatagcatctatctttcaagtgatgctgtctttcttctttagcctttattaagcatgtaactgagaaatgctaaggaccacggtcctaagtactgcaaaaagtaagcatattgtttgtgagattataattatagaattcttaaaagatgttatattattagattatttttaaaaataagtgtaaaaaataacgtgaaagaaagagaaaataaaatattatatctaatatggagaagtataatatttttagaattctgtttgttacgttgtattatactgtattgtattatatagtatcatattaaattataatttatgtaatatttttatataaaattatataaagtattaatttatataacatataaatatataatattttattataaattaaagtttaatataatataatataaaaaatatgaatgtaatctaattttatataataggatacaataccatcatctaaaaggtataaaacaataattgattcaattagtggaatggggtatggcgtctcatccaacatgatg

SEQ ID NO: 13034 - DNA, 754 bp, Cannabis sativa
  modified_base (468)..(488): a, c, t, g, unknown or other
  modified_base (587)..(607): a, c, t, g, unknown or other
tgtggttgtcgtcaaatattttaccaaatggattgaagctgaacttttagcaactataacttcaaagaaggtcctcaatttcgctgttaaaagcatcattagttggtacaatcttcagtttaagattgtattagaaaaaggaaaaaagtttgacagtgatatgttcaccgactgttgcaatcggcacgacattattaaaagcttctctattgttgttcactcacaagaaaacaagaaagtagaagctgtaaacaaaaccctcaaagacacactgaaaaagcatcttgaagaggcaaagggaaataggcccaaaaaacttctagaagtactttggtcatacaggaccactgagaggacaggcgtctggcagttaccctttgcattagcctatggctatgaagcaatgctgcctgtcgaattggaacctgttggattatattttcccaggacctagatttactaacaagnnnnnnnnnnnnnnnnnnnnntatgaatttctaaaacaatgaaacttaagcacatataaagtttgagtaaccttacattgattgcagcgaaatacaatgactcctcccactcagatctcnnnnnnnnnnnnnnnnnnnnngcagagtattatcaagatctaagttcgattcttcttcagttgtttggattcttcacagtcttactcactatgattgagtactatacttgctatggatgggcatgtactaattcaataaggctcgataatttatgaagaacactcaag

SEQ ID NO: 13035 - DNA, 542 bp, Cannabis sativa
atatttttacggtttttataatttcatttatatgaattgtaattttttaatgtatttttgtgttgtactcttttttttattatgttattattttttgttatttatatattattttgatattattgtttttttatttgattttcttgttgttttcttctctctttatacatttaattttctatgtcgtaatctcttagaatattaatattatgttccatttttcttgtttggggaaaaatttgtgtttgcagaagttgtttttttgcaatacaattaatttctttttcttttattgtaaaaaacatgacaaaagttttttccatacaatcgaattaatgtatgtattgattacaacttataagatactaaattaatattaatattaattgccattgaaactcatttgtgttttaattttatatgctcaaatttattttatttttaaaatttgaaacattaaatcttactattaaatattaacttgattgtattattatttttatttttactgattttaaagttttactgacattaaaaaaaat

SEQ ID NO: 13036 - DNA, 667 bp, Cannabis sativa
tgagatattcaagttgatgaatattattttctatgatttttttcttttttcaaacttctaacttcattttgtactttcttcattactctgaggttcttagcaagctctgtcattgcccaagatatagtgacccgcaccagtgtccacaccagcaataaagatatcctaacacaaaaacacttattatcagattcacttataaaatttgaatgacaatacattattaaattagctaatcttgtaattgtagtaatatgtgtgaaaataggcattttcctatgtgaatttgacacgagtaggattttctcctcaactacctagaattttactccaaactattttttatttttttcaataaataaataaaatctgaactttaaaaatcattgcaaatatgacatgaatttttgaacaatctgtggatgtggataataaatatctaaacattaatgctgatacatattcttagaatttgttattagactactaatggtgaatgatcagtgctacattattgctactttaatcaacaaaatatttttagaaacgagtaatttccctaaattttttatacttccaaagatttttattttcaaaagaaaaataataataaaataaaataaaaagttcagaaggatataatagtttgaagagtcaaaatcttttt

SEQ ID NO: 13037 - DNA, 694 bp, Cannabis sativa
atgaacctttgaaggactacattctaagattcatgtatgaaagtcacgttttttcttaagaaagaagatgtgcttctcgggcaaggttggttgctagcgaggataatgccaccaaggtcaaaggcctgatagaagaaggccaatatatggccatactcgaaggcatcctactattaagtgacttttggaaagatattaggaggatctcaacgaacaacatgaagcagttccttgagcgagctgatggctttgtaaggttggaacaagctgtccggcaagcccaaacaagagggcaggtcaatgacgaacaaacacagggtctcatagcttcctaagcactgtctgatgtgctgaccagtgcagacaatctctgtcaattctccaattatgagaatggtggaggcaagcgcaacaatgacggctctgaccaatacaatggcaaaagagggaaattcaacaattctcttatgccatgaagtctaaaggagaaggggagaagtgcacttggttcgctctcctaacaaaactcccaagtcaaagcatgcctagacgaacccaacatagtaagtcaacaacaggcagtcataaggctgtcttattctccaaaggctggccttctctcgccaaagcttgcaggaacatgacctaccaaatcttggaaatcgaagaccagactctaagaaaccaaagcttg

SEQ ID NO: 13038 - DNA, 1066 bp, Cannabis sativa
aagctcctggacccgatggtatgagccctggcttttactaaaaacattgggatacggttggttctgatattactcaacttgtcactgatttcttcaataatgagtatacgccaacaggactcaatgacactcatctagtgttgataccaaaaaagaagaatttctccaatatgagtgacctgcgtcctatagctctctgcaatgtatcctacaaggttctttcgaaggttcttgctaatagaatgagagttctgatagatgatattatctctcctactcagagtgcatttattccaggcagacttatctcagataacataatgattgcctttgaaattatgcactatctcaagcggaaaaccaagggaaaaaaaggtttcatggctataaaactggatatgagcaaggcttatgatcgagtggaatgggactatttgtttgcggtcatgcatcgtatgggttttgctggtaaatggatcagccttatcatgaaatgtgtaacttctgttcgttactatatttttcatgatggtcacttgctggggccgataactccttcccgaggaattcgccaaggtgatcctttatcgacttacttgttcattatttgtgctgaaggcttttcttccttaatcagaaagtgtgaagctaaccatgtcattcaagggtgtcgtgttgctaaaggtgctccttccataacccacatgttgtttgctgacgacagctacctcttctgccaagcgaatcctaacacagctgccaacatcaaacaaatgcttcattatttcgaattagcatctggtcagaaggtgaatgtatcaaagtcctctattttcttcagtcccaacaatgaagcaaatgcccgaaatcaaatacgcaatattcttggcatgacagaagctactgatggctctctctatttgggattaccaaatattattggaaggaagaaaactgttattcttggttttctaaaaaacaagattatcaatcgccttaacagctggaatggaaaattcctatctcgagctggaaagaaagttcttcttaaatctgtcattcaatc

SEQ ID NO: 13039 - DNA, 807 bp, Cannabis sativa
tcttcatttcaaattctgagcttactttatcctttagcatgtttatggtctttctatcctttccaatgattaaaatatcatccacatagagcaataaccatataggtgtgacattgtagtatacacaaggatcatactcactccttgagtacctgtttgcaacatgaattcatggaaccttaagttccactatcttggtgtctgcttgaggccatacaatgatttttgaagcaaacacacctgttcagcccctttgctcttgaatccttcaggttctttcatgtagaaattttcttcaagttttatatgcaagaatgcagtctttacatccctctgatccatttcaagatcaaacatggctacttttgccatcatgattctaatagaagtttgtatcaccatatgggagaagatatcattgtagtcaataccctctctctaattgaaccccttagcaaccaatctttctttgtaccttacttcttcaccaggaagcccttctttgtgtttgaaaatttatttgcagcctatgatcctttgtcctctaggtctaggtactctaatccatgtattatttttctcaagtgaacccatgtcatcattaatggcaccaagccatattttgtttttcttagcaactgcttctacataagtagtaggctcaccattttcaatttcttcagctgcaacaagtgcaaatgcaatgcagtcagcataccctagtctctcaaggggtctcacatctctcctaactctgtctctgacaagttgatagtcctacaaccctgatggtatttgttcttatcc

SEQ ID NO: 13040 - DNA, 530 bp, Cannabis sativa
  modified_base (172)..(173): a, c, t, g, unknown or other
tcagtataaatctagtgcactaattaatcataagactaagtattttgaagcatataatcatagttactctctattgtgataacatcactgtcattgtgaacaactatatgttctgaatttaacaaaattttgtatattaaaaccattaacatgaaaataacatgtaaacttnntgacttctaatcttctattgacagaagataagattattttaagatggattttattcaaggcataaaatcctaaaagtacggtgtcgctcatgatcaattggcctataagagagattttcatcctaacaagatcgacattttgatagagttacaaagccaaagagaaaggtaaatatgatttatttttcttcttgtcttaaaaaataatggtggattgaattgttctaaaaccactgacattattttctctcttgcttgcagatttgtgaacagaagacaaagacgatttgaagaagtgagacttctacaaagttggagatggaagaagagtttagaagagcaatgaagaagttaact

SEQ ID NO: 13041 - DNA, 515 bp, Cannabis sativa
ttagtgtcccgctttgatacaaatcgaaaaatgatgtttttgcatgtaccaatttatttcttcaataactatatttaaattgtaacagtaatgacttgcagtaacaggttggaaacttgctacttcaaaatacagacttacaataacaagtcagaaacataaataaattgagcaaaattgaaaacttgatacaagagaattatacgtggtataatagtattcttttaaatactactagtccaccgagccacgcttatagaatgaaatcaattagtaaagtctaaaaaattacaaatataattgacttaaacaagtttatactctctctaaaattttgacacaatcctttgtaattcactttgtcaatctgatctctgaacacaccaaacagagaactgaattcagcttttgatgtgctcactcacgtcctccagagtgagtctttgacaaatcttctttcaaagactcttctctagtttgttcaataaagttcttcaaactattctaagaacagt

SEQ ID NO: 13042 - DNA, 639 bp, Cannabis sativa
gatggtcatctactttctctctctagtctggagtcgtctttctttcgtgtcatccttaagtccctcgtttgttttgtgtctgtggtgtaagctggtccttgctgtgttcccttcgtctcaccattaagtatcacctttaactcttttagtctctcgtctcttgttagtgtcacctttgttctctcattgttagtgcgtggactatatttctttgttttctctgttttttgtcttggtttgtttgtctgagttgacttgggtagggctgagtgtcttctttgtaaagttctcctttctactgtttttggagttggtgagatttgggtaggtagtgtgttttttggggtccatttacttctctgtttgtgtgtatttattatggagccaatcattacctccaactcttcccttaaaggaaggaactttacgtgcatggaaacctctatcaagctgtctccgtgcccttcttcggttaaggcgttagcgtcatcgtgtttgtacgggaaagttattgctccaatgattgttgatatccctactgttttggattttgttgctaaaacttggaaaaaaccgataagtgttgtggctatggtggatgatgtaaaaaactccaatgttttcaagtttgggtttgat

SEQ ID NO: 13043 - DNA, 603 bp, Cannabis sativa
  modified_base (268)..(270): a, c, t, g, unknown or other
agagagagagagagagatataaagtatatgagaggttttttggtttggaagaataatcagtttattaaaattaataggaggtaattgcgttgaatagtcaatttattggaaatagtaagattggtaatagtgattgcattgaattagtcaatttattggagagttttaaaaaggaaaattaaaattttcaaaggaaagttgcagagaagatgaaaatatcaagagagagaattaaatagagtgttaaaaagtaataaatacactttannntaataatacacttaataaaaaagtagcaatgagaaatacaaacacgtgcactactatgctgttaattttgactattggactttttcactttgaaaagcttactatttaatataataaaaatatacattaacaatgtaaatggtatatatgtcagtaacattatatatattaacaatgtaaaggatatatatggcaataacattatcacctgattatgacacttttaaaatagtatgacatactgattaatatatatagatagaaaaaaaatgaaatttacaagttatttttgaatcaaacaaataatacatatttttttaagaaaaaaataat

SEQ ID NO: 13044 - DNA, 860 bp, Cannabis sativa
  modified_base (203)..(204): a, c, t, g, unknown or other
  modified_base (306)..(310): a, c, t, g, unknown or other
  modified_base (360)..(363): a, c, t, g, unknown or other
attttttaaaataatgttgttttgacgttgttgttaaggaaaaatagtgtgattttttttttttacaacaatacagcgtgttttgtttttttgttgtttcaaaataacgttgatttctttttgtcgctacgagaaagcaacattttttctgaaaaaaaaataattgaaaacctatggtgctgtttggtaacacttttattttnnaattttttaatcacaaaatgaaagaaaaacttttgtttttaaaaattttatttttcaaaaaaaaaaaaaatacattctgtaaccatttttattttttaattnnnnnaataaaaaataaaagtatgttctacaaattcatttttatttttatttttnnnntttatttaagtcgggtctaggtcaagaatcagattcgggttcagtcagaggctgggttcagcggcagggccatgggggggattcgggtccgggtctggtcggagtccaaaatattgattaagaaaaaaaaatgtttaaaaaatattaaaagtgattatttttgttttttaaattttgattcttaattaaaaaaaaaaatcagttttatagaacatgttttttaaaactattttcacttttctaattttaaaaataaaaaattgattcaaaaagtgttaccaaacgccacctataaaaacaaaatttttaaaagtgtaaataaaagaaaaaagattcgtaaaagtgaaaaaaatgtaaaaaaatatatttttttggtgtattgtgtaattttttcaaaattattaataaaaaaataaaataatcataaattaaattttatcttttaattattataacaaccgcacgaggtgcttatattaatttatataatttataga

SEQ ID NO: 13045 - DNA, 554 bp, Cannabis sativa
tgcgatcacgatcccgcaatcccagagggaagaattcctgaggacgaagcccaagaagacacagtccacagagacagcgaagtccgaagttagccaagtccccccaaagaaggaatcctccccaaaaaggataggtggcccacgctttgtaaactataccgagttggcagtacctcgagaccatatctacgccatcgaagagaaaaacggggtcttcaagaagccttccctaatcaggggaaaccgcgacaagagagaccctaaaaaattctgtaagtaacataaagatattggtcacactactctagagtgttggtttttgcaggacgagattgaagagctgatcaagagaggaaattttagcaaatacaagaagaatgaggaaagttatccccgagcagatgacaaagaagaaaatcagaatgcgagtggctcgagaactcctcgcaacatcctgaccatcataggcggaccccatatcgcaggtgactctagaaagtcgcaggaacgatatgcaagaaaagccagatgaaagccactcataaatgtgaaca

SEQ ID NO: 13046 - DNA, 509 bp, Cannabis sativa
ttcaaaaatcataacttgataaatatttgcacaaaactatatttgacactcagtaccccagaacagtccagaaaaatatgcagattaagcttttaatttttcaaacaatttgcaaattataaaaattagaatatgtgtaatagtatccaacacatataaaatcaagtccaataatcaagttgagtctctacctctcccaagtcgttaaattttgtccaaaagatgatcctaagctctcaagtcccgaactccaattgtttagtccaatcttagatacactcttacttataccatcaagcgactaaataattatcatcactgtattttacattcaaaactgagtccaacgatatataatatgactatatttagagtttggagttccaaattctcagctaagcggtgcacattaactatcggtagcggtagaaatcggtgtaccgaaaatgtcgctaaaataggggtagtatatatcaaatcgacccccttgatgagtagaacatggatgt

SEQ ID NO: 13047 - DNA, 733 bp, Cannabis sativa
atcatggcaatggtggccagaaatagggacttgcaagatgtcttccacaaaagagtcatcaaaaaagtcaatcaactttaccctatcccaatccccagaaggtgaaagaaaacaagaaagagattgagcaggaggagcagaagtggaataggacttaaaacgacatccaggaaaccaatgatcctcaattgtgcgaatactcaacccgttacctaccttccaaataagaccctgtttgagcaggtcacatccccacaaaatgcttctccaagaaaaagaaggcctatgaccaggaactgcctcaaggatagacgaattagggaaataccgagctttgagaactctacataacaacgaattagggtattggaaaattctccaagcttgcttggccagcatagcctgattaaaatgagttaaagaccgaaaccctaaaccccctacaaattttgattgacaaacactagaccaattcttccaatgaaccttatgagactctgcagaagagctccaccaaaacttagagattagggattcgatttccttacaaatttttgtaggaattcgatagcaagccatggcatatgatgggatagcttgaagtacagccttaatcagagtttctttcacagccctataaaaccatttatgactctaggaatgaagaatattggccactttatccttaaggaaggtaaaggcaggatatttaacactcgagagacaccgagga

SEQ ID NO: 13048 - DNA, 910 bp, Cannabis sativa
ggctgaggttgagggttcaagtccttctccaagaacattctctgtataagaactctcattaataacaaagactcgtagactacggctcattaatgcctgaaccacgtaaaaatcacctacattaattatcccaaagctctcattattatctcatataattgattgccgaaaatctcgatcaacatataactatattagaatttaattttataaataagaggtgaaaaatatttacataccacattaataagagatgctcttataactaacaaattgtcatcgataacatcttataagttactgactggtataaatatatatatatatatatatatagattttaataactcacgacactttaaaatttataatttatcaaacactttactcaatttatttccacaattttgctgccgttatttttttccactagcacaactacaactacttttcttcatagcacaactgtatcagccctaaaactgcaattgcctggcttcacgagggttagtataaattagtttgatcctagttcattttataatgagttgtcattttactaatattcattgaaaatatcaattcttcggcccttgatctaaataaaatgaaagcgtgctttatcggattttgcatgaagcatatattttattattattttcaacattccaaattactttctaccatatttccaccacaaatttcccatatactttataaaggcaataactttacagtttgacaatgtctctactctggcataattttatacaaaagctattcaactaacaaattacaagctcacagctcttgactcaatctctgattctccttgtagttgctcaccctcacctacacacccttctacctgaaattcatctccacaaccttttaaatttaatatcgaaac

SEQ ID NO: 13049 - DNA, 775 bp, Cannabis sativa
ggttaggaatttcttttgtactggtttgctgcctcctggtttaaatcatacaaacatggtcttaatccctaagaaaaagagtcctatgactatgggtgatcttagaccaatctctctatgcaatgtcctgtacaagataatttctaaggtgatggataaccgtcttaaggaagttttgccacaactaatctctgagtatcaaagtgcattcattccgggtcgtttaatatccgacaatataatgatatcttatgaagtcatgcactacttgaagaggaaaagacatgggaaagaaggctatatggctttaaagcttgatttcagcaaagcttatgatcgtgtagaatggccttttattgaagctatgatgaggaagatgggattccatgatcactttgtgcaattgatcattcaatgtgtctcgacggtacagtatacaatactaaacagtggtagagaagttggtactatcactccacatagaggtatccgtcaaggtgatcctttgtcctcatacttatttttgatatgtgctgagggattctcatcaatcattagaagattcgaaacttccaatcttttgaaaggatgtcgtgtggcaaacagagctcctactatttcccacatgctctttgctgatgatagctacgtctactgtagagccaatgacagagaagtctctaatgttctcaacatgcttcatacttttcaactagcttcgggacaagtggtgaattttaacaaatcttcagtcttttttagttcaaatacgact

SEQ ID NO: 13050 - DNA, 706 bp, Cannabis sativa
atatttatttggtgaaagagcattattcgattagttaacgatattttttaaaaattatttttttaagttaagtatatgtgattttatacttaattacacttataactgtatgacacatgaaagtactagacaccaataataatttttagcaattttttactttgtatttaaccatcacttacaatgtcattaattatattatttttgatcttttgtgatatattttagtttctattttgccactttctctctcctcatattttcctttcctcaatcttgtacaagagtttataataattttctcacatcagcatctatattttattcttcaaaatatttcattaaattaaacttaattttttttttattttacttcaaatatttaaatcacactaatatacacagatatatatatatacatatcactttctctattttttttttttatatatcatttaaatattatatttctaataaattttatatttattacttatatatatactattaatataagtacatatatataattaaaagtataaaatatcaataaaatatttataaagcaataaatagtactctaaatatagggaagctactattcatcactttaaaaaatagttaaaatagctcacttgatagaggtgggtttttagtacttttgagctatattaagatgtttgagcaattttagctcatcaaatga

SEQ ID NO: 13051 - DNA, 566 bp, Cannabis sativa
ttactaatataaaaattagttactattttataatatttcttaatcatattatcatttattttagaattttgttcaatttaaattatattatattatacatgataattaattaatcttcaaaataaaaaaaaaatagaaaaaataattggtatataaaattggtacggttgctctattacatacatggtaactcattagtctcgaaaataaattttaaagctaccattttaaaattataagctaccataatataacttaaaaataattaattacttactaagatgtatacaaataagttttggagtcaaccaaaatatatctcaaattatatgatataaaataaatttttttatgtaaagataactaattggtttcttatcaacacttttaataaccaaaaagttacttttaaaaatgcataaaaattgaaaaaaaaaaagtcacaaatgttagaaaatattagatttagtttacatagcacgtcaataaagtagtagtatcgttattattataaattagatgcaagaaaatatacatcattataaacttcctaaaatttagtcaac

SEQ ID NO: 13052 - DNA, 774 bp, Cannabis sativa
  modified_base (538)..(551): a, c, t, g, unknown or other
ctaacctaattaaacctctgaaagtaacaacaaacaacaacagcaaccacagtagctaataactcaattcatgtaaaattttattttcttaaaactcaatgaaacttaagaggacatagtcaagagcttatctagagcttggattcacttaaaatctgctgtactctgcttgaaatgctgaagaacaaatgaattcccttgctggtttctagggttcacgagagagagagaacttggagagagagagagtttctttttcccaaatttttcttattttggaaataatgaataaaagggttttattaaagacaatatcaacatgaaattaacttaaagatttgacttaattaacttaactaaagtcacaaaaatgacaaaaggctaatggagcaaaatgaccattttgcccctcccacactaaaagtaaaaaaggacacttggggttattttgggaaatttaaaatcctgactaatcccaacattctcaatgtctaactatgtcgccccgctatactaaaatactaggatgtgattctannnnnnnnnnnnnncgttccaatgttgccgggcactgagtatgcaaaaattatgagatttctacatatgacatataaaatgcattcaaaattcaaataaatcaccataaattaataatttaaaattgttaaataattttcataattaaaccttaattatctgctaatttctaaattaaagctaaatggtctttacaaatagactagaccaaaaatatgattacggaacaaaagatac

SEQ ID NO: 13053 - DNA, 575 bp, Cannabis sativa
  modified_base (247)..(269): a, c, t, g, unknown or other
gatcacagttttggattcgaacataaatttcaagaacattattttttttggtaaaaaaattaaattgttacgtttaaagaattttttttcttacatttttacaattttttataaaaataacatgaaaacaataataaaattacataaaaataacgttaaaataataataaaaaataatatacagataacaaaaaatcaacaataaattaacaatagtacaacataaaagaccgtattttctgtaaannnnnnnnnnnnnnnnnnnnnnntatttaaaattttgtaaaatcgtatttttatattttttttttattgtttttatatatttgtgaaataattcctaaatttaacctacaaacattataaagtcagaccatatgggttctggaaggacaatttgcctaggaggcgaaaagcctagcaaagcgaattcagatactcttacatgataatctataacgagcaactgaatagacatttggaggcatctagaattcatattctacgtggcatcttcttgatagagggtcctactaggtcaagggtttgtcctctgcacaacacctatcaccatc

SEQ ID NO: 13054 - DNA, 738 bp, Cannabis sativa
aatggagaatggcttgaagaaggccgaagcgccaccgtggcccacggtgtctccgccgaggcttaggcctactttgacgttgggattggcttttttgatggctgagacatgagatggggagagattgtttgagtcccaaaaaacgttgaatttgccattggttggggttaagcctgatgacgtgtcataatctatggcgaaggagagaagaaagtgaaattggagggttggattgattggtatgtctgagaatgtaacgttgttgaattctgctcctatgtattctgtgaaaagttttgtgtttggaattggaacagagttagcttgggataagatgataaggaaaattgtgatgagaagtatgtttggattagtagtaatactaattagcttcatattgtttttttaattgctttgtttgggtgtgttaggtttttggctttctttgttgttttagttttgtattttgatgagtaaaatggtgaatgttggtgtttatataattttttttagttattttataaattatttataattgtattatagttgttatggtttaattattttttttgtttattttatttttattaaataaagtatattttttataattttaaaattttacaaatgtattttttataattaaaaattttaaatttgtaaataaaatataaacaaaatctatttttaaaaattccccatttatatacgtgagtgtgacatgtttgggaaggaata

SEQ ID NO: 13055 - DNA, 587 bp, Cannabis sativa
tcctgtgattttttggagtctcctgcgatgtgaggaccaccaatgtttgttaatatattgcgaggagttctcgaaccactcacattgttattttcttctttgtcatacgctcggggatgaccttcctcatttttcttgtacttgccaaatttcccttgcctggttagttcctcgatttgatcctacaaaaaccaacattctagagtggtatggccaatatccttgtgatacttacagaatttctttggatttctcttgtcacggtttcccctgattgggggaggctttctgaagaccccgttcttttcttcgattgcgtagatatggtctcgtgggactactaattctgtatagtttacaaaacgtggaccccccttcctcttaggagatgactctttctttggaggggacttggcgaactttggacttcgctgtctttgggaactgcatcttctagggcttctccctctaggactgctggatcgtgattgcggtactggcgactcacgtttatcctttcctttctctagctcgaccagagaattttcaatccttttatacggttctgccatagcaaaaaactcgac

SEQ ID NO: 13056 - DNA, 532 bp, Cannabis sativa
ctttctaactttttctttcaagtttctttacttttcttcctcttcaatcgcttcttctaacatgataactgtctttcttagtataattctagaaaaaaaatttcatgttctttcaaactttaacccctttgatggttcatcctcactttgtttgcccttgtccttttctctagagaaattaattttaagacctttagaattaagatgagcgacttttggaaagaaaaatatcaagtaactataactgatagccgtgttgggttatttaccattatctttggatgtttaagggataaaagaaaagttcttttgctgaaaccttggcactttcagaattactatattgtattaggcacttcatctattctgcaaaatgtgtaggtagaatccttgcatttctcttatttttgggtaaagctccatcgactttccttcctctgtaaatccagagccatggcaatttgggcgggcaatatcgttggcaagtatcttgaagttgaataggctcactgagtgagggttggagcccttt

SEQ ID NO: 13057 - DNA, 585 bp, Cannabis sativa
ttcggttgtcttgataggttgaacgatagaaacttttgttggtgatatttttgtttcgtgagactaaagctttaaaagaggtattattgtaaagtttttgtttgtaagcagtataattatttaaaggaccggcccactatattttaacaatatagttgcttttttgtatattcaaaaaaaaaaaaaaaaccccccttttttaatctatttgagatttaatagaaaacttaacatgtaccccccaaaaaaagattgcaacgatactctctgtttttgacattttgatgacagtgtacatcataattatttaagatatcttataaaattttgagaaatttaaaacaatttacaatgtaaaagtagagttcaaagtgtatttcacaagcgtataaaaataaaataaacaaacgtgcctgaactaaattttgatgtattaaattattttaaatttttcaaaaatttataagatgtcttaaataaatacaatatacattatcatataaaaaagattaaaactatttaaatatcaaaaatacgaagggcatcagttctccactttttggaggtgcaccataaaatttcaca

SEQ ID NO: 13058 - DNA, 759 bp, Cannabis sativa
gttggtaattattttatgcatggtcttagagttttttagtttaggatttatgaacttcttttaagggttacagttaatttctatgtaacacggacattgatcatatgaatttttatgactgtattttttgatcatgttatataagatgatgccatttatgatcataagagtaaaaatcgtctttgattttgatttagttcatatagtcattatattttatagttacgaatttactagctaaaatcaaaataaaaatattaacttatgtgctgaattagtatgattctatgagatatagtcgtatgtgatatgatcgaatgagttatacttttaacaataggtgattagaagcttgtagattatatgcatgtatcaacacgtaatatgctataactatatgccctttttgtgcttggtatagaggcaacatatttgaattagtgttttgtgcttgtttccttatgattaattacacacatagagacgaggaaaattttgtctagttgtttgagttttctcaaatgattctctctctttgtttgttggtataaatttgttctacatagccattccacagggatatgatttggctattatctatttctcttttcttttgtttttctttttttgtaagagttaggtttgtttgtcataattagtttatagtgcttagtagttttaatttgaatcgttactagatgttctggtatcttcatagtagtaatactcatagtcgtcctttacacttcaactatgtgt

SEQ ID NO: 13059 - DNA, 501 bp, Cannabis sativa
agtgaataaagaaatattgagactgtctttttctttccaaacactctgtttctcatagtttatggtggtcggttggatgagaaggaagttaaccgagtgaaagccgagagggaaagagagaatagaaaaggcatttcttttttagttttttgaaataaaaggactaatttagaagtatttaaaaaaaaaattacacataaaacctatatacacattaactttaatattttttttttgaaaaggatattaactttaatttaggtagttaattttaatctaagatgcacatttaatctatttgcttgcctcaatgataatgaataccagttaatactcagatcaaatattatgatactgtgctgtggcagtggcactcatccctaaagttgagaattgaagatttcagacccataattagctagcatatcaaaatagttattatatatacacaatttttaagacctaataataaaattgttacagtaaattgaagacgtacgt

SEQ ID NO: 13060 - DNA, 522 bp, Cannabis sativa
tgcctaaattttgttgttgaaagttgttttgtgagcacatcgttttcttcaattgacacctatcggagcttgactcttccttttgcaattgtgtctcgaacgaaatggtacctcacatctatgtgtttggtcctttcactaaagacttggtttttactgaggcgtgggcgggggccgcgggcaagggccgatggacgaggttcgcaggcgagaagggctgcaagcaagggcggcaggcgaaggccgcaaggggaagtcacagtgcggggtgcacggggtgcagcaggttaatgactccaaatattacacttagtaatcattgggagtcaatacttgccccctagtctataagaattcttttaaaaaatgttcttgtagactaagtgtggtgagtttcattttttggatttcttcccttctcctttttattatccttcgcaaggagcctaggctttatgatttatctcggcccctttcaagatttgtgtctactgcaacgagggagtgtgagctcgccaagct

SEQ ID NO: 13061 - DNA, 518 bp, Cannabis sativa
tatcgtgattttatattaaatgtgaagttcatttctaattaatgaatttattaaaaatcctgagtaattaaaattttgcttaattactaacaatattaaaaataaattacttttatataatcaggatcccgagtttaaaatatttacagctgtttcaaaatacttgatgtaaaagttgtcgcctagcgactatacaaaatacaaccagctgtcccaaagatcatactctctagatctaactacctcgacatgtacaatcttcatccgctcgctctcacggctgctcaacattagccttgctcttacctacacatgcaaacaataactgtgagtcaacagactcagtaagaaaagcataatcttaatcataaatataactcgggttaaaaataggcacccatacacccaactgtaaccctattcctgcaccctaggcggtacagtggctagaacattcatgcagcagtactatcgaccatattatcagcctatactcggtactctagtcataatctagt

SEQ ID NO: 13062 - DNA, 556 bp, Cannabis sativa
gataaaaagaacttgtgactaataaaaataatatttatatactatatgatttctaaataatgtaaaattgtttctaaaatatttattattaaattttcttcacaaaataaaaaaacttcacaacttagtaaaaataaaaaatcttataaaatatcacctaatttatttttttaattttttatataaatatatagatagaatatatagatagaatatatagaaagtagaataaaaaaaatagatcccatatactgtatttttttatttttttttcttcatatttacgttttaagtttttaaagtgattgcagcgctagttgcaataaagatttctatacgattttttgttgtaatttaatttgcagcgctatttgcaatagtaatttttcgtagaatttcgtaaaaatacataaaaaaaaataaattatttaaaatataaaaataaaaaaacctttaattaataatctcgaaatatcatcataccaaaattagaataaatatttggaaaaataacacggtggaactcttcttaaaaaaaataatgcataaaaaataa

SEQ ID NO: 13063 - DNA, 829 bp, Cannabis sativa
tatattataaagtagaaactgaatatcatcttgaaaaactgagatactataaaataaaaaatacatataccattcaacaaaaaagatataccaacaataataaaaaaaatattactaaaaatatatatatatatatgtatcatactaattaaattatatactacaattaaaatatatattccattaacaaaattatatacatcactgtatataataaaatagaaattaaatattatccaaaataaataattgattgagaatcaaaacttaaaaaaaaaagtcaatttcaatatttttttaaacagttttttttttcttaatcaatattttagactctgaccagactcgaacccaaattccccctacggccctggcactgaacccaatctctgacccgaacccgaatccgacctatgacctagaccttacttaaataaaatcaaaaattaaaaataaaaataaattttacagagcatacttttgttttctatttttaaaattgaaaaaataaaagtggttaaagaacgcatttttatttttcaaaaataaaatttttaaaaacaaaaattttactttaatcttgtgtgttaccaaacggcaccttaaaataaaaataatcttaacaaaactaatataaatataccatgatatttaggtgatatgcttctaaatctaaaaaatatttatataaatatatatataaattgaacattaaaaatgtaataaagatgaaaatttgatgtgacaaaagataatttaagttataaagagtgtaaagtggtcatatttctacaaatttcaaaatgataacatttacttacatagtagt

SEQ ID NO: 13064 - DNA, 616 bp, Cannabis sativa
aaactaacaaataagcattcaaaataatcctaatccaacctagaaacacaaccataaactcatatttaacctagcacctccagaacaaaaagtcaacccttaaacctaagctcttcaaaataaaaaatagtcaaacttcttaccttagcttccacctatagattgcttcactcctagatgctgatagcaggttggagagctggtttttgggcaaaaaaaaattaaagaaaataatatggtggtggtagtatttcttgctcgagagagaatacgaaaagaaataaatttttaagttatactttctttttgtttttctttctttcttaaattatatatatatatatatattgtttttaaaacaacatataataacaacaacaacattaataataataataataaagattattttattatttcttaatcactaagaaatctttaatcttagagtatttagtcaactccaaataccctaaaataccccggtaattctataatcaatttatctcaataattctattaatactaattaaaactattgtgatatttttagccctcgatcaagtctccaagatcgtcgaacttgaaaatttttttataccaccaataactcata

SEQ ID NO: 13065 - DNA, 588 bp, Cannabis sativa
  modified_base (167)..(170): a, c, t, g, unknown or other
ttccagctatatgttatcaaaacagaaaggactcgtaccctattttgggcggttggagtcaatcactactggactatgatccgagacaatcttaccaacatctcttgtctgacataaagaagcgcattaaatgagtattattgtgaaattatattattatataattnnnnatatgtgaattaatatgagatatgacatgttaagaccctgttggtgagctagggggcattttagtaattttgacccgagaagggtaaaactgtgaatttaatttatttacgtgcttatggactacatcattatatagtatacatgttttgtcctttttctggtgtgttctgacaattcggcgcggtatagtcacaactgggtattttgggccgaaccgggttcggggctgaatataattttggaattaattatttgcatttaatttatgtgggaataattttaaaattaattgagtttatttgtgtgttgtaagacatgcttgctcttggagtgtatgtatgtatgtatgttatttggccttatgggcatttgggtaattttaggtatatgtgttattttgaattaaaacaatttcta

SEQ ID NO: 13066 - DNA, 513 bp, Cannabis sativa
aatcagacttttgtagtcttgatccagaagaaaataggtgccaattgttttgattatttccgacccataagtttgtgcaattttacttataagatcatctctaagttgttggcgaatcaattgcgccccctccttaaggatttactctctccgttccaatctgcttttgtgctgggaagatggattgctgagaatagtattatggtgcatgaggtcttggactccttcaaaaaactcaagggccccgaggggtacgttggattgaagctggatatgtcaaaagcttatgatcgaataaaattgagtttttgggggtgaactttggagaccaatggcttcgatgccagattcattggaatggttatgcactgtgttagatcggtctctctttcgatcctgctaaatgggggccctttgaaacaatttaagttgaaccatggcccccgacaaggagaccccatctcacgttacttgttcattttatgcagagaggtgttctctcggatgctcctt

SEQ ID NO: 13067 - DNA, 778 bp, Cannabis sativa
cctaacaactctagacatgtcatcatgtgattagttagcgatacttcttaaaaattattatattaaattattgagcaatttgcggcgaaacccccttatattttaatttttatacttaactctcttatcttttttttttttgtggcaaaaccctcttatgttttagttttatacagttaatcctttatttttttattttttttttgtagaaaaacctccttatgttttaatttttatacactaaacctctttatcttttattttggtggcaaaacccccttatgtttatttttttttgcaaatttaaagttttagtttgatattaccgttaaatactaactagattactactgtatcgacttcgaggttagactgttacatatatataggtgtatacagtggtcattcagttgatatttaacggtaatatttaactgacgtatcaaatttgcaaagaaaaataaacataaagggattttgccagtaagaaaaaagtaaggaggttaactgtataaaattaagatataaggaggtttataaaagggttaagtgtataaaaattaaaacataagaaagttttgttaccaaaagaaaaaagagttaagcgtataaaaattaaaacataaaaaaatttcgctccaaatttctctaaattatataaaatataatatttatgtgaatcaataacaatattaatataagataatactaaatactacttaaaaaaaaataaaaaataaaagatatatcactaagtaatcacgagcaccacctcaat

SEQ ID NO: 13068 - DNA, 710 bp, Cannabis sativa
ctttgaagttggttcttgaacatataaaaaatatagaaaatgtatagattcatatataaaaaaaataagaagatctagattttttattataatttttttatcaatatttgtgtcgaaaaacacataccgaatttttttttacagcagtgttcgttataattacaataaatttttgtaaaaatttggaataatttataatgttaaaaataaattttaaattttttgaacacgcatgcatgatagattgaaatatcaagaactctatttttaatactgtaaactgttcgaaattattcaataatttacaagaatgatgttataattataacaaatattaaaaaagaaatttcaatttgtaatttcaaatgtaaaaattaactaaaaaaattataataaagaattgtaattatcacacttcaaaatacaattttttttatatatatatataaaataagttgtttgtacccaattttttaataaaaaaacaataaataagacaacttatattatcacgccaacataatatacaactttttaggcttataatatataatagaaagaaaacgaatgatctcagccgttcattttaatttcaaaatatctataaatagaaagaaaactttcctctaataatccatacatgcataatattcagtatactagtaaatattatctcatactcatatatatcatattctccaaaaacccaa

SEQ ID NO: 13069 - DNA, 1035 bp, Cannabis sativa
agaaacacaaagtctcttttctctctctcttggggtcggtctcacctagattcataggagcttggattttcttgcatgtcgtcaacaattgagaaggttttttctgtgggtaaattcttagggattgaaggtagcaactcttggggcctgtaaattatcgagcagcagttccactcaggttgaccggcacacctgaattcaagatataagtaagactagtataatgatatgcatatgtgattacatgtttagcgtgcatgtttatgaatgcctgttagatatattatagtagcgatattagtatacatagagatgcactgaatatcgacagtatatgttgggctaattattgattaacgctatcacatcagtacgagtagagtaccgagtataggctaatattatggtcaatagtactatcatacgaacgttctaggctcaatacgcgtgggacgcaagatagggttatgattgggtgtatgtgaacctagttgtaatctggtttaaataatgttatgattatactttttttacagagtttgtcgactcacagttattgtttacatgtgtaggtaaaggcaaagctaaggttgagcaacagtgagtgcgagtagatgaagattttacatgttagggtggttatgcctagagtatacgatctttgggacagcaagatgtattttgattactcactatgcggcaacttttgtaactaatattttgtaatacgattataaatattaataataagggatctccgtttatgaaaagattatttattttcatttaaaggtgaattaagtaaagttttaattaatcatgttttcctaacaaacccattgattagcaacagattgcacaattagtataaaattacgataacacgcctaaactagtagggtgttacatctatcctcaaaaatccttagaaccaaaaaaccccaattctgacccctttctcactcgctgttgagcctgtctcgtctctctcagggtggtaaattctaagcccggttctctcatggaagaaggaag

SEQ ID NO: 13070 - DNA, 564 bp, Cannabis sativa
atggccaactacagcaagaagagattcgccttagtgactttaaacaacacgacgccgttttaccaaggccgaaagaacactacgatattgcataacgtggttcttgaaggacagcaaacgatgtcgtttaaggaaaaagatgatgaacagtataagttggagactagttctggggtttactctattgatgtgaagcttgctcttaggttgaaaatcaggtttggtaaaatcaagactgggcatctcaagcctcccactattaactgcaataaccttaaacttcctttactttctagtaatgcaaatgagaataatggtgtgctcaattttaagagtgtcaagtgtaaaaacgtacatatcttccttagtcgatattgatgtgtcatatcttccttagaaataaaaatagtattaattcacatgttatgtgtaatattattgatgtgatgttattagctgtaatatgcttgttagcaattttttaatttctttaaaagttttttatttatgttttttttttttttttggtgaggtgcatttgttgattttcaatttaatgaattt

SEQ ID NO: 13071 - DNA, 576 bp, Cannabis sativa
  modified_base (458)..(458): a, c, t, g, unknown or other
ggagtggcttcagagaagaagcctgtccgagaaatcttaaacagtccattttctttatgcacgtgaaacggagtgtcactcgggtgtgcgcgcgggcaagggattgatccccttcctcatttttttttaattttcaaaaaaatcataaataattcaaataaaatcaaaattaagttttgtaagaaaattaattgcttaaatttttccatactatccaattaaaataattcgggatcgtgaattcagttattttacataaacaatttgtaaacatcgatcagtcattaaataaacacatagatcaacatgtatcacatcgaaatcagacaaatattgttttaaatctatatttaatgaaagtaaatcattgccatggctctgagaccaattcttggaatatatttaccaagatctaaatttactaacaagtatatttgttaacatcctaaatatgaatntctaaaataatagaatttaaacacatataaagttaagaaaccttacattcattgtagcagaatatatatctcctctcactcagatttttaatccttgttcctgttggaaattatttta

SEQ ID NO: 13072 - DNA, 595 bp, Cannabis sativa
tgaaaaatcgtgggttagggcttcagaggggatgatcgtggattctgtcaatataaaaaccaacgaaagagtaacaaaaaataaaaaaaaaataaaaaaaaaataaaaaaaattaagaaaggagaagtaatggcagggatggtgtgtaagaaaatgtaaaacccatgacataagcatggatagacatatttgtaattataaaacttttgaaaatgtaatattgaaaaacaaaatttttataaatgtttaaataaccgaatattgataaaaatgtaaaaaattgacaaaaagtggtactaagcgtaaaaattctaaaaaaaaaaaagaagaaactagactctataccctttttatattgtcttcttttattttttaccatttttttaaagtctatcatttttacctctttttttaacactttgccgattctgcccatgttacttcaatatattctctatgtgacttctttatgttagggtatttttagtacaatacatataaaaaaaatatgtttcaattaaatataaattaaaggtaaatttaattaattgataaataaaaaaggtatactccttaaaacaaaaaaaaaaaaaaa

SEQ ID NO: 13073 - DNA, 729 bp, Cannabis sativa
tggttttataatttaaaaattaataaaagtcgtctagctaaatttttttaaaaataatttttaaaagtttttaaaaactaaaaaatataaaatatcaaacttagttttcaattttcaaaaataattttttcagtctaacgtattatttttacaattttgctcacatactgggaccccagacttcggacctcagacctagaccttgtaatcagacccggaccttagtccaggtctcgcagtacttggcctgggtctaggtctagggctgggtccgagtttagggtctaggactgagtttggggttcgaatcctgatttaggttcgagtttgagttcaagtctcggtcagggttcgggtctacgtctggggttaggtctggggaaaataggttcatgtcgtgcctatgttttcagtgttttgagtttttagatatgcattttcaaaagtccaggtttaggttcgagtttgagttcaagtctcactccgggttcggtctgggaaaaatgggttcatgtcatggctgtgttttcagtgttttgagttttagattttcattttcaaaagtgagaataataaacagtttttgtgattttaaaaattttaatggtgttttgcacaagtttttaaaaattatttttagatttttttcttaataaaaaaaattcaatattctacacaccataccatgaacccatcctgccccggacccaaccctaacctagacccgaa

SEQ ID NO: 13074 - DNA, 777 bp, Cannabis sativa
tttttttgtaaggatcgatctatagtagaatataaatcaattactttttactaatattatagttcgttcatgcttattattctctatatgtgtctatatataatttagcagcaatatgactccacataaattttcttttcatgaataactataaaaatagcatataaacactcccatgtcccaaccaaacaacaagaaacacaaagcaatttcactattaatctaactcacatatatatagatatatttattcaattaatattaaaaaaaattattttatccctcatctctaaactttgttacttatatatgattgtatttctataatattagtgtcctcaaaaatattttcttacctttatgagttagtaaaaattaagatttttgttacaaaatataaagctattttgtccacctcaattttattacttatatgattgtatgagtgacggacctaaaatttttattttgtagggacttatttatcataaaaaaatatttttacttacattactatatttatttaattttatggggcctgttctactatgaaaatttataattatcaaattttaaaaaaaaaatacatttaattttttaaaagataatatttttattagtgagggctataaccctcacatattaatgagtggatccgtccctgatggtatcttgatcttgtaaacgttgttaaaaatgttccattaactttattataattagtaaaaaattaagatttcagttaaactttttataaattgggctggtaaagtatga

SEQ ID NO: 13075 - DNA, 581 bp, Cannabis sativa
atatccaatctaataaaattaaatcaaaccgattcaattcaatctaattataaaaaattagatatccaattacaattggattggattagattggatgttaaaagtttaattctaattggattggatcggttattggatgtcaatttcaaaattcaattaaaaactgatctaatccaattacatttatattttttaaaaatatatttatacttatttatataataaaaatatttatattttaattatatttttggtggttctttttttgttaattttgtaacacttaattattttgtgtatttgttagttatcttttgtatttgttttcatgatgttttattatattttactacttgacactattgttgttttagttattttaaatttttaattgtattaaatttgtaatgataatatctttatagaattaaaattaaagacaaggtgatatttaatttttacgtatttttttcatattatgaaattaatattaaaaattagatatgtaattatagattggattagattttgagttttaattgaatttaattgcagtattttttttacattcattctatcgt

SEQ ID NO: 13076 - DNA, 514 bp, Cannabis sativa
ttatcaacatctcctaagacatttacctgaaaaatggcaccataacctctaatatggtgaacaacgttatcatcatcagaagaatggtatcttaagtctcctgaattgacatcttcgatcttaaaaagagaaataggatcttggtggttattagacgcttgaacctttgtcaatgacatagagcgaggataacgcggcccgatattgacctgtttcccaaattcatcgggagctctctgagaccctagagccccaaacgtagattgcaaaaaaaaaaaaaatcattatgtttaaaaaaaaaataataaaaaaaatataaaaaaaattctcaagcaagatacgtttacatagatcacacgcacttgcttgagggggcatctgttgaacgaaatttttttaataataattattattattattattattattataggaatgggtcagtcaaaaaaaaagggagaaaaaattaaggagatattttctttacctttaccacttttacgttaagtggatt

SEQ ID NO: 13077 - DNA, 541 bp, Cannabis sativa
gtgcttgcacaagtggatcaacttgttcagcttgttgactggcctatgtcacattgggatatctttgaactagatcttgggtacggatacttggttagacaatcgctggaacgttttatccgtctaggccccttctcctaaggtcatgtgcggtacccaacctatcaaacacgaaagtaccaggtggtcttggtgtttgacttttttggccgataggttggcctgagacctcggtagtggtgaagtggttggattgtatgattccttctaaaggacagtctggtacgatctgaccgtctaccgttttctccacaatttggacttatggccttggattggatgactaaccactgtgagtttgtgtggtatgcccatccacatacccttctggttcatttaagggaatattggatgcagtagcttgttgttgattggtgacttggtaagcccttcttatcagtatggtggcctgcctaatacgacattaatggttgtctgctaagacctcatagtctttatctcctagttccgtcattctatg

SEQ ID NO: 13078 - DNA, 832 bp, Cannabis sativa
cttgtccgttttagccattgaaatatccatatcttggcctgaggccgtattgtcacctgcttgttgtaaagtgccactacctgatgaaatgctctcattcaccttttgaaatcctgctggaccatcagtatttgcaggaacaaaatcatgatttagcggccttgattcgggaagttggtgagactcaaccataagttcatccccactgccttgaatcacagcacctgcattggctgctgctggctcccacttacttcctactggaatctctttattggaaccattagaaagatttatatcctgggaaactggaaaagtttcagacggaatgtcattgtaccttagagtctcggcagggtaacaaaaagcagcttctgtttcttttccattttccagccaactgtcacagaaaacatgatcttctgagtcagtaacataatgttttgtattatgaatgtcagtaacatatgccacttgaaaatggggttatgtacctgatattgtcagtgtatatattctcagcaatttcatcatgaacttcatcagatttagatttcattgtagaaaaatcatccactgaaagggccctgggatgtaaaagaacttccaaggctaacagagcatgtgcacagaactcagcaagttttgttccaatttcttgtttgcctgtagagataagtataatatagttacaagaaaaaatgaatgaaacctagttagtaacaatttgcaagaggttccactcccatagattgtagggctcaatgagtacgtgtattaatatccttttctgcttgttatctgctaatcataatgtaagatctattgacaa

SEQ ID NO: 13079 - DNA, 519 bp, Cannabis sativa
ttatgtcctttctctcatgaatttctttagtgacaccggtcttcgaggttattgagtttgattatctgaaataccatatcttgaatggaaaatagtttgatatttaccatgtcttattaaaaagcatggagacctaaacattgtcgaaagtgatagttggaattaagtttaacgtcgattcctcttcaagaacaatatttataataatcttatttcttctccaagcttaatatccttaaaattattaacgattctcgtctcaaaattgaaccttagtgtgggatcacaaaaattatagctctttatatatatatgaaacacttctcaatcggtatatatatttattaatacaaatgatatattaatattttttacacaagtttactatttaactttatgatttatgatttattatttaaattaaatttttatgttataattatttattattaaaatatattttatttaaaaaaatatatagtctattttaaaactaaacacaagattacattcaactta

SEQ ID NO: 13080 - DNA, 544 bp, Cannabis sativa
aaatactggaaaatagggaaagttaattaaaatattgggacatggagatttttacagttttactgtattatgtttacaaatatttgtattaaagtttcgaaattataaaaatacttcgtttcactaaaataaaacaaacagctcaaaaaattttagaataacttaacaaataatatgaaaacaactataaaacaacaaaaagacaactaaaaattaatagaaaaataacaaaaaatatatatatatttttttttaagtatagcgtaatggtatttttacaatcaattaatagcttatagcttaaaggtcttgggttcgaactaatgacctctcccttttcccatccctctctcaccactaagctagccttagtggcttaaaaaataacaaaatattaacctaattgcaataagcaaaacaatataaactcttcaatatgttttttgtattacggtttttcttttacttagttttgacaacttaatttatctttttgtactattactttatttctttcatgaaatttgttgtttcaactcttttt

SEQ ID NO: 13081 - DNA, 578 bp, Cannabis sativa
ttgcaaattcttcaatttgacgatcacttgaatatgtaattcttatttctttttcacttttaaattagtaaaagatattagtaattatttataaatgtgaatgaatgacagttattaaaaatattactggtggaaatttttataaaatatataaatagttcaaaattaagtgggattagtttggaatactttaaaaaaaaaaaatgcactaaagctgaaaaaatagatttttttttcagcaaggcattatatgcattttttgaacattgggagcctttttaagagctcaaaacacttctaaatgatccaattaataccataaacacccataaatggtaacaatcaaggattttatggtgactatttatgttcatatggaaaactcaataaatactcactatttgttcacttttgatacatgaagttgaaaatactaattgtgtggttagaatcttatgaggatataatattcatctttaatattatactgagcatatgtgaattgataaatccttaagagtttttctagaatctccttaagtgaccatataagaaaaaaaataacttttaagataaag

SEQ ID NO: 13082 - DNA, 697 bp, Cannabis sativa
tttctgctgcagaaaagagcagtattcttttcggattttcacataaatcttccttatttctttttcttgttcctgcaaattaacatcaaaattttgatgaagaagcccttggatgtcctctaaatcctgcttagcctttctctcagctgcttgaatatccgagtaatgctctttattgagctccctgaagaagttcttcaacattttcaactttgagaccacttggaacatttttgaaccacttatcttctcttcccatattttcttgacttccgtatggtagctgggatgagaggaccacatacgaaagtatttaaatggcttctttccacacggggcagcagggtatatatttagaacaactggagtatggtcaaaagttccctcattaagaaagagagcttcagcccttgtgaaaaaatctaaccaagtttgattagctagcacccgatcaatcttggagtagattctatcacttgcttgttgcttattactccacgtgaaaaaacaaccgctacttttaatgtctgagatttgacagtcattaacacactctaagaaggctgtagaggtgctaattcgtgccttgtctccaattctttcatctttagagagtatatcgttaaaatccccaagtataagccatggctcctgactagaaatacttcgtagatcattccatagcactttcctccca

SEQ ID NO: 13083 - DNA, 777 bp, Cannabis sativa
ccttctctaccttcctctcatagtggattactgagtaagtattttttttaaaaaaaaatgttaaataattataaaagtatagtatatttttcgttagatctatgtggttgttattttttttggctttgatataaattttgttgaaattacaagatcttgttgtttggagtattctctgtgttcatatttttctcgatggattctcgacactaatgtctcaaagtcagggaagacctttcttgacgggttgtcgatatgttcttgaacggttctcgataataatatctcaatgttttgaaagacctttctcgacgggttttcgatatgttctcgataatttgtcaaaatggcaaataattttgcaattctaactattcttgacatgttatctttgtgttctcaattgtttgtcaatagtttttcgatggtgtgtatagttgtattttcaaactttcttcccccatgttattgatgatttctcgacgtgttctcaactgtttctcgatgattgaatgattattattttcaacgattattgattgcttttctgtaggttctcgattagttcttgataatttgtcgacattgttttcaattattgtaattttttgttatttttgttattgtgagttagttgtttgtgctttgtattgaattgaaagattgcttgtgttttcgattgtattgtatgatggtgcttaaagtgttgagggatttaattgggtgtataaaaggaatggaagtttaatgaggatttattaagcaaagtatacctac

SEQ ID NO: 13084 - DNA, 500 bp, Cannabis sativa
cacaaaaaggctcacaacaaaaataaaattatcttttttagccaacgccaactactttgacatttttctttctaaaattgatgacgcacattcacatgtcagtatcaataatgtttccatgtacgaatgacatttattaatgaattaggcttcacttaaccgacccaatagctaatattatattatatttactacatcagtgaactttgaagaccaaaagaatcctaatcggtccaagtctgccaaacttattagtcattttgcttataattatgacttcatcccttcatgcaaaaagttagaaaatttggtatgaaaaaagtagtaaatactttatagttaaagagcttaataatactaactcgtggactaaaatttgtttacgccctaaccacgtaaaaaatttcatctcatttatttattaatcttattttctttagctcactcttcttttaattcaatttccaataatctccgtaaacaaaaaggatttacaaaaa

SEQ ID NO: 13085 - DNA, 716 bp, Cannabis sativa
aatataaactaaaaattattcttagttacgtttctgaaattgaaaaaatttccaacatgaatgtaattttctatttaattaaattcattaaaatagaaataattaagtatctagaataaaatccacttaattattaattctaatttagttggtccaaaattaattaaattattaactttcaacttaattatattttctaattaattaaatttcatgaaatagaaacaaataattaagtatcttgaatatattcaacttaatttcaacttaattatacattctattcttattctattcttaagttctaagaaaaatatcctaatttaagctggtctaaaattaattaataagtcaattttctacttaaatatattttcctactttttaaatattagaaaatataaattagttactagaaatcattatctagaatatttcattaaactaagtgtatttttctaattaatttcgaaataatccaatgaaaaaaatttcatatatttcaaaattaattatgatgctaattagattttaattaggttaaactagtataattaacctaatacaattatttagaaatgggccttcacaattagggttgttcatgtaagggagggttgggttcagtatgtcatacccactactaatggccccctaactctcgcacaagacccaaaggagagaaatttcagcttaaattaaataactcttattca

SEQ ID NO: 13086 - DNA, 572 bp, Cannabis sativa
gccaaatgtgatcaaaataaaaaaaaatatggcttttttaagaaataaaattcatttgagcctagaaatgacattcgagctcagcccaataacatccaaactcgaccatgcccaacccgcgcatacccgacccaaaacccgcgcatacccgaccacccaaaaactaggttcggttgtgcattttcaagacccaaaatccaaaaacccgaaccagaccacccaaaaatttgaaaaacccgaccccgtgtgcagccctaattccactctcagagcattacacaggtcatgtcacttggcgcggcgaaagttattactacccgaagattaaggccaaatttgaggaattcaaattatgggatagggtgaaggaatcccctttcaaacaattcttagagagagaaccattacaattttcatggacactgatccatcaattaatattgcacaagatcaaatctgacaagccagacgaggtacacttttactttgcgaagaagagatgcagattcggtagggtgagtttagtttggtggccaggttaaacttgttgccccgacctactgaacaagaaa

SEQ ID NO: 13087 - DNA, 575 bp, Cannabis sativa
gtttttttaaggttaactatatttaccatcaaagaatattatacaccaaaaaaatcatacaagatcataaatatattattgtgcatataataaatttagcacataaaatttacaataataattatcaatatatcctttataataataataataataacattccatctataaaaattacctcccattctcccaatatattatctagaatctacatttgcagaatatccaccaaatcattaaaaaaaatatcaatggtaattaaggcactgtaaaatttaaaaatgcatcaaaaaaattaaaaaacaaaattattaaatttttttttcttgttatattagaatgattattttttcatttttaaaatggaatagtcattccactaaaaatagtgaaaatagtattttatcgaaatgttatttcaatactttaaaatgcaactaaacaaaaaataaaattaaaattatttattttctattctattccagtttattacttctaactaaacgataccttaagtgtaatcatttccttttctctatatatataatcatatatatatctttctccattaaaaa

SEQ ID NO: 13088 - DNA, 505 bp, Cannabis sativa
ctgcgaactccttccaaccattcgtcttcttttcttttggcattatcaccatcttcactatgttgtttctcaaaaccgaaatcttccaaaagagtcctttcgcattctgaaaaacctccatgaagcagctattcgtgttgttgcgaaagaatcttctgaaggaacacctctgttgaccatctttcttctgtagctcctccaaaatttccaaaatccaaaatgcatatccaatggtgactgcaatttcgaaaaccagcaagtttggtcctcttgcagattctcacccatccaccatcataagataaagttagcacgaacactttgtgtttagttctgaagctccaatacatgtgtggcctgagagactcaaacacaaaacaatttacacctccaaaaccagtggggttttggatgtttttcttcccatgaccaatgggatcaggaggttgggacggccagttttttccatggcagtaggaccatgaaagttccttgcgtgcgttct

SEQ ID NO: 13089 - DNA, 506 bp, Cannabis sativa
tgtgtgaatatagagataagctttggtactatttgttagtttttatggtacaaatcaaagtaaaaaagcgaaaacaatttatgaaaaattatttaaattctcatactctgaaatataagccccttaaatataacatatttacaaatattaaatataactacaagatgaaatcaatatacttgttaatgcttatcagggtatccctgattcttatcatatatgcaagcgatcatccaatccatgaaatatgatttgggagaattcacaccaatgtcttccagatagtctcaacactcagaacaaatatgggctcataaaattaattataggacaattatttttatcacaatatgtgcacaactcataagacactatgattgagagagagagaggtgcacatctatatagtttttaaaacaactgttatcgatgcttttaggtcaagcctataatgatgtatacatagcatttatgtaattctacaaaaataaagataaatattcatt

SEQ ID NO: 13090 - DNA, 523 bp, Cannabis sativa
tacaaattagtttgatttgaaccactaacaagaattttaaaacagtaactaaactaggaaatcgtaaatagttcaaattgactaaatcatttacatcagattatttagtctagtctcaaaataatttaatctagatttgttaagatttgaaaccaccaattacaaattttgtgaacacccaaggaaaaaaaaccttaaatttctcaaaataagacaatttagttgtgacttcagaaagtgtgaacatattatagtgatcaaatatattaatatattattggtcttgttcaaagtatatataaatatattagtagaaaaaaaaaaacgagtattataaaatataataactaaaacaaaaatgggaaatttacatcatttactaatttttccaataatcttacaattatactgtgacacgctcaaaataacatttttactatttttttttttttaatttggcagtatactgccttgattcaaagatatggacattagtatagggttttatatattatgtggctta

SEQ ID NO: 13091 - DNA, 712 bp, Cannabis sativa
ctgtgaaaaagctcagaaaaaaccgtcccttcttatgaagaaaaactacgtccttcatggctgaaaatccataaaatgctaataccgaacatgaggtaactaatcatcgttctgggaaagagctcatgggctccagaaagtctaccaaccagcggtccagatggcccaccctttccaggaggactcaacctcaaggtggccctagtacacggaccacatgttcccgaagagcctaacccgacgttggtcctagtacgcggacaacacgcacgaggaaaactcagcgtaggagtggccagaacctcgggaagagggatgagcagctcaatcggggaggtgccaagtctatgggggaaggtacttatgaaatgaaaaactgccacctgagacgccatctggaagtggcgcagcatcagaacgctgagttagagcgtgatgtagcctcggccagggtggcataggggacgaatgctcaaaatcaacctgaacctagagtgagaagaccacgaggaaaaccttgtggctcacgaaccaggggataggaatgcccgggaagaacaacccagggaaaatgaggtaccccctgaaaatcagaatgaacagccagatgggagacaaccggagattgatgaacgagaaatccctcaagacaatgaggaggatcttgggactcaacccgaagaacgtaggtcaccttctagaaatcaccagc

SEQ ID NO: 13092 - DNA, 517 bp, Cannabis sativa
gaagctagacccacctgccaagccaccttccacgcgggtcctaggctgttagctctacaccaaccgtaggatgacatgtaagcacccttcagcccccagatctaacaatagcgtaccaagtgtcctattgagaagaaaaagaggaagaaaaaaaatgactatttcacatatgaaaatcacacagaaaagccaagaaatccattttttttcccacaacttacacttaaatatccatttcatcttcccaatttacttcacctaaataaatattcctattttatttttatcctaactttttcatcgaaacaaatatttattttttctaatactcttacacatatcctaattatccatttttgcccatcacaattaaactaatcatttaattattttattttgattaatttaatcactcaattttgcctataaataggatgttggaagaccatttttcacacatctcttcccctccctaaacacctcttccataaacttttcatctttctaccatttctat

SEQ ID NO: 13093 - DNA, 665 bp, Cannabis sativa
gtcaagagcatagtcgaatgcaaagtataataatgacaaagtttctgttctctaattgttaattttcagatccctttctcaggtcatgggtgaccccttatataggagaagggtcggagtttctcgcttcaagagacgcgagcattgtggaaatacctcaattgtctccttgatttttggaagtggttgaagtctgattcttgtggtaatatcccgctattttcgtgggtttgcaaccactattaagctttttgcgagatttaaatgtttaaattagttattgacggtgagggcctctcaaagtgcggtatgactatttaactttctctacagtagtagccactactttggggtgacactaccgagatcgactctatagtcgctcgggggtaccctcaagaccccttccacttgatcttcgacattgtgtataattttgacgttatgaagatgcactatatcaaccatgtcttatgtagttggaatgtgttacttggaccatgagggtgtaggggtttaagggtacaccccatagactaaccccatcaccttttgagtagatcattatatttgatgtatgggatagttgtatatacaccctagacaggtttgactcccttagatgtgtgataattgtttatcctgtttgtgggggtgttagttta

SEQ ID NO: 13094 - DNA, 701 bp, Cannabis sativa
aaataaatacacatttacgttactataaataaatagattgcattaatattctaaaattactctaaatgttgaagagttatgaaaacatgaaaaaaaaaatatccttacaaaggtatattaaaaaaataaatttcaatggccaaaagatttcttgagtaagagaatgatttctttctattgcattcagtatgtgagttacaccattgaatttccaaccaacctcctcacacttgtgaatagggtatttataggctctaatggcctgagttacatggtggtcccaaagagcaagctatcgctttcgggctacaaatcgcaggtgtaggaggtggtcttgagcctcgtacccttgtctggtgtcaggtagtcacaggtcgcataggtggtgcatgcaccgtacccttggttgggtcctcagattttacaagtgtggtgcatctactactcgtacctccttactttcagaaggcgtgtttgtatgcttttcccttgcacaccttgtcctttgattcctcctctaacaactttttcttcaacgcgtattcaaatttcaattttgctccaccttatacacacaactcaacacactcgacacagcaaaacacacacacacacacacatccatatgggcttgcatgcgagcccccatgcaggcatgcaccatgggctcacatgtgagcccttacacacacacgacgcat

SEQ ID NO: 13095 - DNA, 620 bp, Cannabis sativa
cttataaaaagtattaacataccttaataaattttataacaatcacctcgatatagagactgaaataaatattagtatcagatcaatttatatgagagaccataactaagcacttaacaacagagccaaaaaaatttactgtgagctagaatgattatttctttgtattgaaaataaatttcatatttgttatattttttattcattttaaggtagattgtttcaggggtgcaaccaagcctatattcttaaatttgatgagtctaattattggcactcatcaggaatttatgagaaagtttgtaagtagtaatgttgttatgaatctcgagaaagaattcaattacatcataattgttgatggtcatgaattatatttgcttgaatgctatattgcaatttgtatcaatcgtcgtctttctttaactatgatgatccttctgctattagtttttctaattgtgatgatttcttttattagtgatgctccttctattcctaattatcctactgcagtttctttattcgaaacttccctgaaaatttcatcccccaaactcaaaactactatggccaattaactttatctgaagaaagaattatacaccataagatggatg

SEQ ID NO: 13096 - DNA, 504 bp, Cannabis sativa
  modified_base (411)..(423): a, c, t, g, unknown or other
ttttgacatttaaaaaaaaaaaaatttatcaatatacggtaccgcggttgtgaaatcatattctaatagggataattttttttaattaaagaatatgggtaaatagcggcataagtacttaaagttttatctttgtaagcggtataaatctaatatttatttttagcggcataagtacctaatgtatatgtaaaactataattttcttccagtttcgtcagtacagactatattttgaatttattaaaagaacatttagaagtaactgacactacatatttctatctagacccaatgatcaagaatttaagccttatatgtaccatgtttaagacaataacagagtttgtactgacaaaattagagaaaaattacaattttactaacattaggtacttatgccgctaaaannnnnnnnnnnnnttatgccgcttacaaatataaaactttgagtatttatactactatttacctaaatattatctatgaaaatataattttata

SEQ ID NO: 13097 - DNA, 507 bp, Cannabis sativa
atcatggagatattagtcataccacagaagagtgttgccagctgaaagatgagatagaaggtctcaaatcgcagggacactttcgaggatatgtaaaggggtaggacaatgtccatgatcagctcgatctgcccaataactcgagtgacaagggattataaccctccctgaaaggacgaagggacacctcagttgtctcgagagggagtgagtcacaagagtacaagggccagttacttcggtaaagaaattttgtaaaaaaaaattgcgacgtgagtagatatcaaccaactatggttgccatatcagactgcagcgaggaaagctagtcgtcaaccaatagcattcaaagacaaaactaggattacttcacctagaaccccgagatatgtcaaggattgacccaggatattgaaacaattgagggagtaggtgagggattgaccctgaacatcaaaacccgttttatcaaaaccttaaatgctactagaagattgataaaataaa

SEQ ID NO: 13098 - DNA, 555 bp, Cannabis sativa
  modified_base (155)..(162): a, c, t, g, unknown or other
gggtaaataattaagtttatcattggattattccttacaaaatttaagtttaatttttgactgcaataatagttaagatatatttttagaatttttgtatgtgttaagttattattcacgtgttattatattattggtatatttaaattaatttnnnnnnnnaaaataaaaatttaataactttgaccatttaaggactgccatatgatcattaacttgagacttaatgtcaagtacttacgaaagttctaaaaaatataatttaagtattattaccgtcaaaaattaaacttaaatatttattacttatatatttatggcacaaattatccatactattatttattaagaatctcattacatatttctcaagtgaaaaataatatcaaaatttctccaaatttaatttagggcaaattatatttgcattccttatattatgggattttttcaaaaatatacgtaaaatatgaaataattataaaaataacttaataaatctcaattacaataatatattatcatgtcattaaaaatacattaattccaaaataa

SEQ ID NO: 13099 - DNA, 589 bp, Cannabis sativa
aaagagtaataagtggtaaaacctacaaaagatttcaaaaggctatcaatgcatacaaattacaattaatatgcattgtatagggcaaaatagacttttgttagtaaggaattaactttctactgattttataatggaaaagtaaatacttagtttatgtgatttgtgattccattggaatgggttttcaaacttcaataaagaaaccaaacacttgattgggccctcttaaagaatgacaactctattctattgtccattcaagtgaaccaaacacaacctaagagtgtgtctgtcgccgcgggtaccatctcataaaaaaaatgtacatttaaattaaattttatttggataatatacaagtattcaccatacaccctattcaagtatccaaatattaatagcaaacaacagtatattataaaaatacatcaaattatcactgtaaaattaaatatatgtgtgcgtaagctacactgttgaatatggcccatttccacgtcatacatttcgaatatatatataacataaacactcacaaacaccaacttcatcccaaaaataaatcaacttaaaaatggctcagaaa

SEQ ID NO: 13100 - DNA, 524 bp, Cannabis sativa
aaagtcctcatagatgcctgatccttaacaacacaatggaaagggtgaaattcaaaaaacacaccattatcttgacaaaactgagacacacttaaaaggtttttagttatagaaggcacatgtaaaagattgttcaaaacaagatgttgggagtgataaggagaaataaatgaagaggtgccaatgttaagaatgtttaaacctgttccattgcccatgtgcacttgttgttcacctagatagctgctgttggtgttgagattttgctcattcgatgtaaggtgatttgtagcacctgagtccggataccaatcaggatcattaaccacttcaggagaggcataataggcctggacttctgcaatattggtgctattgttgccttgaagggcttgaaaggactcggggccagtaaagcttttatcaaagcgataaaagcattgctgcacggtatggccgagtttgtgacacagttgacactgtggtttttgcccccaaatggtgttaatgccgcggccacgaga

SEQ ID NO: 13101 - DNA, 622 bp, Cannabis sativa
atattgaaaaaaaaatattcattcatcaaagatttgacccttagtcttgtactgtctaaataaattaaataaatatgaattaagtacagattttatttttgaactctaattccacgcgcaagaaaaacaaaaatagctatatttgaattcttctcacataaatacccatttatgttttttatagttaaatcttaaaaaaaaaatgttgaagtttttttcaatttagacagtaaaatatcattttactatattaggtaaaatattacgagaacagagaatataatattgaaaatttttagaatatattctgaaaatggtagtagatccatgcactttttcctatatatttttccacttccagatacttataattttaacttttgtatataacagtgtatatcattattattttcttttataaattttaaatattataatgttgaaaataaattttaaataatttattacgtatatatttttttattttatatatattggaggaaaattataatcaaattaattaaaacttaattaataaacaactaacaataataacattaacaattcacaataatataaacgaagataaaaaaaagaatgaaaagagtactcaaaccaaaaa

SEQ ID NO: 13102 - DNA, 982 bp, Cannabis sativa
gaagaaattatatggaaacatacatgcgaaaaaaatcaaaataactcaagatataatttgtatataatctgtaatacaataataatatataataatttagtatgtgtatctgatttatccatagcaattatagtacaatactatcaaataagtttttatccctaggtctctaaatcagaagtaattttatttatctgattatcaaaactatataattgtgatgagacaatatatatttataaagttagggaggggacttaactacataatcctaattggactgagtctactcattaaaggcttcaattaactagaaaaaccgacacttttacttcaactagactgtacacacatatagatgctaaacccattaactattaatcactaacaataagatgttaacatagcaaagaactatccaattaacccaagttttaataaaactaataaaagttaatgtaagcccaaataaaaaagtctaacattcttctacttgtgctacattaattttaatacataatatatatatatatatatatattaaaatagttttgtttgaaaatgactcaaactcatgggttgaacaataaaaaaatatttgtggtcactttaaaaataatagttattgatagcctctccacatactcatccaatttaacctttgatattgaactatgagaaccatattatttttaaatcaacaaaagacattcataattataaatatcaaagtattaaatcgacatgttaatgagtctacattactacaaaaactagtttttgtgttggtcaatgctattgttcacagaattgaccgacgtgtagtgtgtacaaaataaggctgtcaattacaaaatgacattaagaaatattgattagcattgtttaacaaaatgacgctacaaagaaaactaaagaaaaataaagcaaggaaaaattagaagtggagactttattctagtcggttcaaaaatatcgcgta

SEQ ID NO: 13103 - DNA, 576 bp, Cannabis sativa
aaaacatgatttctatgcaaaaaattactataaaggtgctggaaacttacccatactgaagaaatgatccaccaagcttccaagaatcaattgatagcttcaaaatctcctccaatggtgatgagaaggtccaacctgaaatggttctcaagaggaatgtgtgattttttaatgttataattttaagggtttttactcttcattcatattaagtttttgagtttttgcaaaaagaagaccttttaccccaaaattgctattataacccccactaccactgggggctataaggcaatttaattatttttatgttagttattttccttgtaaatagttttattttcatctttgtaatttatttttcttggaaaattatgattgtgatatatggtaaaatgtgaaaagagtaatgggcagggaaaatattttttggatttttggaatgtaattttagtataagtgtagtatttttggtgctgttgggccatgccgtcaacaacaaaagcaagacgcgaattacacaagaaagttcctatcgcatggccataccgctagtaacttgggggggggggaatg

SEQ ID NO: 13104 - DNA, 618 bp, Cannabis sativa
aactctggttaaaggagggtgatcttaatagcaaatattttcatactgctgctactagtcgcagaaggaagaatgttattgtcaaactgaaggatgagagaggaatttataagtcttgggatgatggatggccgaacctcattacttcctattttgctggattgttctgttcaaatacaactgattccacggagattattccttttattccaaccataattaacgccacccataatagtgatcttattgctccggttactgaagaggaagttaagaatgctttgtttcaaatgcatcctgataagtctcccggccctaacggaatgactcctggattttaccaaaaatgttggcatgttattggaaaggatgtcattgctcaagttcgacagttctttgattcaggtactcttcctatagggcttaatgacactaatattgtcttaattcctaaaaagaaaaatcctgatactatgagtgacttgagacccatttccctttgtaatgttctttacaagatcatttctaaggttcttgccaacagacttaagattgtcctacctcatctcatttcggatcatcaaagcgccttcatacctgaaaggctaatcactgata

SEQ ID NO: 13105 - DNA, 541 bp, Cannabis sativa
tcataccatctctgaaactcagagtgcgttcgttgcaggaagattaatttcagataacgttatggtggcatttgaagcaatgcattacttgaaaaggaagactaatggcaaaaaaggctacatggctcttaagctcgacatgagcaaggcctatgatcgtgtcgaatggagttttcttggttcgatccttcgagtaatggggttcagcgatcggtggataagtttgactcttggttgtgtgaattccgtccgttaccatgttcttaatagtggacaaaagatgggaccgattgtcccttctcgaggtatccgccaaggttgcccgttatcaccttacttgttcattgtttgtgccgagggactctcatccttggttagacattacgaggcttcaagactcataacgggttgcaaagttgctagaagtgcccctaccatttctcacctactgttcgcggatgacagctatgtgtactgccaagcttcggaagaagaagccagccatgtattacaactcctccaaacgtttgaaggcgcatct

SEQ ID NO: 13106 - DNA, 611 bp, Cannabis sativa
acccatgtatccaagctctccagagcttattacactagattcgtttttttgaaggtgtgtacttggtaattaggattgataggtgttattggtattcctggacaactgatacgtggcagtcacggaaggacaccaccgggtattactcactgttgacgtgtacccttcgcttgttaggttcgcggaaggagtgttcctagagaaaccggggatcctctatgttgataaggacgtggaaggctgtaaagtcccttcacaaagggactgcaaaaaaaaaaaatttgattttcttaataacaagctggctatggaggatattttcagaccaacttaagggagtgtaggaaaatcagtatatatatattaggaataaatcttaagttgtaatatagtaggaatgggatcattttactctttattcttggttttgtttccttttttttagactcttatctttatatacacgatcagtatacagaaatcataattagaaaatacacctttcctatttttgactgctgatgtggcagcataggtcaaagaagcgagtcaacagtagtggattgggtataaatagtggttcgagcacaccatactaatcctagggtcta

SEQ ID NO: 13107 - DNA, 724 bp, Cannabis sativa
tttagtgtttttcaataaataaaaacatgttcttttttaatttggctgatcaagttttctgttgaaagtttggatttttagctaggtttctgacatgaactgatacaggtaatatgatatgtataaagagtatttgtatttatttgaaagaaagacaaagattcttactttatgtgagttgggatacaaaatctatttgtttagtttcaaattattgggataatttgactttgatggttgacctttttttgtaatcttataatgattgtttttctcactaacattattggtccattccattccattactctgttctgttatgttgtttgttttggtcaattttatagtgttgtctgttgtgttctaagcaattgatagaatgttcttatcaaaattatttgacttgtttacttttatagtgtttgatttaataaatcttttgtaggattagatttgttcaatctatttttctattgtataaatcaaatgagctcaaaaactgtttgagaaaccaaaatactctaaaaagtagaaagaagaacacaaccgatttgtttcgggtttcaaccaaagagaagctttggcttacatccccgcgaactccctttgagttcggcatcttttcactatcaatggcgacgatttcacatgtcttttatctttcaacactctccttacaactcaatcaaatgtattacaatcgaaaatgtgctcggggaactaa

SEQ ID NO: 13108 - DNA, 514 bp, Cannabis sativa
aacacactaatctcttttgactgtattttcaaattttaatttttagaattgtgtttttaaacgtgagaataaaaaataaaattttcagattttattatttttattttttggttgtgcatgttcagtctgagatatttatttgggattttgttcatcactctctgatttgttaaattttatatattttgttgttccatatgtgttattcggtgtttagtattatatacatacttaatttttatattttttaacggttgttttttggttgttatgaattattttttaatgtatttagagtaaggagaaaattttcaaattaaagattatctctcgtgatattatggaaatccctattgataaaagagttattgaagtataatatttttttgtgttttttttttcgtagttttattgttgttttgcagttattttatttaatttttatgttattattttaagattggaatcttaaataaatacttatgtttggacttcaacaataattattttttag

SEQ ID NO: 13109 - DNA, 528 bp, Cannabis sativa
tcctagagttagcccaggaggaagaaagaaggttcgaaaaggaggggtctttcagccaatgattttcaaaatgaaaacgattagatctttgagcagcaaaacgagtgtcttggaacatgatcttcaaaactctatgatctgaaccatagaacccctgatggaagagagtagcatgaggaaaaaggtctcgccaaagctggtttgaggtacaccaatccagacgctcaagaattgaaccatgcttccaagtaaatttaggcccaacatgaggtataggaatatgattatgtttatcaagaaaagcatggaaagaatgcatagcataaggagggggattaagagaggaattccggtcatttaaggaaagataatcattaaaatcgcccataactaaccacggcaaaagaggtgcagtatcgaataaacgattgagtaaggtccaagtaacagatttaagattaacatagggagaaccataataaccagaaaagtgccaagcctttttcattaaaattatttataatacag

SEQ ID NO: 13110 - DNA, 537 bp, Cannabis sativa
ggtaaaataaattccaacagccccttctcctcaagctaatctgatgcacacttcgagtcacagtgacactaattggtaccccaattttggggccaccaatcattgtacccccgatgctcaaaatctggcttcaatttccacttatgaagggtatgatcatctgtttgttagtgatggtacaggtttgtctatcaagcacattggtcattcttttctctctaattcatctattacttctcctctcatattgagcaatttacttcatattcctacactaaccaaaaatttgttgagtgtgtctaaattcactacgaataacaatgtgttcttcaaatttcatcatgatgtttgtcttgtcaaagatcaggctcatcacaaggtgctgcttactaggacatactagaatggcatgtattcctttgattcttcacaactgaacttgatgaactcttccatctcatcaactgattccaacaggtgctttcttttacaacatatgccgccacaaactctcactgctactgcctcaatttcctc

SEQ ID NO: 13111 - DNA, 955 bp, Cannabis sativa
cagagtttgcaccattgtgcacaaccaaaagagagaggggggagacagggagagaatggattggggttttaggagttagggatccctttttgaggtccatttgggctgaggaggaccagagctctgcgtttggccagagctaagggttgcatgggttaagggaaggagagaaagagtggacacggaaaaagaaagagaatgggaattaggattttcttcgtatttagtttttcattcttttagtataaaaaaattgatacatttttggcaaaaaaaaaaaaataatctgatacattttaattgtacaaaattgtattgaaaccctacatttaaattaaataatgtttttgtctaatttatttccaacaaataatttcgctcttcaaataaattttgtaacaaaataaattaaaataacatctaatatataataaattagtaattataaagggataattgcggtaaaagtccccaaaaacttagggttgatgcagattaatctccaacctcaaaaattggcggtaatagtccccaaggtaacattttctgtaagtctgttggtccctaacttaactaatccgttaaagacaaataaaatgcaacgtgtcaatttttaattagtctaaataataatttaattaaaaaaattaaaaaatatataattctttttattatattttatttgtttttttttctttttttctctttcttcttattcttcttcgtcttcttcctctagctagccacacctaaccccctccccaccgcgtctttattttcttccagccacattcagacccccaccccatctattgcaccagagcaccaccattgttttgaccaaaaaataaaaatcaaacatatataaagtaatatatatatacacatatgagaacaaaaaagggagggaactagtcagatctaaagagagaaatacttaaaaatggagctcctt

SEQ ID NO: 13112 - DNA, 504 bp, Cannabis sativa
attctgtttgggatagtgttatcggtagtggcttttaagacatggatcagtctcttttgtagacttttgtataagtaattgtccttttccaagaagtgtagggttaggggtagagcatagaattttatcttaagtctaaatagaaaaggtactaattttcattaggtttagtatcttccacagtataccttatattacacttgtgtaatcaaaagcccgtgctggttctcgtttgtatgaaaaaatttcacatgaaacatttttgcctaatataaactcttatttgaaaccttaatcttcacttctgaccaataactggaggctgtaaaatacaaatgtgatcttttgataattcctaaaatagagagctaaactaataaaaggatacttaaataagaggaaaattctgatacttcattagaggatgaccgttgaaaatgtaatcttcacaattcttaaaacaaagcttaaataaaataagtttaatgcattaaagcataatgt

SEQ ID NO: 13113 - DNA, 525 bp, Cannabis sativa
aaaatataaataaagtgttttccaacgttgatgatgatccaacggtgaaaattaacttctagtaatgattgttgttttttttatgtctagtgggtcccgctgcgagttactcggagcttatttttgtaattcccttggaggtgaattttggcgatgatagcttcaaaattttgactagtgtgagacgtgacttgatagagggcttaaatagattcaaaatgcaagttgaatcgcatcattcaaatgaaaattgagtgagttatgaccgttttactaaagacagtttaggttccagcgctagctaggttggcatctaacgtcaacctagacgctgtaaagatgtagaaacatccaagagaagtactttgagatgcccaagtgatagtttgacaccccttagtccttttatgtgtttcggtgaagctagtcacacattctcagagatgttgctgttttgcaaaaacgcaagactcgaaacttcctgcttccgtatgagccacagttgaagatgtgaatttgattgat

SEQ ID NO: 13114 - DNA, 588 bp, Cannabis sativa
gtgttaaatttttctgaattttttcaaaattttacagtatcttaaataattataatgtacatgaccatgaaaaaaatagacaaattctacaatgcattaggggtctactgatgcacccctatctatttcagcatatgagagaattttttagtctaattttagtcgtctacattgtagttatttaggatatcctgcaaaattttgatttttttttttaaaaaataacacgtcgaaaataggattcaaacagtctattttatgcacgtataaaataaaagagtttcgcgtgcaacagactatttgaaccctattttcggcgtgttaaatttttctgaatttctcaaaattttattggatgtcttaaatagctataacgtaaacgaccatatacaaaaattaagctaaaaaatcttctctgatgcaacaaataaaagtgtattgataaatccattttaaaggagtgtattgtaaaagtaatttttttaatcttataaataataatatcaatatctataaatagcaaaatctaagtatgagagatcgagcaagacaacaccattataaaaagcctataattaggattttttt

SEQ ID NO: 13115 - DNA, 509 bp, Cannabis sativa
aaatgcaaaccggtactcatttatggttggaggctgcaacaacaaagtaagcttgtgtttatatatgttcattcacttaaaatggaagcttatcaatttgaaaggcattcacaagtagagtagagatcaaatcttcagatcaaatggtgaaagtaaccattcaacactcatgttctgatttcagctcagaaaattgttgatcacaagactcccaaggatcagaaatttaaggaaagaaaagtagccttacatattttgtatgcagtcttactcgaaagcatgcaaatgtgcaatcgaaagtacttatgacgacttgtcagaattagattgatttattacagtatgagacaccacttttaactgaagatcttgattcgaagctaacactggattattcatcataaacaccaatctcaatttctttttgcaaacttccaagcaacctttccaatcaaagtatgcaagcaatctctttagtgaaacccaacctagaagtgttgtaagaaaat

SEQ ID NO: 13116 - DNA, 500 bp, Cannabis sativa
tcattattgtttatggtgtcgacatatatacagagaaagattttactgcaaaattagaatatcatatcctttttcaagcgattcagtggatttcggtacgcttccgctgatctataattctattgtttaattctcatgaattaattagggctaaattaatatttacagtatttataacatagggtatcaagagcatccttaaattaattcttgagaagttatatagtatttgtggtcttccatttagttactttttcaatttagtgaatgtcaaaatgtatatttcattattgtttatggtgtcgacaagattatgtttcttgtcttttccctccgacggttacggtggcttctccagcttggacccctccgcatgaagattggatcaaaataaactgtgatgtcagggttggtggagattccatgtgtatggcggccctggctaggaatcactctggtactgttgtgtgggcagttgttaacatgctcaatttcagaga

SEQ ID NO: 13117 - DNA, 564 bp, Cannabis sativa
ttaaagtttaatcatttcaagattgagatgaactggaaaatatataacggtaagtttatgatattttttctactatcaatatcggtccagtccgatgcaaacctatacatttgatccttgattactttactaatgtattagaaaagatataccacctatccaagcgtaagtaaatcatatcgttgattatcacatcaatgtaaatcagtacactgataaatcatgagactcaaatagcttaaagcatataatcacaattattttctactatagtgacaacactataattgtgaatatctataagttcatgatttacataatttatatattaaacaattaatcatgaaataaacatgtgaaccatgcaatagacaataatcacaatgaacattttatttttattgatagataaataagattacattgaaatatggttttatttatgacataaacccaacaaactcccacttacactaacataaaactatgagtacatttcaattaatcctatattcctaatatatttctcaatgtagtctctggcagtgtcttagtgaatggatt

SEQ ID NO: 13118 - DNA, 596 bp, Cannabis sativa
ttttcatgcttcgaaaagaagacccgttacctaggatacttgagcaatattattagacactagtggtacctagcacttctagacatgtctagatcatctatataacttttagtttaatgtaataacacttttagcaattaatatattatttaattaattgctaaaagttatatagatgttctagacatatcgtcttgtgattggctagcgatattcaaaggcagacgtatagtatgacatatagaggccatggaccccctagatatatgctatgtagttaagtttatataagttatttggttctttgttttgcttggttatgtaatttagtttgttttgataattaagtagtacatggtgatctcgtttgacaaagtcaaactaaaattataaatatgatatgttttatctatacttttatttatttaattttataaaaatctatttttatttttatcttttaagacatttatttttccttaataaaattagtttactttgcaagatatgtcattttagattttctcaattatatataaagtgataattcttactttcatcctttcagtttctatagctaccacacagtgatcttt

SEQ ID NO: 13119 - DNA, 517 bp, Cannabis sativa
agatgggctttaccaaataggcccaatgtcaatatatacttatttatttaccttatcattgggccatgtttacatgcaaaccttagcctataaatataacgaaaccccttcatgcgaagggtgagagattaaactcttacaagctaagatagaagctagggttcaaaatccaaacaaaaacacttgtgtaatactcgaaggcttttccaaccaaataatattgactcgtggactggagttcgttaatacccgaaccacgtaaaacttctcgtcttgatcttcatattttatttattttctttagctttattttattttaaattagtttctgaaatgttttgtaaatattttggtgctttcattgagagctgaagaaagatttaataccgacgttgtatactgtaacaatggtagccaccagaaccaccatcactaaacctactacttgtgtggggattcgaccatggatgatgttgatccgccccctattacacactccaaaacgggtgtagctggg

SEQ ID NO: 13120 - DNA, 836 bp, Cannabis sativa
gtagcaactggagtaggcacaccagtaggaatagagttgtcactgctgttgagatcagtgtttgagtgcacacaccagtagggggatctgtcagattgtgttcaacagaagtgataacctgtggagaacctggtaaactattatctgtagagggctaccctgcatcaaaaccagaaggttgacttggaagccaactattagtgggaaaaatcagtggagatgagtcaggatttgtaatttcaggttggtcattctcaatattggaatgcatgagatcagccattgtgtaagtacaaggagtatgagaacatgtgggtatgatggaagacacaacatttgagatagggactttggtgggtgaagttggactaactttggcaaatggaaagcaaactcttcaaaaatgacatccctagaaatgtaaagtctcccattcgaatcaagacacttataccctttatgattgaggctatatcccaaaaaagtgcaaggagtagacctatattccagcttatgtttattatatgtcctaatgttgggaaaacacctacaaccaaaggttctaaaggtggtgtaatcgggtttgatattaaacatgacttcaataggagatttgtgatctagaagtggggttgggagtctattgtggatgtagacaacagttctaaaagcttcatcccaaaacttaagtggtaaagatgcttgagcaagcaaagcaaggccattttcaacaatgtgcccatgttttctttcagctaggccattttgttgatgggttgtgggacaagggtgtctatattggatgccatgaaatttaggagctataatcacccccc

SEQ ID NO: 13121 - DNA, 525 bp, Cannabis sativa
attccatttgaccctatcctttgactccattgcctccttgtaggtcctaggttcattttcacacaatctagacactataagtgcatagtgaatgatatctgcatatccaaatctcttgagagctttatgagttctattagtttgatccctggtcagctgatattgtagaatgtttggatcctcatccctttccaataccagctcctctttacttgtatcctcttcaccatcttcctccacttctatttcagcttcagtagctaaatctagtcacctttcttggttgccttgtgtcaagttcttctcaggttccaccttaaactgaatactatcaggtttctcaggtccagtatttgaacttgattgtagtgtatctttgtatgctttatcctcttcaaacaaaacattcctactaacgaaaaacttttgataattaccactttctacgctccacagtttataatcttttataccttctgaataaccaagaaaaatacactttctggctcatagttctagtttatc

SEQ ID NO: 13122 - DNA, 556 bp, Cannabis sativa
tggtatgaggccttttgggaaagtacccaaaacaaatctatgagggcttaggctcaaagcggacaatatcataccaatgtagagatacatagtgtccgacgtcttaacatgaccttcccatattttaaatttatttttacgatatgaattatataaaaccaatatttcgattcgatttcattatacataatcaaatagatatagtttggagttcttattaccttgctctttaataaaatcattatttaattttaattaattcaaaaaatattattatttttaaataatttttttaagctgatattattaaaacagatttagtcaaaagttagagattttctaccattaaaatgtgaattggtttgtgacccaaataataataataagcataaaatgatgttaatattttatcaaatcttaatatactttgacatgtagattatgctgcgaccttttattttaacttatgtatttgtaaaattatttaattattataacatttgaaaaaaaaatgtatatatataacctaataaaaaaaactaaatattcgtgcctt

SEQ ID NO: 13123 - DNA, 730 bp, Cannabis sativa
cacagtacaaattcatgtattgcaataacgtaatttgatcaaataagttaaaaatagtctaaagatcgttttttccctttaggttttaatttatatcaattcaagagaattctaaagtcctagtctatcaaacggaacggtgcattttgcaattagtttccattcaaatttcccaccaaacaaaaggattaagcatgaatttgaattcttaagtaaccaggcacagaaaatacactaatatgtaaaaatccaaacattgtacatttgttttcgaatttaaatgagagttttcaagtgtaaccttgttacattcatgaagccatagctcccgatgagccggcccacctcgaaggagtcagagctggtgataaggctcgctttacagagccgagtcgctcgagttctggtgagtaagttgcctgggaatggtcgactgggtttgtgattgtgaatgagaagacgaaggcgcgtggagaagcaatcgtgtggtgtgaggagcatgattaacttaactgtgctccgccgcgctgctgtgttgtgtgtgtgtttttttttttttggacgaaaaatggcgccaactgccaacggattcgccgttaaataaataattgaagataagcgtggctatgctattgctatccgaactggactcaaatgcagttctaaatccacaattcgttcagttaccgatatgagtaaatctatgtcattttctctttttttttttttt

SEQ ID NO: 13124 - DNA, 529 bp, Cannabis sativa
  modified_base (206)..(213): a, c, t, g, unknown or other
atttgaaagttagcaaaatatctttttacaatttaaaatttctggactaaaataatcttattttaaatttcaaataaggtcattttatttaaaattaattaaataatttcaaaaataaaatacctgaccttaaatttaaaaataaaataaaataatcaaattttaaaaataagaaaatcaactaagcaaaaagatagatttttacnnnnnnnncaaggttcaaatatcactaatatcttaaattaattaaaacatattaattaatttaattctgataattagatttgaaatatgaaaaagaaaaatctaaataaaaaaatatttcacaaaaacttcgaaattaattccatgaagaagcatgaaaaaataaaaaaaaattgaaaaaatttgcatggggaggttactgccgaggtttcacgcacacagatcctgcaatgcaagatttccgcgcacgtatggaggggcttcagacacgctggtcgtgctgcttcagacagcccctgtttgaacacgggtgacacctgatccc

SEQ ID NO: 13125 - DNA, 645 bp, Cannabis sativa
catattttggatccaattaaattcatataataacttaaatttaatctaatctaatttgtaaaaatacaaatttaattagttattttaaattgattatttttttaatattgatttaattaatatttattaaaatatttttttttacataattaacgacaagataaaataaattattgttgttttatgtttttaacaacatttaaaacataaaacaataaattgaaaaggaaaaataaaaaatattgtatgtataaagaattatttaattttattttaaattatattttctttataaacatccaatccacaccgtaaggattttaaattttccaatccaattcaatatagtccttataaatataaatatatgcactttacaaataaaattagattgaatcatcagaattggattgaatttaacattttgaataaccctactttattgctcatcaagatctttactttttttttttaatattaaaaaaaaaatgaatctctaccttttttcttttaaattaaagattccttttaaaatgtatctaggcatttttatttatttatttctttttctatttcataataaaataaaagaaaaaattgatttatttattcctttttctatttaataatttatttttgacatat

SEQ ID NO: 13126 - DNA, 868 bp, Cannabis sativa
cgagggtcggtgacatccctgttcaagtcagatgagagaacaataaaaggatttaagaacaaaatgtgatctatagttctccataaataagtgaagaaggaaaagacactcaagtggggaattaaagactagcaagactggaacaaaagttattataagataaagtagcacccgtaagcgtagtagaaacacaaatatatatatatatatatataaaaaaaaaaaaacaatgtgtatggatgggagaaggtacctgtcggcataagcataagtgaggataggcccgcaatgccgaaactcaaaggaggagcaagggtcgagaggcttaaggcgtaagaaggattttaaggaaatgaagaactaagaaagattttaaatatagtgaagtgaaaatggattaaaaatgaattactaccgtaggatcgagatgagatcaacgattggggttaaacacatgcatttataagaaataacatatgcccacctacctcattgaatggtctcgtcaataatgtggtgcgccattccaagtttaatatcaggcaaggtgcaccgcaatagcgtggaaagtagctcaattacagtaaaaaaagtcacttaaaagtgctcttttggactgggaggcaagtgttaaccgcaaaagtctgaaaagtaagtattcttataaataacaaataaagggatgaataattcaagatgttcaaaacaagcaaaagaggacaaaggatgccccacctcttttgtcctaaaatccccttttgtcacatcgggttgctctttgatccctgcacgcatgcgccagcgctcgcatgcccaacgccgcacgcgccccctgcattgcccgtgcctgcaccccacgccgcctgtg

SEQ ID NO: 13127 - DNA, 644 bp, Cannabis sativa
agtagtcttaatattgaatactattaatttctcatatcaaaatttttaaatatgcactctgctagacgttatttttttctcttcttttgtttaattttgtgttataggctaatttaattgacaaatttttctaaaaaaaattagctattttcttatataaattgagtgctctttttgtttataaattatattgctgaatttgttatttatattgaaattttgatgatgtgacataaaacagttattagcagtatgtagaaagcctctgatttattgtgtcataactgaatacttatcagaaggtttattgagggcatatctacaaactcgagagcaaaactctttccatggatagactcattcaaattgcattggatatagctcgagactagagtatattcactcgcagggtatcatccatagagatctcaagcccaaaaacatctttattgatggagattctcacatgaaaataactgatttccggtatagcctgcaaggaagcatactgtgatgctttaattgatgatcctgggatatatagatggatggcgctagagataataaagcacaaatcatatgggcaaaaagttgatgtttacagattcggtctcatgttttgggaatcggtgacagggacaata

SEQ ID NO: 13128 - DNA, 534 bp, Cannabis sativa
ttttttttttttttgaataagtgagtttttttagtttagttaatttattttgtcattttgtagctattttattattttgttcattatctcataaataattcattatttttaaatattttcttttaaatttattatagtcatttcaatttatttttaatatacctattttttcccaactaatttattgttgttaatttttttttattattattttcaatatgcctttgtcctaactaatttatatacagttgtcaattattttattattaattttaatatgccattgtcattttttttgtcactcaatattttaaacatttcttattatttttacttttttttatttttaatatacctacttttattgttaataattttttttttaatttttaatattcctttctcatatttttttttttcacatttgctaatactctcgatttatttccaatattctttctcatagtttggtatcagagactcgtcaataggatagtatgagttctgtgcaaaaaatatgccaagccgataaaa

SEQ ID NO: 13129 - DNA, 517 bp, Cannabis sativa
gttactgctatgtaatgctcattacacattaagaattaataattacttaaactttaaataaataaaagtaaaaatatagagataaaaaaaaataaattaataggattagagatagatggagaattggattaaaaaaacaaaaaaatatacaaaataaaaaataaaagaagaagaagaaaaagagtgttgatgagagagagatatataaacattatatatatagatttaaggtaatatatgttttaaaaatttgagaaagtttagggttagatatttaagtttttctttaaatatatatataaaaaataaataaaaattattatttatatttataaatttaataaaaaaattaaaaagtgaaagaattaaggagaacaaataatactaattagagaaattttatagtgctatgtcatcgtcttatacttttcttttatatatatataagtattagtaggtaagaacatcactttgtttttatcgcgattgggaatctctttttatagtgctatgtcac

SEQ ID NO: 13130 - DNA, 524 bp, Cannabis sativa
taaatttatagttttgatgcaatttaaattattataagaataaatagatattttttccttcaattattacaaaaaaataaaaataataaaaagtcatgtctctaaattattctcgattttaaatattctaatacattatttccgttattgagttgtgactttgttttacttgtttataatattaattaagaagtaattagaatttctttattttattctctcttttaattactaataataaatattgaatataaaaaattagaaaaaaaatcacaaaatttgatacctacaactcttgctaaaaatagaatgtgcattgtcacaccttctttacataggagagctatatatatagatagattattgagttgtcatccttcctttttttcgttgtttataacattttttagttgctaatactaatattaattatgaagtaattataatttattttgttattctcttttaactaaaaataataaatactaattaacaaaagtcaaaattagaaaattataattctt

SEQ ID NO: 13131 - DNA, 514 bp, Cannabis sativa
cttttttgcaccttatcccccacataactgaacgctaaagtcttatttctaccaatggagctaggtagcccgagatacttgctattttcctcagcctctctaattctcagcctttgacagatagtttgcctcattccactattcgtattagtactgaaaaaagcagaggatttgccaaaattgactctttgccccgaagcattagcaaagagatcaagcaagtgttggacattagaaacttccctctccgtggctcgacagtaaagaaaactatcgtctgcaaaaaacatatgtgatacaacaggagcaccattagccactttacatccatgtatgagcttcctttcctcaaagctttgaataagagctgacaaaccttcagcacaaatgagaaaaaggtaaggcgatatagggtccccctgacggagccctctactaggaatgataggccccaccgtatgtccactactgactatgttataagaaaccgaagataggcatccattaatcaatc

SEQ ID NO: 13132 - DNA, 527 bp, Cannabis sativa
ctatgaatccatttaccctcttgtcaatcaatcatccaacaattacaacaccattcacaatatttttcccactaaattttctgcacttaatcccacagacaccactaatatcccatctaatgcagaaaatacaaatcccacacacataccagcagtttttccaactgcaacatcacaaccaactcaggttgttcctatcaatatagcagtaccaccccctgcttcaacatcagcagcacctgctgccaataaaaacatagcagtgtcattccctgtatcatcaaaagtagcttctcctgctaccaaaaattcagcagccattcccactgctaccacgacagcaccttctgctgcatcgaaaaattctgtagccactccaactgtcatatcagctgaaacaaatcctaataacattggcaccaaaccaccagatccccccatccaaaccaaaaaaggtagaaccatcaaaaaacctacatatcttcaagactacacatgcactttaaatgcatccaacaccacctatc

SEQ ID NO: 13133 - DNA, 509 bp, Cannabis sativa
ataaaaaattgtggcatcactatgagtatgtgtaatacttttatataatttgtgggtgtatatattattggttaattagaatttttattctcgaattttgacatgtatcaaatcatcttctttacattattaagatcgttaaaaattttcttttaactattgagatggttgaatttaaagatttttgtccaattttagtaaagaaagtctaacatgaatgaaattcaggtgcatggtttagtatatgtcaaagttcgaaggacaaatatgggaagtataatttagtacataaacaatcactaaattaataaaattaaatgaaaattcaataatgtcaatacttcaaggaaaaattttaacggccaaaaaattcaagaaatataatttggtacatgtcaaaattttaagaacaaaaatcctaattaacctgtattattattattgtatattcatatcatttagctccctaacttcacttatacgtattatttttctaccattacaaattt

SEQ ID NO: 13134 - DNA, 786 bp, Cannabis sativa
ttttactgctatgtcttgtccattaggaagtctcccctgaattacaccacagttttgaaaattttacatgtgtgccggccatttaatgctagacagtgactataatagttatctacttgaatttttaccttataaaccgcaccaaaaccaccttgtccgagcttgttattctcagaaaactgatctgtcgcaacgttaatggtttcaaaatcgtacagcaacgactccgcactttcaatttcatcaactggttcatatgtttttatagcttcatgcatcagaaacaactaataagttatatgcttcatgagctcatgagaatatatcataatctggttgtgaaacgtttaagaaattaccctgttattctatttcgtctagacaataggtgtaacgaaatctgatagatttctattgttaatagactgacatttctatagagttatcataaaattaagatatgttccaaaacagagcacaaaatatataggtaaagacttttcctaactagaagagtattaattgattttgtcaccacgtaccttgtacatttttctttgacttccttaatctcaaacacacaaggaagaagatgattagtaccacaccggaaaccgtggccacaacagcaatgatcatatttctagacttgtcgctgctcttttgtcctgcaaaacgataaaatttgctctgttaaccgtgtaactcaaacattaaaataatgaaagggaccttcaatctcataattaagtaccaagtcctttcaagctctgttaccttctgtaa

SEQ ID NO: 13135 - DNA, 564 bp, Cannabis sativa
gaggtaaaaaagtaattctgaggtgattcgaatgaaaaatagctgatgttatgatgtggcgagtctttaacagaaacacactgtttcatctaaaagcgatataattttttttttttttggcagtaattgtcaaaatattattcaatttattttgcatatttaaaaaaaataaaaaattgattttattttgtcaatcattaggtatggttgatttgtatttagttgatatttttttgcatagtagagaagaaattcttttatagaaattttttttttttttgaatgattttatagaaagtttttaatattgctatatttggtcataattgattgacataaatcattaattgatattttcgatttttctatgtatatagcatatattgtgatatttttatggcaagtattagagccaaaattatggttgtgtagctataagaaaacaaagcttgatcctatttgatttgccacatcagtttgcgaatttgtcactgtagatttggtagattttaatgatgattgatttttatgtagggtagggaaagtttgtggcagttgtaagaa

SEQ ID NO: 13136 - DNA, 596 bp, Cannabis sativa
gatctcgaactcgaccaggaacccgaatcacctttctcccctaaaattgaggttcttgaggtacccgtgaagttcaaaatgcttacctagcaaaatttatataggaaaagaagatactttatcacacctgcaatattttgagatgcaaatggatctacaaggggtaaggggtgacgtacggtgtagaatcttccctgccactgtcgtagaggatacccaacaatggtatttcaaattgtctccaggaaggtttaattcatgggattccttctcatcagaggtccaagcacaattttcctcctttcgtcagcttccctcacacatggaagacctagtggaagtaaagaaaatgtcattaccaggggagcccctccgggtttacattatcagatttatgaccgaggccccaaaggttaaagggatgactaaagaaggaagactagctgcaatactaggggcattgagcctctcgaagaactgtggaaagatattaaaaggatatctatgggatcgatggctaaatttctagatcgagcagatggatttattacgctaaaagaaattgttcggcgcgtggatattgttgggcaaaagaa

SEQ ID NO: 13137 - DNA, 792 bp, Cannabis sativa
ttcaaaccaactaagaggatccatccctagtgtttcaaatatgccatacttaagagagttcgaagtctcttataattctctctctggggtcatctctgagttacactttcaaaatctctccaaattggaggtacttggcttgtcttctaactctttggcattaaaattcaaatcccattgggttccaccatttcaactaacttcaatacatttgagttttttaaagttaggtccaaagtttcctagttggctcaaaactcaagtcaatatcagagagatcgatctttcatataatgacatcaatgatactattccaatttggtttaacaatttcatttctaaaatggaatatgtagatctatctcacaatcaattccatggttctttctcactgtataatgtgacttccataatgtcttatgtagacctgtcttacaatcaattccatggttctttttcactgtatgatgtggccttcccaatttatcaactagatttatcttgcaatcaattctctggttctatttcattgtacaatttcacttcagaaatgcgcaatcttaatctatcttttaatcaattctctggtactatcccatcatctttatcctctcatgaaatgtatcttcaaaataataagctcactagcttaacattattcatgtgcaaaccatttctagtttcttctcctcacaaaatatatgttcttgatctttcaaataatatgttatctggaagccttccttttcggaaattttagcaatttggcctttctcaatttaggtaacaata

SEQ ID NO: 13138 - DNA, 556 bp, Cannabis sativa
gttgagaataccaatctttgttaaaaattctggaatgaaaataccaacagctcccaacattgcccatcggcagtgaaccagctctgcttgttggttccaccttagagaaaataaatttaaaaaaaataaaaaaaaatgatatattgcgggtacgggttggacccgcccgtttttaggcgaacccgtacccgcccgccaaacaacgggttaaaactcaacccaatctaattttcgcgggtttttaatgggcggtttccatacgggcggattctaatgggttaggcggttcccacggtttagcggtttttatgttccggcctagttttaattttctttaatttctttcgcactgttttatattttatatttatgtgattttttttttctttaacttaattaactttgtattcatgaagttgaggtttgaaattaatattttataatttttatatgaatttttgctgtacttagtagtgctatgttcattgcggtcattaattatttcatattttaggttgagtaataaaatgattatttttcaataagagtttaggta

SEQ ID NO: 13139 - DNA, 504 bp, Cannabis sativa
tttaataattcaccaatacaaatacctaaaattattaatttgcagcatatatatttaaatttaacttcaattttacataaatactaagtttaagtttaattttttttgtgcctttatgtgttaattttttattagtttattaaaaatactttttaaatttaataatttggaccaatctacatggccattaattgttactacgcaagttacagaaatataacttaagtattattacattcaaaaattaaatttaagtatttatatgtaaccgagagttaaacataaatatttatactgcaaattaacttttttctcatatatttttaccaactatgatttatttttttaatatatttttataaaggaaaagtttaaatccataaaaatattgaaaaactataaattaaatatgtatctttttggaatttttgagcatttatgaaaatgtttctttattttgtgcaaaggatcatttatttaattttttaaatttgtaataggctg

SEQ ID NO: 13140 - DNA, 832 bp, Cannabis sativa
tgacctttctttgcatatttatttatattgcttcacttttctgtttctgacaaaaaaaaaaaaaaaatagaaaaaacttttcaattcaaccatggcttcttctgatagccattttgacaaggttcagacaaagtttccttaccatattttcaatagtattcttgaacaaactcctgggaacaccaagttagtaagtaagcttatcatatgtatatatagccctgattttttttttattttgttgtaattttttttacccgaagtttgtctaatttgtctactttggtttggaaatattgtcaatgtgctaaaattagaggatgacatgttaaagttagtctctttgtgatatgttgaattttcaattcctatatataatacttaatcatagttctgcaacatgaaaaaggtgccttcatcaaatcaaatgcttctttgattggaatgaagaggaggatatatgtatacatgtatttatataggttgcagtcatgtgtagttatattttctggtagttgaactttagtagtaattcatcttccattatccattttttatggtcatctcttttgcagcaaattccaaaggcattttgggtgaaatattgtgagtccttatcgagtcaagtaaagcttccatgtggatcaagagaggaggtagggttgaccaaaagtagtgatggaaaggtatgaatagaaaagggttggaataaatttgcacaacactattctttaagctgtggaaatctgttggtttttgaatattaacggaactctaattcagtgttatggtatttagttatcttctaactcctaatcattttcaggagcat

SEQ ID NO: 13141 - DNA, 504 bp, Cannabis sativa
  modified_base (274)..(278): a, c, t, g, unknown or other
ggtgatctatgttgggagagagataggagattgatgactgcacctaggtcggtggtcttgagcaaaggcgctagcttgcactacaaaaaatcttacttttagtcacaacaaaacttttgactaaaattaaaaaagatgtgactaattataaattatcattgctatgttgtgactaaaatgtccgtggctaaatgtattagtcacaaaaaatacaatttgttgtgactaaatatttttttaatcacaatgcttgttgtgactaaaactaaattannnnnaacttgtatctaaatactatgttatagtcataagtaacattttgttgtgactaaaagtcacatttagtcacaaaaaaatatattgtgactaaaaaattatcattaaaggtagcagttttttgtagtgttgatggtcctcggcaacggcaacggtgctggcttggtggtcctcgccaacgacgatggccttgttacttgcatccatttgagagagagagagagagag

SEQ ID NO: 13142 - DNA, 545 bp, Cannabis sativa
atgcaggttttataatcaattaacacgtgcttcctaaagtgactttacacacctagatatatagcattatagctaggtttcccagattattatctgccattttcttactcctgtggataagctttatcaacacgtatacctaactatatatatgtaaataaaatacgtatatctcaaaaattattaggtaatgattgatttttatttatcagaatctttgtgtaaaatttatatattcatgcactaaacttattaaaaaaaagagaaatgttaaaaggcattaatagcggtatctagcaccctcttatatgttaatattactattagtctagtattgagttatatatagtttaatgtaataatttttaaagattattactagctaatcataaaataacacgtttagataatactaagcactaaggaatgctcttaaaaaaaatggtgattaaaagtaatcgctacatactataatgataccctatgaagatttatatataatatgtaccacagttgatgggaatggtacatggtcgatcgatcag

SEQ ID NO: 13143 - DNA, 808 bp, Cannabis sativa
acaaaaatatggcataaataaaacccttattattgaaaacaaaactaaaaacccataccacataagctttatttaaaaatcccatgaaaagtaaaaactaaaaaaaacccatatattgtgtaatttctagtatttttaatatataatttattgtgggcttacaaattaagacaatttatttaagctaatattctaaattaagctaaataagtgatctaattaaatgagttcaataaatattttatttgatatgggctttgtaacgtgtaatactcaatagcaaacttaattaaagggtttatggggctctaatattagggattggtctctaagactaatctcaattactcctttcttcaattccgtaagaacttataaagagattttttttggagagaaaagctaatattattaatgaacaagttcatttacaataacagcttcaatggggcttggacaaacagccctccaaacaatatcagtatccactcgtaaggcatatctaactaaaccatgagcagcggagttggcactccgatgaacataactaatagagataccggagaaagaggacatctgatagataatatcattaattaagtcattgaatcgcccataatgatgttgaggattattaacattttgagagacaatgagagcatcactttcaatgagatggatcgggtagttgatgtgcttcaaccaactaaggcagtatgagatggcttttgcttctatctctttgacagtaaggttctccttaagtggcgaagagattgcagctataacttgaccatacgagttgcga

SEQ ID NO: 13144 - DNA, 596 bp, Cannabis sativa
tttgatgatttaggtatagttacaataaattagaatagtccaagtaagttatagtcacagaatactaaactcatattccatacataaacatacagtttgtatccattgacagaaaatagatattaaaacttgtgaaagtcaaattgtattgtccaatgtattctagtaaactgaaaaaaaaaatctatttggaatcttaaatttaaagtctaagacttaaatttaaaccaaatattacttgagttttattttagcttggaccaccactactaatctaagtctaagtttagtttgccttagtaagcatatacaagtaggagattctaagatcgaagatttatatcatttcgggatagaatgtcgggaatatagtcttttgcagcattcaatttcatagaagaaatagaatgacttcataagcaaatgatttataaaccatctatttaatgatatactatctaagaaaattctaaatgaaaaaactaagaggaaaaagtaaacgataatttcgattaaaataagaatccaatgatgtcccgtttaggcgagagtcaaaggcattcttattttatgaatctctgttggaaattatttta

SEQ ID NO: 13145 - DNA, 629 bp, Cannabis sativa
ccgtcttcgccgattgccgaaaacgggtcgacccgcccatgcccgatagctacttcgggaacctgatccaggcggtgtttaccgtcacggcggctgggcttcttctggcgcacccggttcagttcggagcttcgaccatccagaaggcgattgaggcgcacgatgctaaggcgatcgagaataggaacagcgagtgggagaaagcgccgaagatattccagtacaaggacgccggagtgaactgtgttgcggtgggaagctcgcctaggttcaaggtctacgatgtcgatttcgggtttgggaaaccggtggttgtgaggagtggcggaaacaacaggtttgacggaatggtttatctttaccaggggaagagcggtggccggagcattgacgttgagattagcttggaggctgctgctatggaaaagctggagaaagatcaagaatttctgctgaatgtttaataatttcaaaagcataatgttattggatctgatttagtgttggatggattcaattggaaatggggtttgtttactgattttggtttttatgattaagcaagcaataagtgcttaaatcataaacgccaattttatggtgtaatgtgtgtgtgtgtgtttgtttgt

SEQ ID NO: 13146 - DNA, 595 bp, Cannabis sativa
ctcaactctcttctctgatttttctctcactctactgaactctctctttcttacaaattacataataattggtgtttaaataggttagaaaatagctcacaaaactgagccactaaccccttgggcaaagccaactaacataactactttaactaactttcttaactaacttccaagaatagaaagtttaaaaccaaaactagttttatatgaattacaaccacaatctccaccttaattcatagaaaactagtggaacaaaatgcttgggagagtgaacctaaaaaactacacaggtccaagtttgagcaagtccatgaaatacttgaacttgctcactggcagcaccttagttcctgcatcagcagggttcttatctgagggaactttctccaattcaatctctccagattctatcttgtccctgatccaaaacattctaatatcaatgtgtttggatctctcacggtaaataggattcttgctcaagtgaattgcagattggctgtctgaaaacactgagacttttcctttcaacatgttgatttcttacaggatgcccttgatctaagttgcttccttgaaagcttctgtg

SEQ ID NO: 13147 - DNA, 550 bp, Cannabis sativa
tctaaagaatacatttgttgattcgaagagaagaacacaaatagcaaaagcgtaccttaatccataaatactgatgatcttaatccatcttgtagagatgacctttattgtgattttcagtaatgatcttccaaaaatacaagatttaagttctctaattttctctcttgatgggagaagatgagaataaaatgactcttgtttcttggggaccactaccattatgaaactaatatgttattcaaaataatttaatttaatttacagtggcaaagttaagatttttttttctaagaaaaacttaagaaactttatgatacgttacaaatgttaataatgtattatagtgctaattacaacctcttttttaacctctgcctccaaaaatatatgcctagatattcattttaagaaaaaaaaaattcatgacactgttcgttatagttaaataaagacacgcatgagtttgtgaaaaaatgtgataaatatcaaaggttttcacacataccttgggtgtcatctacagaattaggaatgataacttctcctt

SEQ ID NO: 13148 - DNA, 578 bp, Cannabis sativa
ttcaacaatgtcaatcatgtgcctacaccataaattttatacattgtcatgaaattaaatattataatttaaaaaaattattctatatactattttttttatttttcttcttttcaaatttacagtttagattgctccaatgatcgttatgtgaattttagttacgatttaagttattccgttaattgatatagatgtttttgtgtagatttctggaaaaatacaaaaaaaaaaaaaaattattttaaagtgtaaaaatataaaaactcatataatttattatattgggcattttatacatggagcctaaagcaatgttaggtatcttaagatgctttacatcaacactttggctaatgagtctaccaaaatcatactgttattagattaatggtattaatttttattaatcaaaatggcatataatcaaatcataatggccttaacaaatccaaaaaaaaacacaatcccagcatcaatccaattctgcaactggattggaatatcatgtctagagattttatattaaacatataagataagtaaaagaaaaggacttgtgtccagaaaaataaaaa

SEQ ID NO: 13149 - DNA, 514 bp, Cannabis sativa
gtcttttgtcctgataacttttttgctgaccaatcttgtctcgaaaaattttgtcttaacaaattttgtttttttttctatttaattaatttaaaaaatgtatttatttattacaaaagtaaataattattattttgtcaatttaaaatagattttcttcaaactctttatgcaactctttatccctaccattaatagtgtttaaaggtggcgattctaaaaccatggagctataattcgaagctctagtaaactagattatttattgagtctcatcaacaaaataatcatttattattaattccatgattactccactataaatatggaattacactcttaataattgtagaattatatttattgagcttatctatagtgtttattgatataatcaattctagtgattagccctatatgtgttggttcgtaattagttttggtcaaaataccattttatcttttctaattacttctttacctttacttctagtaattcactagtggaagtata

SEQ ID NO: 13150 - DNA, 529 bp, Cannabis sativa
agtcacaaagactcaacaaaaaagcgagaaaacaaaatacaaatttcattatcaaagaaaccagtaatatcaataacaattacatacttaaaacatacattaacataaacatcacaacttattacaattttaattatcagttatttgtctaataagacaaattatttctgatacctaataaagtatccatcaaccctcgtttccaatgagataaccattgtcactaatgttgtctaatgaggcaaccgataagtaagaaatctaacagcaattttagaatagagttataactctttcatactaacagtaattaccatatctcaattcatgtaatgcggtacgattgactttttttaaccttaaatccaaatttaggtgtgtaggcagacttgagtgtaataatactcgacgatctcgggccctcaaacatggatagctcctagggttaaagaattaagatgaaatggtgttggaattttgtggtttctgttgggttcttcttaagctgaagagagagaaagagagagag

SEQ ID NO: 13151 - DNA, 651 bp, Cannabis sativa
agtttttatgcttagggagcttaaatcatatacatctcctcctacaactctattaaatatgtactaatttttatattgtatgacaaaatgctctaatatatttttcttattttttcttcttaatttgtatttatttattatttttttgaaataaaattcattgataaacaaaaattacacgggatatggcaaatgagcttgtacaacaacatgacttacacaaagggggataacctcaatccacatagcactaatttagtggtcaaaacataattggctaacttatgagctacttgattagcctctctataaacaaaagacaaatcaattacattagaatgatttaacaagattcttaatttggtgcaccagcccatcaatatctctgcatccactttctgcattgtttattaactgcaccacttgtaaacaatccgactagacttaaaactgttgcatctttctattgattcccatttgcaaaccatatttaatggcgtgtagctctgctattagtggttagagtccttgcgaaatataaatggtggatgcaaacaacactcttcctccatcatctctagccatagatcccaagcttgccatattctcatgacaaataaccacaacatcaaaatttatcctaataatacc

SEQ ID NO: 13152 - DNA, 923 bp, Cannabis sativa
aattgaaagtcttgcacacgctttaacaagcacctgagctgcccaaatactcctccaaataaagctgagattttgtcccaattcagtagaaataaaagagccattcgggtagtaacgtgctttataaatcttaccaacaagtgaattttccatactgagcaatctccatccttattttcccaaaaaagagaggttataatcccgaagatcacggaatcctaaccccccgacattcttatgttggcaaagatgtttccaactaacccaacttacaccttggcttgtgttcttagattgagacttccaccaaaacttcgccatcattccttcaagactcgaacaaatctcttgggtcaaaagaaaaacactcatagcatagctagacaatgcttgagcaaccgacttaattaacacttccttacccgcttttgaaagaaacttagtttcccaactaaaaattctcttcctcatcttctccttcaagaaccccaacatggtgttcttgtttctacccataatacaaggaaggcccaaataaagtccattattcgatgcctctctcaaccccattaaaccacacatcctgctacgcacatctgtcgtagtgttcttactaaagaaaatagaagacttggcaaagttgacttgttggctagatgcaagtgcataggtatgcaacaagcgcataacattttgagcttccctttcattagctttacaatacacataactatcatccgcaaagagcatatgagagagcataggagcttctctcgccacacgacacccagtcaaaagatgatgcctctcataataattcagcaacgaagaaaggccctctgcacaaattaaaaagagaaacggagagagcggatcaccttgtcgcaaacctctactcggattaatagggcccatagtaaacc

SEQ ID NO: 13153 - DNA, 957 bp, Cannabis sativa
  modified_base (696)..(696): a, c, t, g, unknown or other
tcacaacagctcacacttactattctgtgctatgagcattgttattgggcatcagtagtgtctagcactcttaagacgtattgccttacaattgactaacgatactttcaaaaaactattatattaaactatttgggacccgatactaaattagaccaatagcgatattgacacgtaagagggtgcttagcaccactgataccttttagcattttgcgtgcgctatagtggtagaaattacctttattagtattattttttgtttgggtcaatggtttgattctcattatagcttctctctcgaaaaagactagaggctcgtctttttaaaagttagcttgttgtaggtggtgtcatttgtgcaatgggaacctattagagttagtctcacattactaatatgtggaaataaattactatatataagatgaattggctactcttcccattactaattgattttgagatagaactccattcatcttttcctgaattctaacatggtatcagagtcacttgtgatccgttgtgagccaaaaagaaatttctgttgtctcccctttaacctccatttgggacctttcggccaatgtgtgccagtttctagtgttgagtctttgacctgtttcaaaaatccacaaatttcctaacgtgtacacccacaaatttcccgatatttggccttgtgggattctntcaaatgtcacgttcggtcttgtggtctcttaaaggttgttcgttatacccatactttccaggctcatacgtgatgagggtgtattagagttagtcccacattgctaatgtatggaaataaattgccatgtataagatgaatgggctactcctcctattgtcaattggttttgagatgaaacttcattcaccttatcctaaattctaacagaatccttgaggtagttactaataatccaattaaagtagattgaggtataa

SEQ ID NO: 13154 - DNA, 602 bp, Cannabis sativa
caaattaattgtattgaatatttccaataaacattgactacttattcacttttttttttagctattttactttttatgcattagatatccattataaaagtaggataatgacataaaatattattttttataaaaatttatatttttacagtactctataaaaatatataaaaaaacaaaataataataacaagaaaataatatcaaaataacaataaaacaacatcaaaataatataaaaaatatcatacatataataaaaaattaacaacaaaataacaagaatacaacattaaaatacactaaaaaattgtattttctataaataaaatttaaaaaacgtaaaaatattaaaaattttgtacagattgtatttttataattttttttattatttttgtgtttttatttaaactatctctataaaaattgagttagatataattttggtacatattttgtgctaaatttaatacatctaaagtatataacacttaatatcctatattagttaataaccaatgaagatgctctaagagtatatcaccttatattggtttagtgaattaaacatcatcagatatcaaaccccaaactcatcc

SEQ ID NO: 13155 - DNA, 571 bp, Cannabis sativa
atatataaatcaactaaaaactaacatattatatgtacaacttgaaaaaataaaaaaacacaaaaatatatatgtatgcaatgacacaacaataatcataataaatgtattatgaaaaattaaatatattatttttcttttatttgaacaactaaataatactgtacaaacaactagataattattaatgtaattagaaatttaatttggcatcaatacattatgtcaactaaaaaaactaaaaataatacaaaaataatattaaaaagtaataaaattataaaacacgtgtatatcaactcatagatatatatgtacaaaaattgaccccttttaattctattatgcaacaaaaatacaactacataacaacacctattaaatatgcaaagcaattggacatcaaaatactttccccaaccttaaaaaaatgtaaacacaacatacacaaccttaatacatgtgtgaacagctaaacaacaatcaacaaacaactatataactgtaacgtccccgcttcaagcttccattaggtctctacacccaaagaataatgactcttatacacgag

SEQ ID NO: 13156 - DNA, 643 bp, Cannabis sativa
cagcctattggttttggttaccatattacaatatcctattatgatttttttaattaaattttatgctagatataatatacttaaatattttttttttatttaaattgctatgtagtaatttctgattggtttagattatcatttaatttttatatttttttaaaaaatattaatttaaatatactaataagaaaataacagctgaataataacttgacatttaacgactagatatatacggaattttagaaatataacttaagtattatcgccaaaaattaaacttaaatatatatttgtaatcaaaaattaaaattaagtatttatatcacaaaatattttttatttattttagaattttgaaagaataaaagaaatttaacttgttactctaattactcaaaatttatttcttagagaggtaaagatgatgaatgaattaagtaattcttattaattaagataaattttcacaaagagtaaatatatagataattatagacaattaatgaagaggctaacaatataactaatctttaataacaaatttaactaccttaagctctattactctctctcaaactaagagtagacaaagaaaacaggcaaaagaatttcctagtaattggaattgagaaagtaa

SEQ ID NO: 13157 - DNA, 503 bp, Cannabis sativa
ttcttttttatgttaatttgatgagctccttaatccttaacatttaaaataaaacacctctgttgcttttaaataaataaatacacctctggcatagattgagtttttgcattttattaaccgctatttaagatttttgttcctgaataataatttatatattattgtaccctaaaatttttggttccgttaaaaatagtttttatgaactagtttaatagtgttatatattggtcattatcttaaattttaataaaataataaaataatgacataatacttagtgagttatcacgtcattgtcttttaaccgtccatctatgtaattaatttaaaaatgtatatttttttttttatttagttttacttaatagtttaataattttttaaaactgtctaatttttattttttttaatgttaaattatatattgatgtgttaattaattaagtcattattttgtttgtcatgacgaagaaagattaatttaaggacataataat

SEQ ID NO: 13158 - DNA, 689 bp, Cannabis sativa
gatcactttttgttatgtgacattgaacacacaattaaagtagatttttaacaaatagactatattttgtatttatatcccttgtttacatttttataggagatgctctaaacgttactgaaaaaagctacctattgtttttaaaaaaatatataaatatattacaaaagtacaacatacaataccaatttgcaaccatttgatgcatacatagttaataaaaagacatgtcaaagtattaaatgtaaataaatattactcatttatatatattttgaaaagaaaacaattccattaaaaggcgtcaagccaaaagatcgagaaataaaagataggtaatttaaacagctaaattagcgggcaagcctgatcaccacacctgagcctcatctaaatctaatgctcgttttgctaaagaatgagcaacatggttttttgaccgattacaatacgacagagatttgctactgaaagaattcctaatatgattagtatcattgagaacaatatcaaactcattgagacaagggaccttgctattaacagcaagaactacctgctaacagtcagataaggcagtaatcaccgtataccccatctgcacgcagcaagaaagcccatagagtagagctttgacttcggcaacgtgcggttccaacaattctgcgcaaggagccgcactcgaaaat

SEQ ID NO: 13159 - DNA, 581 bp, Cannabis sativa
atcttataaatggttagtgaaattccataacaactaataaattaaaagttaaatagcggtataattacttaaagttttaagtttgtaagtagcataatctcaatgtttatttttaacggcataagtattcaatgtttgtaaaactgtaatttttctctaattttgtcagtacaaactctgttattttcttaaacaagctacatataaggtctaaattctagatcattaggtctagacagaaacatgtagtatcagatacttctaagtgtaatgaattcaaaacagagtctgtactgacaaaactataggaaaattacagttttacaaatattgtgtacttatgccgcttacaaacttaaaactttaggtacttatgtcactatttacccttaaattgaattaggtacgacttaatactcaattccaccaataccgatataataccttcagtgtggtattttttagcatttctcattaaattaaaacatgtaagactcaatacttaattgtactaacaacgatatgactcttaagaaaatatgtacgtacccgtcaatgaagtcgaaagaactcttgaagtg

SEQ ID NO: 13160 - DNA, 504 bp, Cannabis sativa
attaaaggttatttgaattctgatgtattagagttagactcatattattaatgcctgtggaaataaattgtgatatataagatgaatgaactattattttattgtcaatttgttttgagatggaatcccattcatcttatccaaaattctaacataatttcttgaaaaatttgtgggacatttttaactacattgtaaaatattattttaaagtatatataaaattgaaaatactataagtagtataaacgggtcttaggaattttttttaaaaaaattaagtctttattataagaataaataatatttttaaaaattatttaaaaaatataaatatatttttttaaaaaatattattttatttattaggccctaacataggtgggaccttaagctcgagcctagccaaccataacctagggcgaccgtgtatgtatatttgtatatatttcataacattcattaatatttcaggcattagttgctataaatgaagtgtctaaa

SEQ ID NO: 13161 - DNA, 522 bp, Cannabis sativa
tataaaagataatatattatttttatgtttgttatagcttatgatgttgaaaaatataaaaagaaaaatgctaaaaaagtttgagtggtatctagtgtttttgtatgtgttaatatttttattggtttaattaaatatcagattttatataattgtatacaataacttttagaaagtattagtagtcaatcataaaataacatgtctataggtggtaaacactattagtgtctaataataatacttaaaaaaaataaatgcataatatacatcttaaagggttgtttaggtacaatttttttttttcttttagtttcttgaaaaaagtttatctatttctttattattattattgtgtaggttgtagttttttaagattatttataaattttttaaaaaaaatttgtagtgtacagtaccaaaaaataaagtttaaacagttgcttatgcgtataataaaaattagaataatttaaaaattaacaaatgattttaaatgaatacaatcctacaaaaataaaa

SEQ ID NO: 13162 - DNA, 1082 bp, Cannabis sativa
tttaaagtgggttgttattgagttgtttatttgttgttagttagttgttcaacaaagagaaaataagtatatgtttgttttttactggtatatatatttttaagtcggtgtacacagatttttttttattactttttagagtttatgcaacctatggagttgtttttattcctatttaattttcatattatagtgaaattgttatgaagttgtttgttggttgttatttagttgtttaactaaaaaaaaaaattaaattatatatttactggtaaatgtttatgaaatttacataaaaacaaataactcgtatttttgtaaaaaactataaatctgtaaaatataaacttttttcatttattagtatttacaaaataatcccaaataataactaaaataaaatatcaaatcaaattatacttaataactatatatttagtttttcttaagtacatacttttttgagctgttgtacaagtgatttctagttacttttaagtttattttaatttactaagattatttgtttgtgtgtgtgttttaagttaacacaatttgttgatttctaataattttttatattaaattagaattgctatctcattgttatttagttgttcaactaagagaaaattagtatatatttaattttccataggtgcgtatatttttgagttggtgcgcaagtgttttatagttatttttttatttttatttttgtgattatttgtgccttttttttttttttttgatgtttgtagtgtgttgatgtttgtttaatttgcatgtttttgtattatttttacattgcttttagattgtcggtttagttatttttcttatttaattagaaaaattgttgtgtagttgtatttttgtagttttttggttgaccaaaacatttattaaaaaatcatttttatttttcacaacgttgatacaaaataattataataataaataaaattatcctatttaaaattaaagtaaatgttttaaaatataaataataaaaacaaactaatgaaataataaattataataatattttttaaacaagaaataataataaatgaaatttt

SEQ ID NO: 13163 - DNA, 588 bp, Cannabis sativa
tctgagagtttctcttagatccttctctaaagcaattctttctatcccttttacagtgaagctagaccactatttataggggctaaatgcatgagggaaggtttctcttttgcttacaatatctataatgggaaaaaacatttattacatatttagaatgcatgaaatatgggatttagacagtctgccatatccctttgttacaatcccataattgtagggattgccttcgtgcttgggctttacgataccattctggagtagtcaagtcttggtacacagcttggagaacgaacctcattctttgctcggataatctgccctttacctgcttggacaaatgtgcgtgcagatatgttgcttgaagtctattcagaatatctcttcgtccaagtgcaagaaatgatggacacgtgtcactcgtacatgctgccatgtcactgttcaaaaaatgggataacaatattgaattcggttactaacatttatgaaggaatctctcaaccacttgagagaatatctcaacaaccttaaaatatctataaccaaatttcaaattagatatttacctagttaaattaattaatc

SEQ ID NO: 13164 - DNA, 594 bp, Cannabis sativa
aagcattatgtaatgtgatgggtatcattgccttctcattaaattagtctccgaaaaactaatagttaataaaaagtgacaacgtgctgatagttaatacattaaaacagactataaagcacatttaagcaataataaataaaatctcttacacaaaacaatactactctaccttaaaatccaaatgtcatttctttgagacagcatcatctcacgagctttttcctcctagacacttgccacatgcttttgctaaaataattaagaaagactaacaacaaagtttaacgttaaaattattgtaataattattaaaaatctaatataataaaatgaatatattatgtatgattctcttgtttttttataaaaacaaggttgttttaccagaaatactcacaagctcagccatgactactgctatagctagaatggaattagtaattctaaatctaatgccaattttcttcttattcttttcatcaacttatgcccaatcaaaggtatacatcgtttacatggaccattcagtcatgcccagatcattttctacacaccacaactggtttaagtccactctttcttccatatcag

SEQ ID NO: 13165 - DNA, 623 bp, Cannabis sativa
ggggacccaatccaagtcccgttttgggttccaagtcctaggttcgagtttggttcttgggtcctgggtctggcaccaatttttgggtccaggtctgggtttggatctgggtcccagtatgtgtccaattcccggtctgggtccaagtcctggacacagacccaaaccaagacctagacacagacccaaaactctaaccggaccaggaccaaaacttgaacacaaacaaaccttgggattggtcccaaacctgaatcgaaacccgaacaaggactcgggacccgaacccagacctgaacttagacccgaacatggaataggactcgggaccgagaactgggatcgagacccaaaactaaacccctatctcggttcaggacctaggcccagaccaagacccagacctgggacactaatcgaaaccaaattgggacccgtgattggtatccagatcttgtctcgagatccgagaaccagggcttggacaacaccaatagtcgatgtcttgatctcggacttggacaaggaccctaagatttaccaggacctgaacccagacccagacatgggacccagaaccgaaacttgaacttgaacgcgaccaggaccctggaacaggatcg

SEQ ID NO: 13166 - DNA, 1076 bp, Cannabis sativa
agtaccgggttttgggttgaacccaccaacctgcccgccaacccgcaatttaaatatattatatatttttttattttttattacagtttatatatattaaattataattaaaaaataaaaaatcctaatttttttttaaaatttaaactctcacattctttttttttattttttataaatttattttcttaaataatataaattaaatttatttttatatataatttttcattaaaaattatatataatatataaaataatttatattcagaaatatataataattttttaataaaatatataaattttattttaatttgttgttagttttattagttttaaataaaaaattaattttttttaaagagttgataaagttggctgggtcaacccgccaacccggtcaacccaaccaactgaaacccgccaacccgtgcccttttcatgtccaggttcggtttcatttttttgaacctgaaatctagtaaaccggcccgatgttcaccctagtttgagttatttcgtgttgtttgtttttattcattataacactgttatagaaccgattctattttaatgataattcgtttgagttgtttggtgttatttatttttattcattatgttacagaaccggttctatttttagttatatctgagacatctatttttggtgacttttctagtaacttttccagcgatggtgacttttccggcctggcaacttttctggtgtcgttgacttttttggcgatccttattattattttacaaatatgaatttttacttttttttacaaaaatatggaataaaaatgtaaaaaaaaaaaaaactcataattttatggtattatttatttatacttatttatgaaaatttcccgataaataacttaggctgttttgaaataaaggaattttattataataattaaaagagaaatttacacttacggatgaaattttggaaaaaatattacaactaccactagtgttttcaattgtgaaatatatttttagttttgcaatttcttttggtaggtgtatacgtaggtgcgtttttttttttttttttt

SEQ ID NO: 13167 - DNA, 625 bp, Cannabis sativa
ttttttttttttttttttgggtggcgttgaatgtgcttatgttggcaattgttagcattttcattagtgagagcaatcccctaaaagaataggcaaaatcttatcttccgaaaatacaatctgagtataaacaagagacacttgcaagtgcataatccaacttatttgcatgcagaccatttaacaaaaacgacaacgatgcccttaaacatgtaaagaaactgaagatctgatagactgcaccacactcaaaccaattgcctctgccatttcaggagccactctccctgccttaagctcgatgtttcctggtcacaaatccctctccaaacttgcctacttcatggttgaaaatagctgcatcaatattcgctttgatcccattagcactaggctttgcttcaccaaagcttaacaccatctcctggaacacccacaatcatagggcttccaacttcagaattttgagtatttcttcattgatcaatagttagtcttggtgaataataattttccactctagagcttttcctttgccaaacaaaagcccattaacggccttctaaagcacccaacacaggccacccaacacaatttagctaatgaaatgatattcttgaaagga

SEQ ID NO: 13168 - DNA, 517 bp, Cannabis sativa
tacacccttaatattttcaacttcaaactagttttagaaaattctacaatgaaaaatgtgtatcgatgattatctgtttgagtatttaaaaaaaatattatgattatatatattgtagttatttaaaatagtctataaaattttgagaaatttaaaaaaattttacgttaaaaataaaatttaaaaaatctattaaacgcgtgacttttttattttatatgcatataaaatagacagtttgaatattaaattctatattgtaaattattctgaattttttcaaaatttacgggatgtcttaaataattataatatatataaaattagactaaaaaattcttctaaataccgaaacagtaaaaaattgcaccaatacatgaatgtacacaatcatgtaaaaaaaacaaaaaactaaactttttttcctaaatacaaaaataaaaaagatttaccaaaacaccacttacaacatctaaaaaaaaagccaccaattacaaattttttctaaaataattta

SEQ ID NO: 13169 - DNA, 530 bp, Cannabis sativa
attctagtaccatccaaagtcaatttctcctcactcctctactcttaaaaaaatgcagttagtatgacaaattatttactttgaaaaggcaaatgcaaattacaattaaaaaagaaaaaaaaaataaagctaattagaatttttatcccaatcatgcattttgaactttttttgccgtttaaaattctccctgaattattgaaattgttagatttaaggatttttgtctaattttattcaattttactgttgtagtgattgtttatatactaaattatgctcccctaacttttatatctaccaaatcatgtccctcgaactttgacatatattaaatcatgctctctcaactttcattcatgttagacttagtctactaaaattgcacaaaaatctttaaattcaactatctcaatagtttaagagcatttttaacgacgttaaaagatcagaagcgataattagatacggacaaaaaatcctaattaccatataaaaaagaatctcactttaatgtcctgttcattatt

SEQ ID NO: 13170 - DNA, 536 bp, Cannabis sativa
gtctagttcccaaagcttttatactaattgtgattttatgtttcattgttcattcacctacttatcatagacagatacactgagtgaatcccaattattttccattgtatggttgagattaattatatatcattgtgtgtaagaagtgtgtgtaattcgagtgaatcccaattattttccatttccattaaccatatatcgtgataaaaagtttcatgcgcatgcttatacattctgattaattgcctctaatttttttttctttttaagtacaagaaattacatcttaataaaggttgaatttgttttcatacacagcagactcagattataacatcaaaataaatctgatccgtttaaattccctgaaccctagatgaacagaggcgatctaattagcatatttccgtgaacatcttcttgctagaagcgtgtgttttcatatacttgcaattgatttgaaaatatctactggttgttctatggatcccgtaatgtcaatgaaattattaggctggaccatttttttccctttt

SEQ ID NO: 13171 - DNA, 522 bp, Cannabis sativa
cagtcaatttaatttgacttttaattttaatttatcatcatcatcataataataatattattattattagttcctttcaataccacttcttctatattattaactaattagaaaaacaataaataaatattttccctttttaatttcaaaatacattaagccctatcaataatgcaacatgtttttttaggaaatttaaatagctaaatttttattaataggcaaatcagacaataatttaaatgatataccacttaaatcttaatcgaaattcacatggcaactcatataaatattatcggagtcacataaaccgtaaatttcttttaaaaaaaattaaaaataatttataaaataatttccctataattttttatacgacatataatatatattttatatataacagcatacttagttattacaactttctacaattttttttaaagctaatttattttatatcgtaataaacttcttcgaaatcagtttttgatcaaaattaatcttaacttttaaata

SEQ ID NO: 13172 - DNA, 530 bp, Cannabis sativa
tatgttggagaggaacaacgttcaaaagaacatgatgattctgttccagtgtgagttggtggcgaaatttgtgtggaagttgttcaccaagggcaactttgatcctcacactaacaatattgtatgatgcggttgccccgttccccacccttccctttacctttaaattgaggataccatggtgggccatgatatttccagccagacaagcgacaatgaatcacaataattaataatgtgtatttttttttgaagtaactgtaaagaaactaaaacagttacaaagaggaggaggagaaacaattcctccaaaggatatccttatcctgcctgagggcttctcgagcattgttgtgtgctgtggtgttgtgaactcgagggatgtaatgaagagaaacaccagagaaagaggatagggacttcttgatcagctgcactacacttgataaagccaaattgtcttgtcaatagttttttatccttgtaattagttgctgggaatccgattctatggcatctaggggaatctt

SEQ ID NO: 13173 - DNA, 563 bp, Cannabis sativa
ggtaaaaattataatttatgatcaattaggaggaaggagaaaaactaataggcattaataaaataagtaatctaagaaattaaaattttgtccctaattcttcgaactttatttaattgtttatttaattttactgttttcttacattctattatcaagcatcagagttttaatttgtcaaatagacacgaagattcaatttattagtatctagctacagttcttgtgggattgacctcactagcatgagttattacttgaaaacgtacacttgcgtgtctaatattttgcaacaaatttttagcgccattgtcggagaactgcattaactaatattaacgaagttgaattttattctaattttttttttcaattcttctaattctttttatgtcagtttttttcctcgtctcacgtataggtagtttatgcgacgtcaaggaccaactgcacaaagtgtctattaatcctgaaatagagaaaatttgtacacagaataaaatgaacaagacattggaaagagttgctcaaagagaaataggggttgaagtagaagaagtgat

SEQ ID NO: 13174 - DNA, 791 bp, Cannabis sativa
gcttcatgaaaatattaattatttcagcataattataatcttttagtcaatttttacgtctgaaattacatgctggaataatttttatttttttttcacagcagtattcgatataattacactattatattcttgtaaatttttaattttttttgaatagtttacaatgtcgaaaatagagttcctaatcatatatattttaatttactatgcgtgtttaaaaaacttcatacgtatttttgacactgtaaattattcgaaattttttaaaaatttacaagaataatgttgtacgcataacaaataccgcagtgaaaaaaatttgaaaaaaaaaaatttcagtatgtattttcaagcacagaagtcaactaaaaagttgtaataagaagttaatggtatcacttctctaattatttttttgttgaataatttcgttttttttttaaaaaacaattattatttttttatttctagcacataaatatgttataattcattttttttttaataaacgggatagtaaaaccatatatattttagagaaatattaataaaggtgtaatattattatttgtgtaatttaatatttataattgattttatatattttcctttaataaaaattataatgaattggtaactgatatcacacaaataattatatataactagtaaaatattaataaatgttagtgtgcatggcacataaatatgaaagagacatataatattttatatatatataaataaatttataaagcttctttggggaccatatgaagaagatgact

SEQ ID NO: 13175 - DNA, 536 bp, Cannabis sativa
gttgtatacattaataatttataaatagtatttttcaaaatcactaaaacaaaatgtataattttgcttttgaggtaggtgggccataagcatttgcctagtccgattatacttaggatcatacttgtatatatattattataaaagaataattgcataaggctttgtaaaatatttatatttttacgttcaaagaatgttattttaaatttttacggttttttaaaaaataacatgaaaacaacataaaatcaacaagaaaattacatgaaaataacaacaaaaaaataatatacagataacaaaaaatcaacaagattacaatataaaaagaccgtattttctgtaaataaaattagaaaaattgtaaaaatgtttaaaattccgtgaaatcgtatttttgtaattttttgttgtttttatgtttttgtgaaataatccctattataaataatattgttattaagcactaatggttcacttctagatatgttgctttgttattggctagtgttattcttttaaagttatcaatt

SEQ ID NO: 13176 - DNA, 511 bp, Cannabis sativa
tgtgtactgaaggtattatctacatgaacagaatgtataaatgacacactttaattagaaaatttataataataaatgaatgataaaaaaaattaaaaaacaatttttttctttattttaatctttcctctctctctctctctctctctctctctctaataaatgcgcaagacctacagttacttgaagcatcaacttgacgaagaacgacgttgtccaatatgacgttgtccaatataggactgactgactgtcctcagtaaagagggccgaataactaaagacattaatctaggacattctggatccataatggaccttcctgcccttggcaaatagctagtgcctcgcctgggtagggacttagtgccattcaatgtcgatctgttggacgacatggtaattagtgtgagcgagttgaccactaaaagttgggtgataagtagtagcattgatcgtgtgttattagccaactctacgaggaagcaggaagctggaatattttgacctt

SEQ ID NO: 13177 - DNA, 515 bp, Cannabis sativa
aaaaaaaaagttaaaaaaaaagtgaaaaacaataaatgataagcaattaccccaaatggggttgtttggtgtcataatttcacaagtctctactaaaatttttacctatgaacaaaaaagaaaaaactaaaattatatttggttttccattcatttttgagtctttttcttttttcttttcttttgtaatccttgacaactcctcttcttcttcaagaaaaagaaaaaaaaaaaaaaaagaaaagattttttttttgttattttttaaattatttaataaaaataattaattttctaatatttaaaataattagattatgtacaagtatgtatacgcgagcagtgtactgtgacatttaactgtgatttttgaacggaggggtacaaagcaaaacgaaatgagagtttaagtagttttgctcctaacaaatcgactttagtagttacgtgttaaaaaaattaaaattcaagtggtttagtcgtcaatattcatattaaagatactgtaaggtttc

SEQ ID NO: 13178 - DNA, 685 bp, Cannabis sativa
gaacttggaaccaacccatacccagaatcagaactgaaactttgactaggacctggacttgagactagaactgaacccaaacgcagaccagaaccttaacaaggactcgaacttgagacctaggacccgaacctggaccacgaccaggactgggacctggaccaaacctggtcttaaacccttgccgggacctgagacacgtgacctagaccaggatccagaccttgaacaggacccgaacctgaacctagaccaagaaagggaccgagacctagaaccaaacccagactggacctaggaatcagacttggatgggggacctagaccagggacctaggccgtggaacccagaaccagatctaaaaccgacactcgaacaaacacctggagcccgatccgaactagaccgcgatccagacccaaacccaaactcggacaaggactcaaaccccgaccagaactcgaacctaaactcaaacttggaatcacaactagaactggaaccggactatgactaggactaggatctagacccaaaccctaaactcgaacctagaccgggacccaaacccaggccagaattgggacctggacctagaatcgagatagggacctaggcaacggaactaagaccgggacccaagaaccaaccctgacccatacttgaacttaggacccaactcgt

SEQ ID NO: 13179 - DNA, 738 bp, Cannabis sativa
tcctactatagtcttgctctataaatatatagatgtttggactttggagacttgggccacgtgaagcatattatgggccttaggccatgttggtgatgttgatgattaaaaattgagattgcattgtcttattgggccttttgaaattgggtttttgtattttctttttaccacttttcctgaaaataacataaaatttaaagtaaattaaatatttccaataaaatttaccattaaaattatgaaatatttaatttatattaatttaatatgcataatgaaaggcttaaaatgtacaaattcaagctttaatcacatactattattttagttaattgcttttaataaaattccatgatttattcaaaaagaaacacaaaatgtactttgattctaataaaaataatatagtactatatatctctataaattatcagaaaaaaaaagattatatcaagatcttaataaagtaatatttgtattaaattaactaaatgattagtttaaagtaaggagttttttgataaatgtagaaaaatgtagtaaaatttattttaatatagcataaataaataatacaaaaaaatataaaattcaaaaataattaaagctaaaatatgggaaaataataaataaatttaataacacttgtaataataagttgccgaaaaagtcaccggcaccgtaaaagtcgtcggaaaagtcgccaaaaaattgttatctctggaaaagtcactg

SEQ ID NO: 13180 - DNA, 640 bp, Cannabis sativa
tatatataataaaaacattaaaaaaaaaccttaatcgggttagacaaattaatttagattcattggacgggttgaaattattttcatcccacccaataaatagattagttatatttttcgatggatattttggtttggtttgatttaggcggataagttattcaggttgagcggtttttaaaaaattatgtacaactataatatatatttttatttttttaaataattaagttgttcttctaatttctaaataatatattttttttaaggatattggtggcaaaattgcctgatttttttttttttaacacttaactacataaattgatttttttatggcaaaacctaccaaactcacattctctttacacttccgtccaaaaacctcagttaagtgtcacggtggactgcccacatgtacacaagtgtacacgtgacacgtttttagtggtccacataatattaattatttaatatattataaaaatagtttaaaaaatataaaaatagaacaataataaaaaatataaaaatagaacaataataaaaaatatatattttttcattttttttcttgttttcttcttctctctttatctctctaattatgaaccctaatttcaactctctctctctctct

SEQ ID NO: 13181 - DNA, 573 bp, Cannabis sativa
  modified_base (173)..(175): a, c, t, g, unknown or other
taattaagagtaattaattcaagtaaaaaaaaacttgcggcataaatactaattaagtttaattttcagttgtaaataaatatctaattttaagtttagttcactacaaaaaataaaaaactgttacttttagtcacaactttttagtcataacataatttttttgtgactannngtgacttttagtcacaataaaatagtacttgtgactaaaacatcgtatttagttaattacaagttgtcactaatttagttttagtcacaacaagtaaaaagacagtaatagacttacaagagtgaggttgaacctacaaggattatagttaagtacaataaaattaaacttctacttctatttggcaatcatgaatttttaaagagaaaattagaactaaaagcaataaaaacagaaaacaagtaaattacaatacaaattaacaatgattagagttagggttattgatttcaattgtatctatcttatatagcatgatataatttaattcctagtaccgatttctatgcaatagcaggtttactcatcaagtcatttatagtcttctctgatatata

SEQ ID NO: 13182 - DNA, 532 bp, Cannabis sativa
tttatatttgaaaaaaattttaaaatatataaaaataaaatattgtataaaataaatttttatatatttgtgattataataaacttgattataacataattattatcattataataaatcttaacaactcaaagtattttaaaatttataatttaccaaacactcagctcaatttttttccacaattttactgcaggtgtctggccctataatctatctgactttattattaaaatttatataagataaatataattttggaacttaagctttacaaaaattattaattgatctctctattttgacagatgacaatttaacttttatatttttcgaaatagtataaaatagactttgagttaaatttttttcaattaatattattaatataactaacttgaattcaatttctaacactaatagaagcaaaagatgtaactaatttcgtcttaacaccttaaaacaaataattattaagttttaatttgacgaaaattaagttcaacgtctattttataatattttaaaaaat

SEQ ID NO: 13183 - DNA, 748 bp, Cannabis sativa
gaaagtaagttacagtggtggaaaactaaattcgcttcggacaaattttctggtcgtgtaatgtggtttgttggttttcgattctgtacgaacggttgcacggtggggacgcaatgcattagtttcgtttaattacacatatacccttggataagggggatgcattttcacactgtctgtggtctgaactataaacctcgaaggccgagccttgttgtacgggcaagcccgaatgagcccaagtggtgatttggtttccggaccgcaaatgccaaatattatttaactggacaaagagttcattaagattagctcacgtaaaacgagtaaagggtgaaatcgtcatttgataattactaaggtaaggtaatctcatgtgtcacggggggaccaccaaacttttactatgtacccattttaatggtattgtcttaacattgaggaaaaattaatatttgattttagtggttattttatgtttaaaaccgaaaatactggcttttaaaaaaaaaccaaatatagtggaactgttatatttccttgttagcattaaagagttggcctaaatttatttctaaatgacaataatgtatctcaatgtagggtgaagtaatcattttcgtaatttagaataaacaatttcattaattttaagatacctaattttgctgaagaattaaatttttagaaaataaaattattatattttgaaaacataaccaccagtattctttcaaaaaaaaaaaaa

SEQ ID NO: 13184 - DNA, 528 bp, Cannabis sativa
ataaaggaaaatacaacgaagcattaatggtactaattaattttgtaatttggacatccataaataatatttgataccactcatccttagatgtccataaaaattgtctcattaaaaattttgctgaaaaaactaggtcaaagaaaaagagtgtaatgtaaactaactaagtataataaatatatatattattagaggattaaatatatatagggtaaaaaaataataattaaatatatatattattagaggattaatacaaaaaggaaagtataataaatgcgatttatttattgaaagattctacatatcgaaaatataattaaaagaaaaaagtatataactgaatgtgaattatgtatagaaagtttaaagaactttctaacaaaattatgtctaacaaattatgccatatagagtactaaaatactcttaagttgtaaatgtctaatccgcataaaataagggaatactatatttaacattaaatataattttaaacagctcagtaagagaaaaataaattaa

SEQ ID NO: 13185 - DNA, 790 bp, Cannabis sativa
gcatttgacatgatgagtgtcaacatagcagatttacctgcgttcccaaaagttcttccatatctaaaaatattgtttaggaacgagactgctttgaaggaatcggatgatattcacgaattatgattctatttttgtgcaatcttattatagttttagttattaaccttttttttttgtttttttttaattccttcccatgtggaagaagtagagaaagaaactagcagttatttttttcctcacacttgtgtaatttggtgtctttgtaataaagagttaataatcatgcatcttactttatttaataatgccctcttcttacgttcagccgcaccattttggctttgatgtgttcgtgttattgttctatgttattcaataaaccaaatcttattttattaaaaaaatttattgaagtgttaattataaaaaaaaaaaaaatttaatttaattacataatatttaattttataacactttattattttagaaatatcatatattttttctattttttttaaataataataatataaatatattttttggtaaaaaaaaatgattatagaaatatatattttttgaagtatgtgaaataagtttaaatttgaattgtaatattaaaagaaaaattaatataaaataaaaaataaaagagatataaaatataatataagacgtatatgtgtaatgagattaaatttaagacttaatgtttaaaaaaagaataacactttctttatatagccacaaaaaaatgttaacataaaatatggtactgtcgtaa

SEQ ID NO: 13186 - DNA, 582 bp, Cannabis sativa
aagattaatagttaaatgatagcttgattgtgtctaaaaaagaatgtattcaatactattaccaatgagtttatcatttatcgttttcaaaatatgaaaactcgtagaggacaactttaaacgtatgagttgaatagttgatttactttgttaaatattttaagatattgagtatattttatttttttaaatatcaaatagaatgagttggtatttaatatttatattttgttaatacacatttttttttggtactgtgatatttttattagaaatttctttatgtcccttacaattaaattctgggtctgctactaatttgtaggatgtcactttataagaacatttttaatagaatattttaaagaatatttgatgatatgaatatatttttagcatattttaatgtgattactatttgagtattttatcataaagtaaaaaaaaattattaatatattaaataataacataatattattttaataatttttaaaaatatttaagtgaaaaagtaataaaataaaatattatatttttaatgaataacatctgcagtaataatattctaaataaataaat

SEQ ID NO: 13187 - DNA, 568 bp, Cannabis sativa
gttagtgagttgaccttgtccattttagtataatagagtttccatgaccagcaagtttatattgcctgaaccttctaaagtcaagattagctagcttctgcaatgattcacatgtggttagatttgcattgagatcaaattctttgcttgacttctcgattcttgattttgaaggtaagagcaagacatcaactttccccactgtgtaaatctctattctggtatttaaggatatgacaaatgtattatactcactcaaaagccctttcaatatcacaaccacatgatcttgatcgtccaagacttctcgaactgatgtaagaagatcaactgtttgttttacttttaacaaataatcgttgaggcttagaatccattctttaagttttgcaacttggtccaaaatttcaagatctttgaggagacttgcaatgtgaagtatttttccaatgagctctagatttcttgtgaagtgctgcagccaaccattcgtatcaaaagactctttgtaatggaggagagtaaccacaaaatgaggagctggtcttgaaactcccacttagaatca

SEQ ID NO: 13188 - DNA, 531 bp, Cannabis sativa
  modified_base (292)..(293): a, c, t, g, unknown or other
tcacatgctttcttttgttattttttttcccttcaattttattgtattgaaaagcaccctatatattaatatatgatttatatgtttatatattttctttctttttttaattttatttttatctatatttttcaatcaaaatacaaatgttgcttcatatacctctctttaatattatttatttttaattaataaataaaataaatataaacaaaaggcttaaaaccaaaattattgaaatggatataataattattgatcgttatttgtatcaattattattattattatnnttattattattattgttattattgttgttattattattattattatgatgatgatgatgatacatcaacctatatatttatttaaataattgaaagttaaggaataaagaagtgaaaaatgaccttttatataacttttttttattattattatttttctttctttctattatttattattataattttttcaacttattttttttattatcaaagtataataataatatatatatat

SEQ ID NO: 13189 - DNA, 523 bp, Cannabis sativa
ggagctagtcgtggtcgtacgaggactagatcggtcaaaggagctagcaaagattagtcaccggagagagaagaaaatgagagaggcagccgactagagagaaagaagttgaaaaaattagtggaaattagactctataccttttttataatgttgtcttttatttttaaccctcttttttaaagtctatcatctttacctctttttttaaacactttgccaattctgcccctgttacttcagtatactctctatgtgactcctttatgttagggtattttgtgtaaaatacatattaaaagagctatgtttcaattaaatataaattagatgtagatttggttaattgataaataaaagaggtatttttctatataccctaaaaaattagggctgactacacaaactaatattggatttgaaaattaaatttacaaaaatgtggcaaatatattaccataaaaaactttaaatttgaacaaattccatagaagggtgataaagtttaaaatgccatatttat

SEQ ID NO: 13190 - DNA, 612 bp, Cannabis sativa
aaaaaaaatggtcacaccaaaggtctacaatacccaaaaaaaaaaaaaaaatggccggccatcaggtgagacgagctcagtgtgttttggaccctaagcaaaatattaaaaattaggagtattcatttaataatattttatttatagtgtatgtgcattcaatccctatttagtgtagattttatattttaaatccaaccttatttatacaatatctcaaatttaatataattgtaaaaatattaatacatatttgatcaattattttagattaattatttttaatattaaattatttaatgtttatcaaaaatatatttttaatttcacataattaacaacaaaataaaacaaattattattattttatgtctataaaaaaattttccaataaaaaaaattataaaaaaaatgtgaaatgacttatcttgtcaaacgtaattagtgtcagactgtcaataatttagagcactaattcaatcatttaaataacttttataactctaataattgataacttaaaattatttaataataaaaataataaaataatagctacctcatgttataacaatacaaaatatactttgattaggtaatataagataaata

SEQ ID NO: 13191 - DNA, 905 bp, Cannabis sativa
aatcagaccaagaggacacaaaaactgtagatgaggtggatacatctgcaacacacagggaacactgaacaaatgaagagcaaagacaagaacaagtgtcttctgagcttcaggattaccaacttgtcagagacagagttaggagagatgtaaggccacctgaaagactaagttatgctgactgcattgcttttgcacttgcagcagctgaagaaattgaaaatggtgaacccaccacttatggtgaagctgttgttggaaagaacataaagaaatggcttcgtgccattaatgatgaaatgggttcacttgaaagaaacaagacatggattcgagtacctagacctaaaggacaaaggatcataggctgcaaatggatttttagacacaaagaagggctgcctggtgaagaagttatatacaaagcaaggttagttgctaaggggtttaatcagagagaaggcattgactacgatgatatcttctctcctgtggtgaaacaaatttcaattagaatcatgatggcaaaggtggcaatgtttgaccttgaaatggatcaaatggatgtaaatacaacatttttacatggaaatctagaagagaaaatctatatggaagaacctgagggattcaagagcaaggaggctgttcaagtgtgtttacttcagaaatctctatatggcccgaagcaggcaccaaggaaatggaacctaagattccatgaattcatgttgcaaattggatactcaagaagtgagtatgatccttgtgtttactacaacaagacacctatctggttattactctatgtggatgacattttaataattggaaaggacagaaaggctatagacatgttgaaaaatcaactatgctctgatttcgaaatgaagaaccttggtgaa

SEQ ID NO: 13192 - DNA, 591 bp, Cannabis sativa
gagagctgggcactgcaggctgaggctaggggagctgggcactgcaggctgggcggtgggcgctgcaagctgggcgttgcagccttgtagggggagctgggcgtgtgtctttgctcctcgtaccaacacatccccttaggtgcattttgggatttacacttggtgagctttcaggcataacactaatgactccaaaaatttacacttagtaatttctcggggtcaacaactactctattgtgagtgctcttatataaaattaggtgggaattttgaaaaaaaaaaaaaattgaatattattttttgaggaaaatatggtcagcttaattatttatttatttattttatcaagaaaagaaactttcattaatcaaatggactatacactgcagactgaggttaggggagagctgggcgttgcaggctgaggctaggggagagctgggtgttgcaggccgaggcagggggagctgcgctacaggctaagattgggggagagctgcgcgctgcagggtgaggttgggggagttgcgcactgcaggctgagactgggggagctgggcgcggaaggctgaggctaggggagctagg

SEQ ID NO: 13193 - DNA, 855 bp, Cannabis sativa
  modified_base (663)..(685): a, c, t, g, unknown or other
tagcttgagtaaggtgggcgtcttcaagaaggaaaaacgatgtactaataccttcgtaagcggaatgaacaatcaccacacacctacgcgagtcaaaccagtctaggggtatatactactacccctacctcaactgcaatgatctatatgaggtttagtctaggggtgcaccccttaacccctaaagggttagtctaggggcaggggcggagctacatgctaagtaacaggggccttggcccccctcaattctcaaaaaactatttgttatatgtattagtttataatattgatgagctaattaatttcataaaaaagaattacaatattaataatatatgatgagatatacaatttgtggtgaaatttcacacttatcatagtagaaaggggatgatgtagtgggtggggttagtttattcaaagatcatgtgtatatatatataatacttataatatttttcaaaataaaagataaagtgattctacaatacactcccttaaaagggttgtactgatgcactctctacttgtttcggcatccagaaaaattttttagtctaatttttttcatattcatgtacgttatggctatttaagatatcttacaaaattttgaaaaattcataataatttactatatagaaaacaatgttcaaacannnnnnnnnnnnnnnnnnnnnnntaaaatagtcacgtgtgcaacacaatgcttgaacacaattttcggcgtgtcaaacttttttgaattttttaaattttgcaggatgtcttaaataactataatttacatgaccatgggagggtcaccccgatatgacaattgtcacctccctcaagttggggctcgggggg

SEQ ID NO: 13194 - DNA, 1327 bp, Cannabis sativa
attattatttttaagtattttattaaaataactctaatggtgatgtaaaatatgtattaaatttggactaaattaaaaattatgtcgaatttgacacaaaagataccatggccaaatttagctaacaataagtaatacttttttaagaaaaatttacatggtatactaacttttgtcatttaattacaaaaatattgccaaacggtattttttactttttttactgtgtatttttataaatttcatattgcggtatactgtgtttttttagtttttttgtgttgttttacggttgtttttcatactttatttttttaacgtcgattttactatttttgctccatcttactagaattaataattgtgtttctgggtgttctcgtagtgctgtgatggttctatccgtttgtgtggaagattgaggctataaaatacatttttaagtggttcttttatatttttctaagtggttatatctgcttattgttttacatttctttttgtattgatttagtagtttttttgttctgattttttaagattgggcttacaaatatagctgttattgcattgggtattgaggctgtgcagaatattttcttagtttttttttttaaatatgttttcctttcttttgttttatttgttttagtgttattttacagctgttttgccatgattatatatttgacgtcgatttcactttttttttcctcaatctcaccgaaattaatggttgtttttcgattattatggtgttcctatagtgattctgtccgtgggtgttgtggaaaatagatgcctcatttttttttttttgtatttacagtataaaagaaaaaaaaattggccaagacagtataaaagtaatttctgccgtgtgacattacttttgtaaaaattaggccaaaagtcagtatttttgtaagtttccctttttttaaatacctctttatcacttattaacactatttattaatgaaaaatatttttatatttataaaatattaaaataatataaaatctataaaaaataatataaatattggccgagatttttgacaattattaattagagctatttgtagcaattaatggaagttaaagaagagaacttttttacgtggttgggacattaatgagtcttagtccacgagtcactgttattaatgagtattttcttacagagaattctcaagagtatcctcttctatacatcattagggtatttataagctcataatagtagtaaaagataaccattatcgtgtttgtatgagtcatactttgcacaatttccttgatttgatcataagacatgatcacc

SEQ ID NO: 13195 - DNA, 649 bp, Cannabis sativa
tagttaatattcatactataaacacttgtaatagttaaacactcgctgataaggctaatacaacgaacttgtcgactcaagattattaacgctcgaaccacataaaaaagtacttgtctattatttatcgttttatattttctttaagctttaattaattagtttctaaaaatttcggtaaatattttggtgcttttattgagagctgaggaaagtttactagttgttgaatcactctaaccatggtgaataattgaaagactataagcaataaaattccattggacactgtcatgaaagaagcaaactccctccccctggctccaagacgggcagtgtaagagaaaaaggcacgatcaatgctaaaaactgaagggaggatgtcgagaatgtgttttatggcctcgacaacaaccagccccttaaagatggaaaagaagaggaatatggcaatgactatttgagatatgagtactacaaagatggttattattatgaccacgacccgaatctgctgtgagtaaccaaagagttagaagctactcacaatgagttagtagaacaaaggaagctcaccgaaaaaattaaaagaatgatggaacaccttcaaaacaagttcgacgagttggcaaattcgaatgacaaacct

SEQ ID NO: 13196 - DNA, 510 bp, Cannabis sativa
aatttgaaaacaaaatttaaatttgtttgagactttgtgtcgcttttttttaatgatatttgagaataatattttatcaaaatatcatgactacattagtcattttgtattttgtttagaatttttgtttgatgcatataatttcgattctctctcactgtgcatataacatatatgtttatgtagtactgcaacatatatatttgtgaccaattggtttcaaactaaaatattaattcataaataaatcatacactttttataaatcttatattttattgatatactgatattatcatacttatatatattgatcatttggtcacattttttttttcgtatagattattatgcatattaatataaatatatatatatatatttatatatatacgaagcaaactggatcactaagaatcactagtccaagtagttttatggctccctttcaagtacaaataaatatgcacatcgatttactttcaaggaatatatatacatatatatata

SEQ ID NO: 13197 - DNA, 513 bp, Cannabis sativa
aattaaaaataaataatataacattaaatctacaaaatattaattataataattttagtttaaactttaagataaataaaatgacatgtttagtgctacgatagtatgtaagaattagaacactggaaaaccaagtttcctttgacattctttgtggaagatcatagaaaatacttttgggatagtgatggaaaataattaattaattataagagtatgtgcttgaatagaattgtaaaatttattaagtcatgtaagaaattgcaaaatctattattgattgtagaaatcaaaatttttctttggtactcacaagtgcagggaatgtaaggttggaattttgtgatttcatctggtagagccttcaattttgtgaagtatgtgctgacgagattatgatgacctagtggtgtaggctgatgtgaagttatttcaatgaataaatatgatttttttttccttttcaaataaactattcttattactaactgctacacagctacttgtataaat

SEQ ID NO: 13198 - DNA, 537 bp, Cannabis sativa
taaatattattttgaatcttgtatattacaaaaattaattattagatcaatcgttttgtaaaaaaaaaaaaggactctgtatttttcgatatagtattaaatagtacattggattgatttttttatcaaaataaaacttaataataactcgatatatagatgttatgacaaaattgattattttttctacatttgctcatactaaaaattatcttcaagttggttatattaaaaaaaaattgtcgaaaattgaactcagagcgttatttatactattttaaaaaatacaagatctttttcgtcatctaacaaaataaatagttcaatcaataaattttacaaaatacagagttgaaaataatattttttcctaaaatcaactttttcttttgtttttgttgaaaaaatatctataaaaacaacttaaaatctatttttgttcaattaccctattcatattagtagaggtaaaatacttaattttagaggtacatggactccaagggcccaaattatcatgttattattttttattaa

SEQ ID NO: 13199 - DNA, 538 bp, Cannabis sativa
aaaagagccaataacatataataaaaattaattgcagggagttatgggttcagcagtggcatttttcctaacatcttggagtatacaaagaaaaggtccactctacgtgtcagtgtttagtcccatgttactgattgtggtggctattttcagttgggctcttctatctgagaaaatttatgttggaacgtacgtatatatatgttttaactcacaaaaaattatattttttattaatctctatcatatatatacatatatatataataatgtatatctgtatgaatattgcagggcaatagggtcagttttgataattgggggactttatgctgttctatggggtaagaataaggagatgaaattactacaagatgtgaaagcaccaaaggtagttgtactaatagaagaaaaggatgatcaatatgatgatatgagtagtgacttggaattacaaaccactccctatgttcattttcccaagtgcaaacataataaccaagatcatcatcatctcgacactaatataattatataa

SEQ ID NO: 13200 - DNA, 580 bp, Cannabis sativa
gacaaacatagtgggaaaactaagggcgcaattggaaagccgcaatataattggaattgaatgtaatttggagtaattacgaagtttagcgtgtttgttcaaccaaaaaattacacaataaccatgtaattggaggtaattgagggatctcaattacactctccaattcttacgacccccaagagaattgagtgtagttacactgtgtaattaaacaacattactgataattaatattattaaactgtgtaattactaactcatttgccaaacatgaaaataagaattcatatgcaattactacttgacatccaaacacacattgtattttaaaatagagtgtacagttgcttccaaacgcaccctaaatgaaaaggaaggtaaataaaccatatcaagatgagacactgaaacgacatttctttttaattttttaagaaaaaggaactgataatattagaaaaggaactgataatattagaattattatttatttaattagaattattatttatttatttatttatttattttgaaaaagagaataaaagttatgtgacaggatggaacatagagaaca

SEQ ID NO: 13201 - DNA, 679 bp, Cannabis sativa
tttttttttttgattaaatttttttttttttttttttttgatgaagataaaaagttgctagttggtatcctatagaatgcactttttttctttagcaatctagtctgtagattggtccagttaattaaacttgatattcaccttgatttgggcagaggtgccgaacctccctatttattaagaatgaaccttcctatttattaattaattttttatttattaaataattaaacgagtaacaaaagcatttaacatatttaatataaattaagtcaaatttaaataaattttaatagtgggatcttcgttcatttagataccaactagtggtttcttatcttttgtatttgcattgcatgtctccttgagaagcgactctaaagcctgccacgaagacccaccttcctccacagccttatgccccataactgcaacttcctcagccttcttcctcacctctttccccatctcaccctccattaattccttcaccattttactcacctcctcactcttcacaaccccattcaatgatccatcccaactctcaactctcaacccaaccttaatctcttccaccaccattttcgcatttaaaggctgctctgccgccaacggccaagctagaatcggcactccggaacttatactctctatcacagagttccaaccacaatga

SEQ ID NO: 13202 - DNA, 503 bp, Cannabis sativa
tatataattaaagtgaatgtaattgacatattacaaatactatctcaaaaatacatttttacggatttatagttttttttttttttttttaattatttatgtttttaaacagattttattactgtttgatacaaaaatattgagcgttattttttcattgttttcacgttgtagctacagaaaagtaaagtaaaaataatatatttatttttgtataaaaataatatttttctcattttcaattcatattgtgaattttaccaataaaacttgaaaaaagttaaaaataagtgtaattctgtacaaaataaatataatcaattaaaacaaacctctaaaacactttatataatgtacctaaactggcctatcatggagtagggaccgacctaggggactggtagcgggaagcttaacccgtggctagatacctccttgcactgagttatttgcttgtgtgggggttccatcgtgtgtgatggcccccttttttccctttaaca

SEQ ID NO: 13203 - DNA, 777 bp, Cannabis sativa
  modified_base (523)..(527): a, c, t, g, unknown or other
tatcttgtatacatctccaaataagaggaagccatatattatatatattttttttcaaatatatattgtaaaattataaatttaaattatataaaaatacttactacaacaattcttttaaaagcataataatattaatatgaattaagtattttaaataattataatcaatcgattttataaatagggtaaatagcggcataagtacctaatgtttgtaaaactgtaattttttttcacttttgtcagtacagactccgttttaaatttattaaaggaacatttggaagtaacgaatactacatgtatctgtctagacccaatgatcaagaatctacaccttatatgtggcttgtttaagaaaataatagggttttgtacggacgtacggacgaaattaggacgaaattagagaaaaattagagaaatagagaaaagttagaaaagttacagaaagttacagttttacaaacattgggtacttatgccattaaaataaacattgggattatgccacttacannnnnaaaactttgggtacttatgccgctatttacccttataaatatgtcattaaccaaaatgaccttactaattctgaaacccgtttctttttttttttttaacacccctcaataaatttgagcttaggtttttgtgagccctaactcaataattttaacttatttatgaattgaactcttaaggtttatattaatggtatatattttgaaaaaaaaatgaataagtaataaattaattaaaaaatagatatat

SEQ ID NO: 13204 - DNA, 603 bp, Cannabis sativa
tgttcaacttttacatttgagcaggccttttgtacgcattatgatggtaaattcataacttactataaaataattgacacaattagaatgataattaatatctttattcatttattggtcaaaataacttcgttgccgtagtaacttacatttatgaaagctattgcatgatataactgatctttagctaattttaaaattgtactttaaagatggtcatccagtactagttattatatctaaacctttgagcgggatccgcccagaaggctatctacttaagagtaaatgttttagcattgtgtacttaaagtggtcatcagaccttgtacatttactaatagtatttccttaaatgttccccattccaatactttggtattagaacgagctccatattttcgtcataccgccccaacttatatgttccagagtctatgacttctcttacacctaacttatcatattattcaaagaaaaattatataaaaagttaataatgttaactcattgcttgatttatattttggtaagccaaaatgatagcgagttagtaaaatacagtaatgactagggctatataaaaaaattcgtaaaccgccc

SEQ ID NO: 13205 - DNA, 563 bp, Cannabis sativa
tactctcatattgtaaataaatatatatcatttaaaattttatcacataccaaatttatttgagtaaatactattttagattttgtgttttgtaaaatatattaatcagactctttattttatttaatgacactttacatattttattttctaaaatgatacaaaatgataacctaagctcaattttattaattttttaaatataaccaaggtgaagttagctttaagccactaatgttagcttagtggtgagatcatgggttcgaactcaacacctttaaattattaagctattaattttgtaaaatactattacgttacactaaaaaacgtaaagttagcacatgaataaatacaaaaattataactaaatcatacatctataagtcaggttattattatattttattttgacaaaaattatattattatgtatcattttgaaaaatataaatttataaatatttaacaaaataagaaatccgattaaataaaatttacaaaatagaaagtttaaaatattatttaccctaacatattttaagtaaagccaaactctttct

SEQ ID NO: 13206 - DNA, 521 bp, Cannabis sativa
gtcaaaaagaggactacatcccttaacatagtcctcacaaaataacgattaactctagcaagacatgccaaaacggtctgcaacagagttctccacatatggcagaaacttaaaagaaacaagaagaaacttaaccgatgaagacaaatagtccttgaaaataggaaaagaaccccaagcaaaagtgagatccccatgtagaaagagccttaaccgtaatatatagcagaatcagactcaacgaagataaacttgcacctattgtcacaagcaaaaagaatagcatttgtgattgccatatagctttaggataaggtctttcctttattgccttgcttgatttcttgacttgacttgtatatatgcttgtgatcacatttcgtcttcatattatttcccatagttatgacttgcactatacttgttatttcataattcttgtagtggctgacatgtgtatgtcccttagatttttcaggtaccatggaatacttggaaacctccatcaagcaagcgtccaa

SEQ ID NO: 13207 - DNA, 719 bp, Cannabis sativa
  modified_base (385)..(393): a, c, t, g, unknown or other
ccgtgtacaccgagttgaatgaaaatcatgaaaacatctttcttgtaaatgagcacagggtttcattttgagagcctgatctggtgtggatattttagacattatgtgaagcgtcaagggaacgaacgaaatcagcctaatcagcccaacgacccagataacaaaagattgcaacctcctcctgttgagggcgaggatatatcggttatcttgggagggctcaatcttactagagaaagtaataatgcccagaagaaatatgttaatgaaataaagaatgagcaatcggtgtttgctccagaaccaagaaaaaaagctaaaatagaagaagctctgattatattctcaaaggaagatacgaagcacgtgaggtatccacatgtcnnnnnnnnngtcattacagttcaactcgccaacaagagaataaagagagtgttggcggataatggaagctcggtaaacatcctttacaaggatacgctgaaggaaatggggctacaagatgcaaagttaaaaccttgcatagtgaacttatgcggatttattagtgatagtgtcgccagccaaggcctcattggactcccattaactgtaggagagccaccattgtctgcaacactaatgtaggagttcttagttgttgatctaccatcagtttataaaatattgatgggtttcccaacattgattggacaaggggcagtcaattcaatcaaaca

SEQ ID NO: 13208 - DNA, 721 bp, Cannabis sativa
tcatcactatattgtggcatatctggaatgaaatgaataatggaaagcatggtaataaaattaagcctcatgaaatggttttatactttgctttgtctttcttggaggagtttcaagctgctcaacagtcacggtcgaaggcatcttctagctcgaattcctcttccatggctgccaccacctctgatttggattggatgaatccaccctcgggaagactcaaattaaatactgatgcagcagtaaatcgagcctctaacactactggttgtggagcaatattgagagactcaaatggttatatcttagcaactttttctaagtctatcacaggtacttttaggcctgaaataatggaggctttggctctaatgtatgctttgcaatggctgatggataatcatctaaatgctcacatattagagagtgactccctactcgtggttaatggattaaagtcatctacggcctcagtttctgatttcaattgtctcttgttagacatttcacatcttgtgtccaattttcctggaatgtagatttctcatgtgtataaatctgctaatacggctgctcatttgttagcgaagtatgctctttcggtggacactgtttgttcttggttggaggaaattcctccccgttaaatgcttattgtattaatttaatataatttgcattttcatcttaaaaaaaaaagtgttgttggtgaaatttggta

SEQ ID NO: 13209 - DNA, 760 bp, Cannabis sativa
aatttattgtgactaaatgtatttctagttgtaatattttttgtgacttaaattaattaaattaatgacaattacttgtatcaaaataatatgttttagtcacaattaattttttgtaccttgtgactaaaagtcacatttagtaataaaaaatttatgtactgggactaaaaaattgtcactaaatgtacgtagtttttctttgtagtggttgaaatacttaaaatttggtgagctttgatttggaatggtagaatgttatggtaatggtaatgtaagaaaataaaaataataattagaattgattataatattattaatagtttgttagtagaatgaatattagaaaacaaattgttcgaccttaatttatatttatataaaaagtttgtattggtgtcatcattttggttttattttattcaatttttgtgatatagttctcaataatgtaatgagaggattaatttataatgtaatcaattttacagtatcattgtaatctattacattacttcttacattggacagctatttcgaattaagtgtacttatttggagtaattataaggttaggtgcatttgtttaaattaagtatataattaaacgtataattagaggtaattcaggactcttgttattatactttctaattagtctctcatgacaattgtgtataattatataatattactatttttagattattaatattttttcatgtaattaatgatcattttcaaaactttgaaataagaa

SEQ ID NO: 13210 - DNA, 501 bp, Cannabis sativa
cttcatttcaaactttgtctttggctggggtttcaagtgcttgatctcctgtacactcttgatgataatcagaatatcatcacaacaacaaatatagtgtatctccatttcttgctctgaaatatgtacagggatcaaacttatttctcctcaaactagcttggtcacataatcaacaaacctcctattccactgtcttagagattgttttaaactgtacataaacttctgcaacaagcacacccagtgctcctttccaacctcctcaaatccttctgttgtttcattagaattctttcttccaaatgtccatacaagaaggtcgtcttgacgtctaattattctagtttaaggtcttggcatgctacaagtgccaaaataattctaattgatctatgcttaacaactgaagacaatacctcttcacaaccaaccttactttatactgtgcttcttgtacacccaaaattccttctttctatttgcacaaccatttacatc

SEQ ID NO: 13211 - DNA, 528 bp, Cannabis sativa
actcctttcgatcttcttgaagagtgctcgcttccttccgagacaagacttgaaaagcaatctcccaaaagcttgtagaaccttctcccaaaggtagtaatattgttgttcttcttttgtagacttgaatacaaactcaaaacaatacaaaatacatataaacaaagtaagagacgaacacactattctctacaaaataaagactctattttctaaatatttgtatataattcaaagtgtatgaaagagatacatgacctagctgctataaggtgtatttataatcactatacaccttattaacatctcatacacagtctgaacaagaccacaactcactagaaagctccctaaaatagatctttaatcagcctaagaatttttatttctatacctacagaatcgtgagcagtaagtgcgacttcacttttatagaaaatgaatgtcttgcttcaattttcttcacaagaaatttgatcaaatattttaagaaactaacaaaggatacacaattggatatatatagaa

SEQ ID NO: 13212 - DNA, 526 bp, Cannabis sativa
aatttctttgtcaatcagtaagttcagtttttatgtctacatacttaatggaatttcttggttctcacaagaagcatagaagttatctataatgttatattagctgtagttatttacacttaaaaatttagacatgctaatatattgaagcaatcccttagagactggtctgatatttacaatgtggaatactgtggatgatacttattattatttgatgttctataatatcttctactataaacgaaaaaaagaaattgaaaatttaggaatttggctaaaagtatcaaatccaaattctgttaaatatgagaatgattgtgcgatcttcaattctgttaaggaacattgctcatggtgactcgtctctgtgtaatagggttggtgaagtaagttcagtatgatcaattacatttagttaatagtagttattgtttgccacttcatgtcatcctttaatgaactatatttgaataaatatttatctgttttatcttgtcccttgaacgctgtggttcttatagca

SEQ ID NO: 13213 - DNA, 859 bp, Cannabis sativa
tcaagttatttactttagtgagggcttttttttctgtttcgtgtgcatagtgctcctatgcttttctagaatctgcatcgacatgtggtcctccaatgatagttaaaatatttcgaggggctcgagatccacttgcatcatttgtattgttgttatcatccgctcggggatgattttctccattcttcttatattggctgaattttcctcatctgattaattcttcaatctcatcctggtcttcaatcttgtcctggaggaaccaacattccaaagttgtatggtcaatatctttgtgatacttacaaaatttcttggggtcctcatgtcacgattaccccaaatcgaagacagttttttgaaaatgttgttttttcctcaattacataaatattatcgcaagaatagatacttcggtgtagttgacaaaacgtgggccccctttcctctttagggatgtttctttcttattgggggacttggcgagctttagaattcgtcgtctagctggactacgtcttctggggctgcgtcccttgctattatttgcttttaggctttgagaacgcgatcttcatactgggggctcacgcttctcctttcctctttccaattcggccagagaattctcaattctcttatgtggttctgccatggcgaataattctactaaggacccaggtcgtcgtgcctgcatctccttccaaaagtcagttcttggtagaacacctgtaatcaacatacagaccaataaagactcggcggttttttccaggctttccacctccttctcgagcttttcctccttggtctacttagtctggacgtctttctctaactttgaaagaagagtgcggag

SEQ ID NO: 13214 - DNA, 559 bp, Cannabis sativa
ctttctatgagacgttcacgccgtggtttcgtggtggtggttgttaggctaattttagtctaagtttcgggtcgtattttcaggtagttttcactctttgtttctagttttagggttattttacacttgttttcttttatttcaggtttctacgcttggaatgtataaattggacaaatttcaaaaaacagtgatctataaaatagagaaaattttgaaagagaataaagctaaaacttaaagcctaaattagattatgttttgatcagattttggacaaattcaaaacataaaagttttagatctttttttttaatctttccaacgcatattgaatcagctcatttggagtttgtatgagaaagttatgcccattttactaaaagaggtcgaagcagaaaaaaataaatccttcgccgcgatggggaaaaaccttcaccgcgacggggattggtagagagttttagaaattgtggacaacaaccttcgtcgcgaagggaaaatccttcgccgcgacgaagcatcagtgaccgaatttttggataatttcataatttca

SEQ ID NO: 13215 - DNA, 653 bp, Cannabis sativa
tcaataaacgaatgagctgctccaggtgtcgttcgagagggtcctgagcgggtgagccgagttcgtgtgaagctgagatggctccaggattttgtgttgatagagcttcgttgaagtatgactaaagattagttgaacttggttattaagttaattttgttattgttggtttggaatactgtataaacaattcttatgtatcttcctttttttttttatgaaatgaaatagccaattttagcttggagacttatcctgtcttgaagagaaccataatatctatcaattggtgctttaattgttcttctttgcaatgaagaacgaagcaattgctgctctgttcgaagatatgaagaagagttttgatgcattctctacaattaacttagggaaatgtgcagagatgttataacaacaaaaggctgagacgaaggagacattgtcacaattaccaatcgattctactccagtttcgattcctcagttgccattaatgggtgtgagctctacgatagccgagaaccatccaattccccgtcaatcgaatgctaaagaggatttttgtgatgttaattttctcataaaaaatctcaggattaaagtagcaagatttgatggttcaaatgttgaagattggatgtataagatcaata

SEQ ID NO: 13216 - DNA, 632 bp, Cannabis sativa
ttaaaaatgtagtataccaaatttcttaatgaactgaccaatacagcttaatgatctagttatcgaatcttactattacattgagaaatttaacttaaactatatatagtactaaaagcaaaaactggtatgaagcagtccagctaagttttcaacttttttatttgctggtaaatttaaaaaagaaattataaattacaaaattattgataacacgcagtttgtacgtaacagttatgtaatagtttgtaataatactattttgaacattttgttttgcaaaatttatcaattagatcatttattttgctaaataataaaatggaccatgtatattccgaagtagtaaaaataagactctgagtttaatttttgacaacttctttttaataccaacttgtaaaacaattcttaacacgaacagatacagaaaatataaacagttttgtcgtaattttttttaaattgaattattattttttttttgacaaaaaatcaattcaaggtcctatttgtaccattttaaaaaatacaaagtatattcatttaacaaaatagaagatccaattaataatttttgcataacatagatccaaaatagcatttatactttatttatagtctataaatat

SEQ ID NO: 13217 - DNA, 1310 bp, Cannabis sativa
ggttcgtaattagtcttagtcaatttaccatttttcccttttaactacttatttctcctttagtagcattaattcactagttaaagtataatgtagttctcatctaaatttgcgcgcaactttccagttccagaattaacacacagaaaattgttaacgcagatttttgttaactaataaaatatctttttttgtaataaatgatttccataattaattaagtaataattattaataataataataataacaacaataaatgacaagaaggtttttacgtagttttgaagttaattcttcatagtccgcaagtccaacttattctgagttgatcaattgtatacagaatataattaattattttacagaatgaataatagatataattctctctcttttccctaaaaatagtcgtcatctgttccctgaattttgtctctgtttataggagtctaggatgatagttattcccttgaaatcttatcatttgtaactgttcatgaaacgttgacattctccacgtttcatatttacatcacatgggataattataaataatcattgtaaccgctctttgtctttatctatagatggttatgttgactacacttcatacttctcgcaattcaatcaatacttttctaagcacttcatcatgagctagcatctaagtatatgttgtagtattcctcacgttcttctattaatggcgagtgaggtatttgcgagatgcttggtacagtatgacaaaagcgagatgaatcatgttgaaagtttttgtctctctttaaacatactcaagtgtatgtgggtcaatgagctccaaactcattatctaccctttccaaacaattctgtaatgtattatgtttaacctgagatggactttctttattcgtctcgtttgtctcatcaatcgatagttagtacttgtgtctcacgattgtctacaaggtggtgagtttgagtatttttctatcaattgtacttcccgaggcgagtcatctggatgcaattattgatgcataatttgtgctggtttgtattccatctatgttacacgtgtcagcaccatattgtttctcaaaatatgagtataccgatttccccctaaaagttgctttttaaaatataaaggactttttaattaccttaagggtacgatcatacttttcccatttaaaaattgcatgcttttattttggtagttcaaaacatcgaggtaaatcatttcagcatttaatactttgacctttctctttccaatagttcccatctgttcgatctatcatcatcgtgatcgaacggtt

SEQ ID NO: 13218 - DNA, 544 bp, Cannabis sativa
tatctacattaaaaagtgatagtgataccgaaatttttctgccttattaaaaattacttttgtactgtaaaaatgttttggttttcacatgatatcaataattgaattgaataaaagggaaaatgatgtttaagttgtagataattttaattttgggtttgatttggtgattttagttagccatataagattaacacaacacaaccacacctgtcacacgtcagaatggcccctatcttgttcaaatatattatataatctaatataagtaataactatatacctaatcattccagatctagatagtgtcattgtcattttttattatcaccttttaaataatttttatatctaaaactatatgattttttttttaaagtaatgttcatcataattataatattattttcataaatttttgaaattttttaatcacgcacgttaattagaatatcaaaaattttatttttattatagtaaattataagaatttttttaaaaataatattataagtgtaagaaatatctctatactatacagcaa

SEQ ID NO: 13219 - DNA, 825 bp, Cannabis sativa
atatagttgcagtataattatataatttaacaaacatgtcaaattgtaaaattactttcaattacacaataattttcctaatacgctttaccaaaaaagcagggctagtagtgtgtggggggaatctcataggaaaaccatgtatgaatgcaagtaaagcctattatcaatcaaaatatttagagaaacttataaaaatattgtaaaatgaaaagaaaaatataaaaatactaaaacatgaaaatttttatatttttattgtactaagtttacaaaaatactatgttaaagtttaaaaattataaaaatattgtgtttcagtaaaattaaaaaaacaataactcaaaaacaactaaaacagctaaaaaacaattctataacaacttaacaaacaacataaaaataacaaaaagataactacaaggcaacagaaaaataacaaaacattgacctaattacaataaataaaataatattaactccttcatatatttttgcattacgattttttacttagttttgataacttgatttatttttttatacgtattattatattattttttcatggaatttgttgttatctttattctttcaatttttttcctattttctatgttttgagttagtgatagttaaaacgatggtttattttttaaaacttaaataaatagttatattaataaagtgggatatataatataataggtaatatataattgatatgtcaatatctaataggatgtgacattccatactagcaatttctaacatcatttatcaaattataataagtagaatcctcattttaaaatgaactacttg

SEQ ID NO: 13220 - DNA, 547 bp, Cannabis sativa
ctgtaggttatatattcacttatgtggctttcttgattgcctctacaccaggaaaatttggtaaattctttcttagattctatcattgaaactaataggaattgaatcattatggcaagaaaaagtttaatttagagggagaagaagaggcaataattggaacaaaaatatcattcaatttggggatcctcaaaaaaaaagaaataagaaaagtttgatcattgagtgagaaatggaaaattcatggaaagttacaatccctaccacgttattgtgcacctacacgacttcatcgacgttattttttgactggaagatgaagagctaactattgagactttgggctatccgatacatacttcgtgaaatggttcatgcatgtttgttgccctgagcaacaagatctagttggtaaggattaaaatagcccttaattttcatttttctatatatttctataatcatctatcatagagggcccctttaccattctgtacaaatggcctattctatttgtactaacggtaaagtggcccattcaatcctt

SEQ ID NO: 13221 - DNA, 541 bp, Cannabis sativa
gattcttgcctcagttgccacattcaacacgtcgttctctgtttggagagcccttgaacaacggttctcgagccaaaccaaggctaggttgctgcaacttaaaggttctttctctcggcttcacaaagggaaccaatccattgctgaatatgtggaaaaggctcaatccacagctgatgctctggccatcgcaggatccccagtcaccactcaagatctcgtcttgcagctcttgaatggtctagggccagagtttgattcagttgtgtctggaatcacctcacgaagtgatctcttgtcttttgaggaggttcaggccctactgttatcccatgaaacccgattggaacatcacaactccatgacagatttgtctgtacgaatgcaagcaaatttgagtgttaatccatcaagaactgggacacacaacaactccaatcgtggtgctggtcgacaatttgcgggtggtactggttcaagattattgtgccaagtttgtcttcggtttggacacacagctgctgtgtgccattaccgcttt

SEQ ID NO: 13222 - DNA, 792 bp, Cannabis sativa
tacgtgctaactactgtcttacttattgtcctacaataaaagagattctgaatccctgggtgctcctgatcaggtgccagaaatcctagtcacacaacccgagatttcacaagtagggttaacccctaattccatactcacaaaatatattcatggcatttaaaatttagataatcatacagagctcggaaaagctttccaacaatatagagaactcccaaatcggagttcagaatcaaaagttatggaatttcaaagtttgcacccaaactgcccagaaaatcgagggcgggccgcggcatgcccaagctatgccgcggcacctgggacaaaatccctggttccaccaacaggggcggaccgcagcatgctcaaaccatgccgcgacacctgggttccaaacccagaaaactagcagcaaaaactcgaattttcagcctcaattcatcaccaaatcatcccatttcaccaccaaactttcaaattaacaaatagggttgctaccaattaatagatgctcaaataaacctatctcatgcatcaattccaacaataaaccctcaatttcagattgtaaaaatcaactcaaaatcatactcaaactccataacttcaagctctaaacttaagcttcaaaccaacatattatcaacatttttccagcagctcaaaaccaaataaaacatgtattcttcatcttagagaataccctaaaatcttatcaagggtttaattaagcaccacatcaataattaagcaagaacatactcaaacttatcaaaatcaactcaa

SEQ ID NO: 13223 - DNA, 536 bp, Cannabis sativa
ctatcactataaaataattggattctagctattgttttatctcatcaattgttcaactaattttttttgttgaactaattttttagaagttatacactttattaatattttaaaaaaattattttaaattaatatttaaaaatcactcataacatttttttttttaaaatttcgtattaaattcaataattattttaattttattctcgtattttttttaaaaaaagttatatataattatttttattttttattaatatttactttaattttttaacttaatatttgaaatatattttattttattttatatataattttttaagaatataggaaggaagaaatttttttttaaaaaaactagtataaagtaaaaatattatttttaatatacgataaaaaatattaaataggatatttttatatatttttgaggtgtaaataatattttttttaaaaaaaatgttaatacacattcaaaaagaaacttataagaacatctgtactttatattttttttagctaaaatagttaaa

SEQ ID NO: 13224 - DNA, 861 bp, Cannabis sativa
atagtcttgccctatatatatttgctttcctttttcagttaagttcttgatgtatgtacaatatttgttgttgaactgattccactaatttctcaaatttattttctcttttgttttattcaacaaatttattatattatttcctagtgaaatgtaagattaagttagtttcattttcttatgtataattaaattttaaatatatcaattgtaatcaatatatatatggatcatgaataataaaatacaagttttcactgtatatcttttcttcacatggtattagtagaataatttcccttgtttcttcatcatgtcagataataatcaaacctccactactccattatcatcctctcacatcaaacaagacccttactctattcatcattttgatagtcctgcaacagtccttgttacaccgctcttaacaggagataattatagatcatggcgtcgcgcagttagaatggcacttcgtgcaaaaatcaaactaggttttgttgatggatccttgcccattcccaaagaacaaaatgatatttccaattgggaacgttgtaatgacctagttggtagttggattctcaatgcagcctctcgtgagattcgtctaagtatcttgtatgctgaaactgcagcataaatttggactgatctcaaagatcgtttttctcaatctaatgctcctaaaatatatcaattgaagcagtcaattactatcctcaagcaagaaggtatctctgtattattatattctactcaactcaaatccttatgggatgaactcaatttcattctctctattccttcatgtatttgtgatcatgctaacaactatattgatcaacaaaatcaaga

SEQ ID NO: 13225 - DNA, 695 bp, Cannabis sativa
aacatatctgttcattatgtgtgccgaaggacttacggcgcttatgaacaagtttaaggcaaatcggggtattcatgattgtaaggtggctcgtggtgccgcctctataacccacatgctctttgcaaatgacagttttctcttttgttaagccactacggaagctgctatgagtgtcaataccttactccataccttccatttgacttctggacagcaagtaaaattttccaaatcttctgtcttctttagtcctaacactactacccaatctcattctggtatttgctctgtgcttgggatgcttgaagcgtcggatgacaatctttatcttggtttgcctaatattattggtcgaaactaggcctctattcttagtttcttaaagaataaggtcatggctcgtatcaacagttgggatggcaaatttttatcacgagctggcaaggaaattcttcttaagactgtgattcaatccttgccaacctatgctatgagtgtctttttaattcctctaggaatttgtgaggatattgagaagcttatggcaagtttttggtggaaaactacgtcaagcaagggtcgtggtattatatggatgtcctggaaaagaatggcaactccaaagcttgaaggtggtatgggattccgacactttcatgattttaatgttgcaatgcttgctaaacaaggat

SEQ ID NO: 13226 - DNA, 721 bp, Cannabis sativa
gctccacaccactccttccactttttaggttcacttagcgtctcaggacttctaggatcaggtctctaaggacaagaatcattaaattacaacacaacaataaatattttaccaaattatgtaaattttgaagataaattataatggacacaataacttacagacaacatggctagaatccaccaaaaaaattgctcttcatgatgatcaaatctctcaacgactgtcagtatctccaccaaacaattcacgaccgagacccaaaaaggaaaaaaatcacattgccaattttataaagaaatgaataaatcaagtgtgtaattggtttaatttaatacataaaaccttacccttggagcaactgatttgtcctcccccaacgtttggaagtcacacctcctggcaaaaactttttctcccaagaaaattatctcactacattatgcaaataaataaaaaaataaaaaaaattctccaataaaataaaaatacttagcaaatagtagtaagaaagtaaccaaggatatttacactggtggtagattaggctccattccatatttcatcaaaccatccatatgttgatctaaagaagaaaaattgttcaagtaactacaatttaggatagtcttcgaaagcacatattccaatcgacaaacctgggcgattatttatctaattcaaattacaaaaagaaacacgaaacacatcacataccacc

SEQ ID NO: 13227 - DNA, 696 bp, Cannabis sativa
ttgtctattggccatctctcatagacactgttgtataccttataaatagaacacttactacattattgcagcatctaactcctttccaattgctgcataataagcctcctacatatgaccaccttagaaattttgggtgccttgcctatgcttcatctctggccaggtcaagacacaaattttctcctcgtgcacatgcctgcatattcattggatatccaaatagaatgaaagcctatacacttctcgatattgcaacaaaaaaagttttccactctcaagatgttgtcttttatgagcaaatttttccactcaagggatctcttaatctcaatcacttggatactttactttcttcaaagtcatccaatcccccaacaatggcccctgttgacattaataaaccaggaactctgattcctgcttccactactgctgatattcaaaaccctgcaattgacactgttgttactcaaaaattagcaacagctcctgatgctattcccacaccagcagtaactactgctgagattcaaacacatgcaactgctcatgctgttactcaaaaatcaggaatagctactgatgtaattcccacatcagcaccaactccttccattaaagcatcttctaaggtcagtttgcctattcatactacaaaggcaggtcgccaaacaaccacaccatgtcatctta

SEQ ID NO: 13228 - DNA, 715 bp, Cannabis sativa
cccctgttattagcggcggagagggtccgtcgctaaaaagtccgccgctaatgccttcttttgttgtagtgttttatttttcacaaaattagtatgtggttgaatgaaatttttgtgattaattcaatcttgcctaattagttatatttttttattttattgttttattaaaattataatttttgtaaaaagtgtgaaatattataaattaaataaaaaatattatgacaaatcatagaataatatttttcaattttttttcaaaattttaaaataaaaaaaaagagaatttattatatatttttaacaaataaaaatatgttattagctgtttcttatttatagctatttgtttttataagtgttataattaggagaaaaaattcaatatctatatatacatataaatgaaagtacaaaacatgtgatgtgacatgctaaaaaagtttcaataaaaattatatatatatattttttttatatattttttaataacttttcaaagttgtagtgatttcactctttagtgtgttatttaaaaaaaaatggaattatttaaaaatcaatgtaatgttgtacttaaagacaatatatatttatataaaggaaaacacacaaaatattaagtgacattctatatattttttcttttacttatataaatttttgaggcattcacatctggagaataaaataatgtatacaagtttgatat

SEQ ID NO: 13229 - DNA, 510 bp, Cannabis sativa
atttctttgattatctcctatgaagagtattaaatgctttggtaagagaggaaaacttagcccgagattcattggatcctttgaaatcctagaaaggatagggtaagtagcgtacataagggttatgcctccagcagtggcagctgtccatgctgtgtttcatgttttgattcttcagaaatatgtgtcagacccatttcatattatgagttatgaagcattggaacttcaacttgatctctcataggagaagcaaccaatgcaagtacaagacaaaggagagaaagtttcgagaaacaaaaaaattgcactgatgaaagtattatggaggaataataaagttgaagagggaacctgggaactagagacagatatgcagtagaaatatcctgagttgttcgggaaaatttcgggacaaaatttttatatgcaatggataattgtaataacctaaggtttaataactggattaacaatcataagtaggctaattaagtattaatgagaaat

SEQ ID NO: 13230 - DNA, 556 bp, Cannabis sativa
gtagttcaaaataaattaaaattacgatgaattaattattaaaaaaaaattacatctatgaaatgttgttttggtatacttcctattgtaaattattacatgccaatttttgattggtccaataatacttaagttatatatctaaaattttgtaggtactcagttattaaatattaaataaattagcacgtgtcaatctttgattgatttatatcgtgaaattttattttctttttaaaaaaataatttatgtatactaataaaaaaaaatgatacatggataattacttatatttaacagctaggtaccaatttagttttaaaaatataacttaagtatttttaccacagatatttatttgcaactaaaaattaatttatgcagcaaattactctactttttattaattgaaaattttgagttttatgcttgaaagagaacccgattataaaattaacatattgttggaccttattaatttagttagacatcattacataattacattaatttttcttatttctttctaaaatcccgctctcattttaaattctc

SEQ ID NO: 13231 - DNA, 582 bp, Cannabis sativa
  modified_base (381)..(395): a, c, t, g, unknown or other
ggctaaaagcgaggtcaacacattgaaactttctcctaattatatttatattatatttttgtaggcttagttgttaagtgtgaagttattacactaagggataagagttgggaatattttaccaggatccagatttattaacaagtatgttgaattaacatcctaaatttgaattctctaagacaataaaataaatacataagggtttaagaaaattttacattgattgcaatagagtataatgactccttctgtttaagatctctagcccttgattcctttttgtaggagagcattatcaagatctaaacctgattgagtacttgccttgctatgtgtgggcatatcattcattcactatgggtttcgaatgtgaagaannnnnnnnnnnnnnnaatcactaaggaaggaactctctaatctatgttggttgaatagtcaaaatgacattagttggatgagtgagagcatcatgttccttttttagtgttttaactagggtttagggctgaattatatggattaaaaaagaataaatatttggcaaaatttacttcttggccatacacttaataagaccaa

SEQ ID NO: 13232 - DNA, 577 bp, Cannabis sativa
tgtttgatcgtgaatgaatataatgacttattcacaaaaataatgataagatttttttatttatccttttatacttgattttttatttatttataaaaataaaaataacataattttaaaataaaaacagcataatcttaaaatataaaaataacttttataaaatagaaacatcataatctcaaaataaaaataacataacttcaaaataaaaataaaataaaattaaaaaaaaaaatacatgataattctcctaatttttttcaaaaaaagtacattcataaatataaacagtttttaggcacacatagatctttctattggtttttcttattggaaagagatttgtaatatacacatacacaatcacaactaattataatgtattctcttctcactatcacaaacaaaacagaaaaatgatgagaaaacttacaatggatgtgtatttcttgagcttaatttcactcaaacaaaatatcaatcttaattagctatgtttctgttttgtccttggcaactccaactccaagcccctagattttatagtagggtatatgaacataagaatgtacaa

SEQ ID NO: 13233 - DNA, 696 bp, Cannabis sativa
gaaacagagagacaaacaaaaaattaaataatcatacagggaatctgccaaatagaaaggtttgatatttatagacaatttattttcccacttaccaaacaatacaatacattgtctagattgaactaaagacaaaaaatgggagaccgagaaaataaacaaggcaaaaataaacaatacaatacatattttgttatgaaaaataatctgtaatgaagaattttcttacctatatggaatctgcaaagcataacaaaatctttgatttttcatacagggaggcatagactgagaggtcttcttcagtgaaccaagatggtggtagatgagtagatgaatcaaaccaaagttcgacgctgagaagccaaatcacctcagtccacctgccccaaatcaccggagcatggccatctagcctgagcaggaggtccacgggaaggaaacaatgtggtgctgcgctgagaagaggaaagattgcagctttgttctgggcagaaagttgtcgactgagaggagagattggggctagcttcgattgagagaaagagggaaagggtgttgttggtcgtcggagaagaggagcagtagctccgattgatagaaagaagggagaggcagaggcttcgatttagagaaagagagagagacttcgactgagagagagagtgaggcggcacaatagtagggttttctttt

SEQ ID NO: 13234 - DNA, 604 bp, Cannabis sativa
taaccttatcttttcttggctactaagtgctatataaactcaatccctcatttgtattcaattagacaatcagagcaataataattctcttcctctgttttctctctctctctctctataattctcatatggtatcagaagacaccttgcccaccgcttccatggcaaggcccacaactcgatcacaagatggtgctcctccatcaatggctgatcaaacaatagctgagatcaattctgatcatcctccagctcccaatcacaattcctcagcagttcctcggcgacatcaacaggtttctaaccagaatcaagaacctgatctggttccaaatcaagaaacctccgccactgctgcagataacaatacaataattcctgctgttcgcgatctcaccgaagatcactcaagcccgttcttcctaagcacgggagatcatcctggtttggtccttgttttgactgtcctcactggaactaattaccaagcatggaaaagagggataacgatggctttgactgccaagaacaagatcgcattcatcaatggcagtctccctcgacctgaaactagtaatttttcccttaattcttggcttcgttg

SEQ ID NO: 13235 - DNA, 702 bp, Cannabis sativa
ataaattaaaattagggggagggggtgaatatccaaaaattaatggaaggagtataaagcaaaacgattgtggaaattggggagttcaactctaatttttcaagtttaggggattgatcgttctaaatttcaaagtttagagagtttgactacaaattacctttcatataatattaaatcaattttatttaaatatttttatagttctaattatgaaattattttagttaaaatgtgatagtcagtagtcccatgatccgtaagggaaaacaccatgtaaactgtacaatcaatatcatctgggaaggtcaagtgtgatgattctgagactgtgcaggtatgagactacacagttgaagaagacttaaatgaattgattggtactacctataatatgtaaatgttcagatctataaacacacatgctaatacaagtgtataaacgaagaattttaatatttaaagaaaacttttgttgattcaaagagaagaactcaaatagtgaaagcgtactttaatccatagatagtgatgatcttaatccatcttgtagaaatgatctttgtagtaattttgggtaataatcttccaagaaaataaatatttaaattttctaattttctctcttgatggagaaaatgagaatataattgctcttatttcttgaggatcactagtactaccattaattatattatttgg

SEQ ID NO: 13236 - DNA, 559 bp, Cannabis sativa
tataagagtattttggtaaatttttatttatttttgatatctaaaaaaaattaatccaatttcatgattgtgtatattataactatataggaccacataaaaaattttaaaaaaattataaatagtttacaatgttaaaattgatgttcaaacaactacttaccacgcgtataagaaaaaatagtggcgcatgcaacaaaatatttaaactttattttcagcatcgtaaaccactcgaaatttcacatgttagaatattttttttaaaaaaaaaattcatagcagtattcactatagtcataatatcattcttgtaaaatttttaaaattctaaatagtttatagtaccgagaatagagttctcgatatttcagtttagtactcatgttcaaaaaattacaaacttaagacactatgtggtcaaacttactcgatcgttctggatcaagacctatcagcacaatgtgctgtaaattttgtgcatgtcacttaattagggggtgttccagaatgatcctatgatccgattaggtaccgaaaacttgctacatggtggatc

SEQ ID NO: 13237 - DNA, 764 bp, Cannabis sativa
tagaaacagctctcctttcttttaaggggcactaaaatggaacttcacggaatacattccgtgaaagtacatcataggacaaaatcgtatgcttatatatttgtatgtatatatatgggtgcatttttaatggatattacccatgaattggtaatattagaaaaaattaagtttttatgattaatttttctatttaattagaaaaaaattctcatttttatatttatgggctaaggttgttgagttgttacattagcttaaaaaaaataggtaaaataatggtaaagaaacttgagtttaacttaaatatttttcatataaatatatttttgatataatgcaaaaaagatatattttttgatatttttttaaattaagaagctaaattaaacatagaagttcaaatttgtattttattattcgttatcggatcaaaattaaatggtttagtatttttaaaattaatatttataattaaatttgtttagtacccattaataagtaatacccattaagaagtattccatatatatatatataaaaaaaaaaattgattttttatatggtaaaagataatataaataataaatagtgtaaatgatcaatactctacaaattttgaaatgagaacatttacttacatagttgtatgaatttgggtcatttactataatttttctaaaaggttacaaatcaaaataccatagaagaagtgaaaaaaaaaaaaagaaatcaagtgcatgtttggcatcgtaacaaaaaaa

SEQ ID NO: 13238 - DNA, 1003 bp, Cannabis sativa
tttgcttctaattctaaagaaatatgaaaaaaaagacaatataaataaataatagtgtaaaaaaaatcatttctctacaaattttaaaatgatgacatttacttacaaagtactaatacagtaaatttccaagctaataatcttaaaagaaagagtaatttgcggtataaatacctaagtttaattattagttgtaaataaatacttaagtttaatttttgacgataataataactaagttacatttctagattttgtaggtagctgcagttgactgtgaagtattattcacgtgttatttttcttattggtatatttaaattattttttattaaaaaaaaaataaaatttcatgatctggaccaatgagggattgtcacgtggtaatttacttaacacttaacagttaagtacctatagaagttccagaattataacttatgtattattaccgccaaaattaaactcgagcatttgtttgcaacaaaaaattatatttaagtatttataccgtaaattaaaaatataacttttgggttttgtgaatcggataaaccaaccaatcttggatggatccgtttcggccatatgttgtcttttttcttaggataacccgactaagatccataggccaaacccaaacctacgaaaagaggcccatcacaaaagtttgtcaaggccagaggcaggccaccattggcatgtgaaggattcccaagagatgtatcaatagttggacttggatacatgaatccgaaatagattagagatattgagttaacaagcaaaagaaagtggttattctgtcggtgccaattaacggcttttattaaatgttattaggttaaataaaattttcattgttgttgaatcaaactaagcgcctgtagctcagtggatagagcgtctgtttcctaagcagaaggtcgtaggttcgacccctatctggcgcgtcaattattttttaacccaaatcatgtacattatacatcttttgactttt

SEQ ID NO: 13239 - DNA, 524 bp, Cannabis sativa
ttcttatgtaaagagtacaatacaatatatattcttatatgtactatttaacatatagttgatttgttttagtcttgagattgaagtttcacactaaatattttattgttggatttttaatttttttttgtttagtcttgagattgaagtttcacactaaatattttattgttagatttttcatttttttttctgtttattttgcagataatatgctcttaatccaattgagaacatcacactcaaaatattatgagttggactccgaattactatgttgtaagttttactaaccaaaagttttagtgagataaattatgagctaaatatgaaagattttagtatttggcaatgaattaatgctattatatcgtatattagatgttttggcctgtcaaaactccctaatccctacaatgcactaaaaagagtacaaaatgaaaaaaaaaaatcaattttgaatgtatagagttattttttcttgtagattaataaattacgtgattcaaaatttctcatgcagt

SEQ ID NO: 13240 - DNA, 516 bp, Cannabis sativa
gtctccaatactggggaaacaaatgcctgactgcgctagttagtacgattagtaaacctataatggtagaccaacatactaaggatcgcacacgggttcaatttgcaagggtcttagttgagatggacataattgatactcccccaagtcaattcatttcataaatgagtatggccagcttttggaacaaagcatcgattatgaatggctctcggtgaagtgtaaaaattgtcaaggttatggccatatcatggcagattgtcgaaaggaagagataaaaaaggggaatcataaagctaaggtggataggccagaagcaactaagaacaacaggatagatgtggaggcaaaaattgagaaggaagaagagaaaactacagtgcccaataaggaagaaagccaggaaaaggaagctagaagtgagaatgataacaaaagattggttacacctaagagaacagctccttaaaagcactttcgtgttacctctgctccaagggaggaacaaggtgctag

SEQ ID NO: 13241 - DNA, 669 bp, Cannabis sativa
gctactttagcctaggtgaggcaattgcctcacctcaactatttttcttcttcactcatatatatagagatatacatatacacatatatataaataaaataatttgcggcgtaaatacttaagttcaactttcgattgtagataaatagttaagtttattttttgacagtactaatacctgagctatatttctagaacatacacaggtacttgaccgttaaatgtcaagtcattatttacgtgtcattttttattgatgtataaattaatttttaaataaaaaataaaaatttaataacctgaaccaatcagggattgctacgtggcaatttacttaacacttaatagctaagtacctatagaagtttcaaaattataacttagttattattactgcaaaaaattaaacgtaaatatttatttgcaactagaaattaaacttaagttttatgccgcaaattactcatataaatatttataacatatatatgatgggtaatatgaatttatcttatacaaatttatatctattgtctatcgaaactgctttaattatacactaaataaaatgagtaaatattattttacatcctacattttacaaaatttaccaattacttcttctattcttttaacacaattttaatcaaatttttcttaatatgacta

SEQ ID NO: 13242 - DNA, 514 bp, Cannabis sativa
ttccatgggggtggagacaggtttcgagccaaggttccctgattcctggagtaattggatagtgaatggacgttgagtgacagatataccacgattattttgaggcctaagaagaaatgaagtggttcaagatttttaagtttgaattgggagtcaaggttgttgatgaagtgatttagagctgcagtgtcatttgttgcaactattatgtcatcaacgtatgttaatattgctaagaagacattataattttgtctgataaaaagagaatggtcattcttggactggatgaactgttgttggagcaaggtagtgctgagtttggcataccattgccgtgatgattgctttaggccagatagactctttttcaatttgcatactgcattgggaggtatgttgcctttcggtttgtatccttgaagtaatttcatgtaggggtgagcataaaatctagaaaactgaaaaaatcgttcaaaccgaccttccaaacactgttggaaccgaaatcgac

SEQ ID NO: 13243 - DNA, 543 bp, Cannabis sativa
tttttttttttttttttgtgcatagacatcatgctatttgatgagaatgaatatttacttgaaatgcagatgaattattcaatagcgaaagtattttgtgtaagtgttgttcatacattgttggttcatatttatatataattttacaatattaaaaatatgtcttgatttgattaaaaaaaatacatataaattaaaatgtatatttcttcttatttcggtattatttaaaaaaaatgtcttgattttttttttcttataaatttgataatgtatatcaatataaaaaatatttaaaatcactacaaaactaaataaataaaataccatgattaggagtgaaaattttatgtttttaagaaaataaaagtctagggactaatttgccaaaaaaaaaaaaagtttgaagactagtttgtcaaaatttatatagtttggggattaatttgtcaaaaaataaaatttaaggaccaatttgcgaaaacctatactttgtagggacttgcagtaaaaatcaaaaatccctcaacacgtgtaatatta

SEQ ID NO: 13244 - DNA, 649 bp, Cannabis sativa
tttatggaagtaattctttgattgaaagaagggatctctggaataaacttgcctattttgggcatttgaatgctccttggatcattctaggagatttcaatgcaatgttcgctcataaagatagaattggaggcagatggattaaagatctcaaaatccaagatagtcaaagctggcttgcacaaggtcaggtagacgagctaaaaacctcgagttccttcttgctcaaaacacatccaaatgctaccaaaccttccagagtacctaaaacaagcttacacaatattttccaaccaacaaaaaccaaaaaaacacattgaatcaaaatgtgtcattgaagacctaagtttgagtttcaaaactcaaacttgttcaattccatcacaacacatcaaaactagcatccagaactcaaaatcaactccaataaagctcaaaattcgaaaccaaacacaattcaaaccctaatagcccctatatctcaaaatcacataatcaaccaaacttaaaagctttaaaaatacaaaactattgttctagggttaccttagcttcaagaacacatgaatccttagttgaattgaagaaaaatccaaggttttatagatgattcctttttgttttccttcagccgaaagagagaaagaga

SEQ ID NO: 13245 - DNA, 566 bp, Cannabis sativa
taaaaattgagtgagttatggctactgaagtcagttcaggttctagcgcccaagttgacatctgacgtcaaattagacatggtatatgtgtgaaaacatccaaggagagtcctttgagatgccccagtgatgttttgacaccccttagtccttttatatgttttggtaaagttggtcacttgttctcggagatgttgctattttgtagaaatagaagactcaaaacttatggcttcttgatgagctgaaattaaagttgtgaatgaatttgtttgatgtgactgacttacttcattcatggatcattgcacttgtgaaaaatagacaaatgatgaagatgacattatattcggataagcaacacccaacgaaccaggccaaatgttgacctgggcattagggccttctaacccgagctttgggattctatttttgatacttttaaggcttctaaggcttctaaacttgaggacggggtctctcccctatttttgacaatgtcggattccatggttgtattagatttgacattcgagcatttaaaggtagtgtcccaggttgattgt

SEQ ID NO: 13246 - DNA, 503 bp, Cannabis sativa
  modified_base (173)..(180): a, c, t, g, unknown or other
tttttttttttcaaaaacaaaatacaactttacaaaaaatactggagtaacttttacaaaaatatgaaaaaatttacaaaaatactattttttataaaacaccgaacacaaaacagaacaactcaaaataccagtaaaacaactaaaaaacactagtagaacaccagtgaaannnnnnnncagtatactgcagtatgaaacttataaaaaattacagtaaaaaagtaaaaaataccgcctgacagtatttttataaaaaaaaaaaggcaaaagttagtataccatataaatttcccaaacagaacccacataaggcccaagcaaaacagaccaggcccaataatttcactaacatcatcactatagcccaaacttgaaataatattgatgtgaattttgcaaacgcttgaaaaataacacaagactgttgatctatcttgaaggaattattacatcacacaactattttgaaattttggttacagaaaaaaaaaaaaaaaaaa

SEQ ID NO: 13247 - DNA, 591 bp, Cannabis sativa
ttatttcttttagtgagcccaattttcatttcttttgtacaatagcccaattaaagccatgataataattcttaataaatcaaatggacttttagtaaatctatgtactttaacatcatttctctcaattttgacaataagtctaaaatatacatttaatcattttacaacacaacattaaagttaatacttataaaatgggaaactaaattaaattgataaaatataacacaatttaactaaaactaatctaaaaatattaaaattaatatttatttaaaactaaacaaaactaattaaaagtcactaaaataaactaaaaatacttgagaacaaagctaatttaatgcccaaaaagatataaattactctattttcatagagctatcaatattagatcactcctttatatacaaaacaagtgtctctttgattacagagaacttaattaattactagatcgttttacattgaatatcaacattgaatttaaggaaacgtaaatggaataaatggaaaacagtttcaatctgctttacttaatatagcaacatccgcgatcttcatagtgcgggttgcctgttcatatac

SEQ ID NO: 13248 - DNA, 590 bp, Cannabis sativa
caataaaattatttacatggattactataaacactgaaattagagattttattttagtgtaaatattattttagaccttatattttttaaaatgatgaaaataagatcttggctcaattttcaatagttttatttttttaatataaactttaagacaatttctaatatacaaaaaaatgtaactagttttgtcataagatcatattattattaagttttatttcgaaaaaaaattaatttaaaggtcctatttgtacaattttagaaaatacagaatttattttatcattttacaaaatagatagtccaattaacaacttttacaaaacacggagtccaaagtagtatttacactatattttaatcgtgtcaattagtgtaggatatatatttgtggcataaatagctgaaattttgtagcataaactcaatgataatcaaacaagagtcggtacttacaaaatcatactaaaattacagttttactaacattagatacttatgacgtaaaaaaaaacacgttttcatgtttacaaactcaaaactttgaataattatgtcataattaccgtattattgtttaaaattat

SEQ ID NO: 13249 - DNA, 578 bp, Cannabis sativa
aggttcaaatcaaaagatacatttgtttatgctcagtcgtactgttgaatgatactagaagatggaaatattttttaaaaaaattcaagtgggggattgttgaaacattgatgaatcttttaacaaaatatagtagtgttctattgtgtatgaagtggaaagagtcccacataagatatgaacccttatttacaagggtatatagagtgtaactttagcatttgggtttgggccccaaggggtacccagttttgtgcgaatgggtgaggactcacacacttgacccaccacacgcacgcgcgcactgtctgtccgtccgatctgagtcgggccgggttgggttggttggtgtggtgtgacactattatttttacaaactaattatttaatgaaataattattttttattttttttcaatttaattaagaaacgtgtttaattggaactaattacttagtcgtatcagttaatgggacacgttcaaccaactcaccccacgattcaaaaaaaaaaaccgatcttcttcccattatgatttttcaatccattcttatatataatgtgattgaactgatgg

SEQ ID NO: 13250 - DNA, 579 bp, Cannabis sativa
agtttcgcactcaccgaaacctatacaaattattccaaacttaacagaacacatatataccataaatacaataattcttacataacaaaaattaaaatcgagttcttaaatagaaaacgccattaaagttcagacttaagctttttcaaactcaatttctaactcaaaaatcacctcaaattcaacaagtaaacatcgaaacaacccatagcgacccataaacagttcatgaagaaaaaatcctcataactactctaaatcgcaaattcaatatataaaaccaaccatttaaaacttaaaacaaaatcaatccttactttaagattttctcttcaatgatttactatcgcgctactacagaagcttgtgtttttatcatttcttagccactaagaaatctctacttttagggcactaggtacacccctaagtactttttcttgacgtggtttttcgtcaacggatctaagaagatcgcaaaacgagcaagatgaacacaagcaatatttaatcaaaataaactggtttgaaaaattaaattcaccaaagatgaaaacaagaattttatagtggttcacc

SEQ ID NO: 13251 - DNA, 582 bp, Cannabis sativa
attggtctcaaattttagtttcttagcaatttttaaagtatctcaaaagctctttatttttaactaaaatagagacaaattcggccttttttaaaaaatggaccgggctgaatttttatgcctttacttctactcttccttttactttttttcttgctcttgcttttctttcgaatcttgagagactttaggagatatgcctgtacattcagccacaaagtcagcaagagcttgaccttttatagccatgcttgattgataagtaacctcatattggtcgagtcgatggcccacttgagtggtcaaccagatgcttcagggtttctgcataacctgttgcaatggttgtttggcgtgcattatttcaggattttttgcagaagaatgaagcatgttcacttctctccattctctctttgatttcatggcgtaagggatcgttgaacttcctttttttgccattattttagccagagccatcgttgttgcatttaccttcattatttttattattggagggctggcagatatttcttgtgttggttggcatgtcagacaggacttggggctgtatgacgccct

SEQ ID NO: 13252 - DNA, 575 bp, Cannabis sativa
ccctcttattttcccactgggattacaagttttggcctctgtggtcaaccactgggtgaccacaagaaggaaaatgagaaaaaaggtcttggagcaaaattggttcttcatccttttgtattttttttgtttttagataccttctttctttggttagattggtgtaagttgatttcgaggttggctctatatatagagaccaagtagtaagtacaagaagtgataaatgttcttttttgtgtgtttctacaaataagatatttttgcagtctttattttaaataagtgggttattcaaataaactaatactaaataaattaaatagagaaacggggcttttagctgtatcaccatgtttaagccatattaattctcctatatgattcagaatctacgtggcgtcctggcaaatttagaaccacaaaatgtcaaaacagagtacctgaaaaagaagcatattttatcacgaattttatacaaatggcctcacaaaggtacgcgaagaggcctttattgtgaaacaaacaatagagtattatgctattattagcattattattattatctttttttt

SEQ ID NO: 13253 - DNA, 518 bp, Cannabis sativa
atcacaacaatagtgtgtttcttaagagattcctctgaaataggacttttatactttaactaaataaaaaaaccatgtgagaacaacataaataaatgcaacatgatttcttaaaatatgttggttagaaaaaataataaaacaatataaaaaaattaagaacaggttaaaattaataaaagcaaaataaaaaattatatacaaataagagagaattaattctaaaaattactaaaaacagaattgatttcataacaacattaataaaaacaaataacatacaataactcgggaaccgtaattaattaagaaatagagtgaatcaatttcaaaaacactgaaacataaattaaataaataggacttttgcctttaactaaataaaaaaaattaggtgagaaacaacacaaataaaatgcaacaagatctttgcaacttagtagcaaacacattgtttgggttaaaatatgttggctagaaaagaaaagtaaaacaatataaaaatatattaggaacca

SEQ ID NO: 13254 - DNA, 767 bp, Cannabis sativa
ttttttttttttttttgaatgatgtctaatagaaagttaatttttcatattagaccattatgttttattgtcatatcaatgcaatattttacatgctatattcttttatttatttattttaatataggaattttaatttgtgcttatttttaaagtttttcttttcaacaataatacagattcttaaatatattatatggtaaacaagcttatattaaaaggatttttacaaaatataccaaatttttgacgaagatttatgtttatacttttttacgataaaaattacctttttactaccttagcctttttttattttatactgtaaacaccgaaaatagaaaatcaggtctccatctttcacacccacggactgaactaccacagcaacacagcaaaaaaaaaataaccattaaatccagcgagatgaagtagaaacattaaaacttttaatacttgggctgccatgatttttctaatattatttttgggtggttccacctttattttgtatatttaataaatattggtttcaaattacacaggttaaactaaccactgaatatttatttgaggtaaccagaatgaaaaaatcatggacagtaatagtcttacctcccattgaaatggtaaaatttggaagacaaaaaaaagaggatggaagctagctagggaaaatataacttaacaaatgcagcaaatgtggggagctgtgacacaacaagagaacatactggaaaaaccctcaaaagtaaaaagaagtataa

SEQ ID NO: 13255 - DNA, 695 bp, Cannabis sativa
aatgctcccactcaatcacactagtgagttcctaagatgtaaatatgggctagtcctatgagtaagcaggcgacgaacaaccatatagtatagttaagctaaaacttaatcatctcaggattgagatcagttgatctaagaccaactaagtgacattgacttataaaagatataacagtaagtttattatatctttccactgtcaatattggtccagtccgatgtatagttgatacatctgatacaagtttactctactaattggaaaatacattccacttatctaagtgtaagaaaaccacattgttgattatcacgtcagattaatctagtaaactgataaatcatgggactaaatagtttgaagtatataatcatgattatgttccactatgttaacaacactataatcatgaatcaccatatattcgagatttaatagaatttatgtattaaacatataattatgaaagtaacttgcgaaccaagtaacaaaataattcttaattttttattaattagtgttatgcccatatttcagtcaatatgaacatgacacgtggacacgaattcagaaacaaagttgatatataaatgtagaggaatgtaatagttacatcatctaaaaatgtactgcaattaattatgtacttaagtgccttaaaattttataaggataattaaaaagtattaaa

SEQ ID NO: 13256 - DNA, 615 bp, Cannabis sativa
ataaattcatcaaaaatataataaggttatacaaagctagttatgatcatattcatcaaataaatacaaaacatgtcttgattgtcacgatacttccatacattcaacaaaaacttagaatatcatatctagccaaacaaattattcatccatccaaagagcatacacaactaatccataagcaacacagattagggacaatcttggaaatctgaatgacaaacttgtaaaaacttctaataatgatcttaaaatcattagagtaggaaaacttcattgaaaaataaatcacagttgtaaaatcttggtaacagattgcaatccaatatcattagtgtcccgcaatttgttttaaaaacttgttatcctttctctaaaagcttgaacagacattagtattttaactgcacataaacaaactatacattagtgggatgaaacataaaataataaacaaataaatattattataaatttattcctttaaataaccaaaacatgcattaatagataaaaattataaaaattacaaacaatagttaccataaataaaacaaaaaagaaaatgtgaaaagaacttatcttgtgaattacaattagtgtctgtagtagatc

SEQ ID NO: 13257 - DNA, 801 bp, Cannabis sativa
  modified_base (552)..(555): a, c, t, g, unknown or other
aaatagatataacaaagttctaataattgcataaaaaatggcaattttctaaatttacattctttttagggttaatagcggcataagtacccaatattttaagtttgtaagcggcattaacccaatatttatttttagcagcataagtacccaatatttgtaaaactttattttttctctaattttgtcagtacagacttcattttgaatttattaaaagaatatttagaagtaactgatacacatatttctagttaaatctaatgatctagaatttgagttttatatgtgtcctgtttaagacaataacagagtctgtacagacaaaattagagaaaaattacagttttataaatattgagtacttatgtcgctaaaaataaacattgggtttatgtcgcttacaaacataaaactttgagtacttatgtcgctatttactcttctttttattcttacaaaaatactggaatttaggataatttttacaaaaatactatcacactgaaatctttccaaaaatattgtgtttttataaaacaatagtggaannnnaaacagaacaactaaaaacaacattgaaacaactaaaaacaacagtgaaacaactaaaaacaatcgtagaagaacagtgaaaatttaatacaatacacattataaaacttacacagtatttttgaaaaaaaattctaccccaaagtataaaagttaaaaagttaaaaatttcagtatgtgatgtaattattccaaaataaaacgttctttgaaaaaaaaattagaccacatggttattacaaaata

SEQ ID NO: 13258 - DNA, 507 bp, Cannabis sativa
gatcccagtctaggtctgggttagggtctaggctaggttcgcgtccaatttttggtctggatcacggtctgggtcttggttcgggtttaggtacaagttcaggtcctgggtttgggtcctgttttgggttcaggtttgggtataggttttttttgggtctgggtccgagtttcaattctgtgtcagtttcggatctgggtccaggtcttggtcccagtctaggtcccagttcttgggtcttggtcagggtttgggtcttgtccaagtctcggtctagagttgggtcctggtccgggttcaattcttaggtcccatgtcttggtttgtgtctaggtcacggttagggtttttgtccgattcttgtcccatgtccgggtcttggtctcggtccttgtctgattccagtttcgattctaattctgggtctgggttcgggtctggttcttggtcggggtctgagtcctagtttgagtctgtgtcagaatcccggtctggttctgggtttgg

SEQ ID NO: 13259 - DNA, 600 bp, Cannabis sativa
  modified_base (106)..(121): a, c, t, g, unknown or other
gattctgggccatattttttgtatacatcagggttgtaatccaaaaggccacgaagcctcggatcttttcaaacattttggaaaatttacaaaaatactggaattnnnnnnnnnnnnnnnnaaaatactgtcacacgaaaatcttttcaaaaataatttattttataaaacaccaataaaacacaaagcaaaacaactcaaaacaacagtagaacaccaataaaataccagtagaacaccagtaaaaatttaacacagtatactgcagtatgaaacttataaaaaacacagtaaaaaagtaaaaaaaaattacagtatattgtcaggtggtatttttttatttttttactgtgtttttattggtataattttacatggtatactaacttttttacttttttacaagttactttttgactgcagtaatttttactttttttttactgcagtataccatgtaaaaaaattactgcaataaaaaagtaacttttacatggtatactaactttttttttttttactttttttacaatttttttacaccaataaaaaagtaaaaaaaaataccgcatgacagtaatgtggttagagtgtaaaaaa

SEQ ID NO: 13260 - DNA, 506 bp, Cannabis sativa
attattattatacattaattttttttataaatttatttgtgtttacatgttaagtcttttgggcaagttctcctcaagtttatattgttgatatcgtgtcgattgtaacattgtcatgaccaatttcatattttttgtacctctccgactcatttcgtatcaaaaactaacttgtatttgcaacactagttgctaatgattagggctgacaaaatatatcatcgtgttatattcgtgtcatattttatttgacccgtttttatatttcgtgtcagacacgttgacttgttttcaacccgcgtctaattttatcaattataactcgacctataaaaatcgtatcgtgttcatgttgatctactttaacatgttatactattgttgaagattgaattgtagagaaaatataaatttaaaattatattaaaaaatttatgtcgtgtaaagagaatcctgtcgtgtttaacccattttcaatctgcacttaattttttcgaccctaactc

SEQ ID NO: 13261 - DNA, 787 bp, Cannabis sativa
tattttaatattattgttccggtgattggtggtgcaggtggtctccttctggcttggaaggccgggtttgaatttgaacctgtctgtataacaaagaatcatatctctagttttgtgtactcggacccagaccatcacccctggctgttatcgtgcgtctatggtccgccatactcaaatgaaaagaaaatattctggacgaagttgatggagcttggtctcaagtttgggggccttggttgatctttggggatgttaacttcgtgttgagtagctcggaaaggatgggctccaaggggagagaccccttcttgccttttatttctgacttgatcaatagatcatgcttaattgatacaccggtcaaagaagattgtctcacttgggataaccatcgtgatggggatgctcatgttaaatcggcccttgacaaggctttgaccaacgttcagtggatgagcctcttccctaaggcggttgtccaatctctccaaacatgtaattcggatcatcgccccctttgtatcagcactctgaaccaggagtctagaccccacatgccttttcgttttgaagcctggtggaccagggaccagatggcattggaagagaattctcgaaatttctgggaagtatttttaaaaactcggttgttgggcctttagagaatttagatcacttgatcccggaccatctctctctccaggagcaacaggatctggtagttacgccaaaccatgaagaaataagacagactctgttttctatgggtagtctgaaagctccg

SEQ ID NO: 13262 - DNA, 523 bp, Cannabis sativa
tcccatttgaaggaaaatgaagaggtatttataggttaaggtgcgggtatagacatgcccatgacatgcctggatttttccaataagtctactattggggtaaaaaacttgtaaagaactgactacctagaaggtttttgctcgtgtggaaaggcagctggacaatggggactgttgttggtacatgacacgtgtcaccaaaagattttaccttgaaaagaagacgcctagacaaaccaacaggcgaaaaggcgtgttcagaggtggggtgtgcgcactacaggggacaagatctgatcctgtgtctgaaaaaggaataaccgttgttgggacgatctgggtctctcttcacattagacgttcgacttcttttgggcagttagtgtccgtgttggactcttcgggtgccttctaggtgttggagggacacatgtggagcttgactttcttcaggttctagagagacggtaaggcttacgggtctcgaatggcaatatgatgcgggacaagtctttgtgcagcc

SEQ ID NO: 13263 - DNA, 546 bp, Cannabis sativa
ataatttaaattttaaaaatctctttaattaagtctattcctaaaattaagataaaaataaatagaaaatgtctactcctaataatttcatagtatttcatattcatttgtaattttttttattcccctaaactcaactttttttaaaaaaaatatttctctttttttgtcataaagtattattttttaccgacttaaataatgatacaaatagttagaagatagtccggtctcatcaaaaggggtggcaatttgtattcatgagtcatgtcgtgtcaacaaatgtattacaagtatatactgaacacaatctgtttaatattttgtccaaaaataaaatttaaatacgacccatgtaacccgtttataaatggtgtagtgagatacgatgatgacaataatgaatttgaataaatagcaactataagtgagatacggtgatgacaacagtttaaattaatgttgtcccgactacaagacaatgattcaatgattttgagatcatatagataatcatttttctatagatttattgattatttttgt

SEQ ID NO: 13264 - DNA, 650 bp, Cannabis sativa
tttatattttatatagccaatattttgtttatgaaagaaacaaatacaacaaatttgtaacaatatatagtagctgtccaaccaccacattggacaagtattaatgagtgacaacttaagattcctatactatacaagaaattgatatgcatttataatgagtacatgatcatcatgtaagttaaatactacaagaggtaacatattgttattggtgttatttaatattaatatataaaaaaatcgctaatcactcgtgtcgcaccatattgatcatatcaatatggtgttgaacactttaagccgcctagtaccaataaaaaaaatgaataggaaataattagaaagaaagaaaatggtttttcgattggtttcatttcataatttgttttgtttggaggtagatgggttggtaggtatacacacgcgaaaaaatagttgcatgcaggggtggaggtattgcttgggttgaagtggccatggccctccctcaatctcaacaaatatttaattactttgatgatataattaatatctattaagaaaaacttttaaaaatattgttattttgaattttttcggaaatatataattaaaatatataatttattaaataaaaagtgattacttaaaatattacatatagtttt

SEQ ID NO: 13265 - DNA, 525 bp, Cannabis sativa
caaaaacttaacactgaagataacaacatggacccttttattcaaactgttcttccaaattccatgataactaacacccatgtttctgagtatcctgcaaataacgacactgaaataagcacagcaagtccagaaatcaatactggtgttagtgataaccatgtgcagcaggaaacaagcagcacagatacacctgatgcacctgcagctcctcctcaacaaccatctcaggaaggtccaaggagatcaaatcgacaatcgaaacctccaagctatctaagagattttgagtgttattcacccatacaggacaactcatccacacctcataatattgacaaattcatctcttattcgaatttatcagactctcacaaagcatttatttttgcagtttcatcagttaaagaaccgaggacatattatgaggctatacaaacaatagcttggttacaagccatgcaatgtgaactaaaagctctatcggataacaagacctggattatagttccccttccagctaac

SEQ ID NO: 13266 - DNA, 619 bp, Cannabis sativa
aaaataatttaatatatagatatatagtgttatgtaaagaggcaaatgaacatggaccctacatgattcgctaaacttttgattattttttatataatttctttatatgtattttttcaattttccaattataaatttatttcttttttagttttttcataatatatattttatttttaaccttattaactatatttcatttatctttacataaatttttatatttattctcataaaattttttattgttcatatttatttttgtttactgagaaattccgcaaactaattatttaacaatagagctgaaaaactacaattaaaagatcgataaatgaagaagacactcagagtttttacgtgattgagacattaataaggcttagtctacgagtcagtattattattagatatgctagaaaagcctaaggaagtacaatgagtatgagcactctattctcatcctgagcatgtaagtcaagaaattccaaccctttacatgaaggattcaatatgtatttataaagtaatagatgtcatacatagttacccttttcctctaatggggagttcacatataatatttagatttttgcttattttgtgaagctcaatccat

SEQ ID NO: 13267 - DNA, 641 bp, Cannabis sativa
ttagtctagattcgttgtgggctggcctaatagcttaaatggcccatgaatgggcctgtcttagttattcttggactttagaagtacacgtgttacatatgtagatacaagggcaacaatgtattatatttatatttacatatatataaagatgggtgcactcttaatgggtattacccatgaatgggtaaaactagaaaattttaaatttttatgctcaatttttctatctaattaaaaaaaaaaaattcatttttacatcatatgggctgagattgttccatcagtgaaagaaaaaattaaaaaaaaagtgttttaacaaaaaaaagaaaaaaaagaaaagaaaaaaatgagtttgacttaaatatatttatatgaacatatttttgatatagtgtaaaagtatatattttttatatattttttttaattaagtagttaaattaagcatagaagttcaaatttctcttatattatttgtcattagatcaaaatttgatggtttgatatttttgaaattaatatttatagttaaatttattttgtaaccatttaagaataatacccattaagaagtattccatataaagatattaaataaagaagaagataggcacagagagagaggagaaaggggtagt

SEQ ID NO: 13268 - DNA, 563 bp, Cannabis sativa
agtagttaatgttccttgactcagaatctcaacctaatatataatactagattgttaaataatagaaaattttatagaccaaaaattaaaaaagaaaaattacaaaataagtaaatacatagaagtttacagttttactatttgaaatttttatttacataaactcatttttagtaaaaataataaactattttttagttgttttatagtttatttatagttgtcataagattatttttttttagttattttataagctttttatagttgtcgtaaggttgatttctcgttatttttttatttttcgttgagcaatgtgtattttttttaattttaaaattttacaagcgtatttttgttattaaaaattttagatcataaaattgtaaataaaatataaaaaaaagtatttttgaatttttttcaaattaataataactctagtgaattcctctcattcattgcattggtgataataaattatattttaatttttacctttttttaatgaaccttttactaactacataatcattatataatctagctaggtagggttctta

SEQ ID NO: 13269 - DNA, 515 bp, Cannabis sativa
attccatataatttaaatcttaccttaggtgaaatcctatataaggaataagatggctctcattcccatccaacctaatattctatttttctaactttgttagacaattagaaacttgagaacctccttctatagaattcaaacctccctctatctttttctccataaattttgagccctatagtgaaagagtacattcccacccatagcaagtgaagtactcaatcatagtgtgaaacactgtgaagaatccaacacctgaagcagaaccaaactcatatcataataatactctgtgattgaaaggaacaagtgttagagatctgagtggaaggagacatattattcagctgcaaccaatgtaaggtttcttaaaatttatatgtgtttatttccactgttttggagaattatatttagggtgttaaacaacatacgtgttagtaaatatagatcccagtaaaataatccctaacaattggtatcacagtcagattatgatttactttcatgaa

SEQ ID NO: 13270 - DNA, 726 bp, Cannabis sativa
tgcttcaaggaagtcccaactcaccgtatcataagtcttgcttatgtctaacttgatggcacacctaggagagatatttttccttctgtagttctttaaaaggtcttgcaatatcatcacgttatatgctaaggatctccattgaacaaacactccttgattctcattcaccaacaaaggtagcactttagcaagacgagagcacaatagcttggaaacaaatttgtaaattgttgtgcaacaagtaataggcctaaagtccacaactctagacgggttatcgtgcttttgtatgagagaaactcgagttgaatgaagttccttgggcataaaacctgttctgaaaaactcagtgataccagagcagagttcatcaccaatttttgaccaaacagctttcaaaaaaccagactcaaacccatttgtgctaggagatttagtttcagggatactaagtagagccttctttatttctttcttggtgaagggtttgagaagtattaattgttgttccatatccagccgagtatattataaattattttattgtgactaaaaatgaaatattttgtagtgtgttataagatatttttctttagtaaatacttattttaaataaaatatgacataaaatacatgtacttatttgcattaagattcttaaatataacattcagccacactattttctcatttcttttagtaaattagtactttactactata

SEQ ID NO: 13271 - DNA, 530 bp, Cannabis sativa
ttttcctctgggattgcgagatcgtgatcgcggcacatgtgactcacgcttgtcctttcctctctctacctcggctagagaattttcgatcctcttatgcggctcagccatagcgaagaactcaactagagatttgggtcttcgagcttgtagttctttccaaaaatcagttcttggaaaaacacttgtaatcaacatgcaaactaacaaagactcgggggccttctccactttggttacttcagcattaaaacgtttaaaataatcttgcaatgactcaccaacctcttgcttaatattagccagagtagtataaggcagcctatacatcatcgtggcttggaaatgcgtgagtaagaggtcgacaaaggtttcccatgtctatatagatgcttcgggttggctaaaccaatcgtgggcattatcttccagggttgccgcaagaatgtgacattttgcaagctgaggtacctggtctacttccataatcgtgttaatttttttttaaaagtctatgggattagtggtac

SEQ ID NO: 13272 - DNA, 659 bp, Cannabis sativa
tagttcaaaatgatatactttaaactattttatcaacatcagggttatatacacatgtttctttttttttttttcgaattaaaatattaagtattatttgatttgtaggtttttggtgattaatgtttttgatgttgctagctagttcctttagtgattaactctaaatcatataaaataaatgttttaaataaacctctaaatcataaatcttgacactatatcactttatatgactatttacttttatacttaaagattgatggaaacagtttgaaacttctatacatatttataagaagaaaatttatcaaaaattttctataaatttattaaagtgaattttattgcgctactatataaaaaaaattatttttgcgattataatatttggaaagctcatatcttgttatatgttttaattattttgttgagaaaatcgtatttttgtaattttaaaaatttaaaattaaatttttgtaaataaaagtttaaaatggtaaaagtgtaaataaaaaatatatatatatatatttttttttctaaaaaaaaatggtttagtgtcttttacaagaaaaataaaatagaacaataataagttgcttttctataagatgatgaagtaataacttactgaatgtggcagtggctggcatagt

SEQ ID NO: 13273 - DNA, 512 bp, Cannabis sativa
ttttatttttgtcgggtcctatagtggggggtcccactgccacatggcttcctcatgggttgttacatattttgggctaaaacatagacaacaactacctattctaaaattttaataggcattactcatgaataggtagtattaagaaatttaagtttctatgcttaattttcttatctagttaaaaagatctctcatatttatactatatgtgttggagttgttctattggttgaagaaaaaaaattaaaaaaagaaagttgaacttgtatataaacatatttttgatatagtgtaaaaagatatatttttttttaattaagtagctaaattaagtgtagaaattcaaatttcttttttattatttgtcagtggatcaaaatctaattgtttgatatttttaaaattaagatttatagttttttgagataaaaattaagatttataattgaatttgtttagtaatcatcaatggataatacctatcgaaaagtattccatatatattaact

SEQ ID NO: 13274 - DNA, 550 bp, Cannabis sativa
tgcctttttctagcagtagcataaacatgaaaatacttactattttgatcaccttctttaagccaaagttgcttggatctttgcctccaaagcacttctctttgagtgtaaatctcaaacaaagtttttttcagcttctctatatttctaagtagcatcccttcctctctttcactgttgaatctccctacaatactaccgaattctatctttgaaattactagtgaagttctgtccacaatcaatcaataacctgctgcaataagccactttctcagtcacctaatttgatcattgacaattttttttaatataaccaatttaaagataattcctaacacgaatagataaagaaaatataatcggttttatccaaaaaatcaattaagagtactatttagtactattttagaaaatacaaagtccaatttgtcatttaacaaaataaaaaatctaataatttttgcaaaatacataattaaaaatggtatttaccttactcatggaagcttttcagagactcacagtgtaagttttttgagcttgctta

SEQ ID NO: 13275 - DNA, 505 bp, Cannabis sativa
cgtgtaatagagctctgataccgtgtttttgattgggctattttatcttggggacgacgaggctaatagtctgtttgcacaattctggacagtgctacaaatatcttaaagagcgacctaatccgcgactcaactcacattttaattcgataaattcatttcttttatttttatgtaacaactatttacaagtactaagtttaattttttgtgtaataatacttaatttatatatatggaacttgtcctgtaccattttaaactcaatactattttgtaccattttaaaaataaaatagcaaaatttcaattaatgttagaagttttccatggtttacacgattctaatgtagattggggtctaaagtctaggatttggggactaaggtccaaagtccaagatatgggtcaaagtttgaaatttaattaaattagatcggttacttttacacgtcaatcaacatccaatctatacaaatataaatatccgcactttgcgaattta

SEQ ID NO: 13276 - DNA, 1097 bp, Cannabis sativa
  modified_base (479)..(480): a, c, t, g, unknown or other
tgttcataaaatagtcgatcgaatttaattcgtataatttaattcaatctgcaaagtgcagatatctgcacttgtgcagattgaatgttgattgacatatataaataatcgatccaatctaatcaacacatatttataaaaaaaaataaaaaattataaatacaaataacattttaataatgtaaagaaaatagtgatttaaaagtctaatacatataatacaattatattttaaaacttaataaatcaaatgtatattacattgttatatataattttttttctacatacaatttaaaacaaaattaaaaatttcttaggtaaatatcattgtagaccatgtgttttgtaaaagttatcaattggatcatctgttttgttaaatgataaaatgaaccctatattttccaaaatgataaaaataagaccttaagctcaatttcaataattttacttttttaatataaccaactttaagnnaatttttaacacaaatagatacaggaaatataaccagttttgtcataacatctctagattagattattattaagtttattttgacaaaaaattcagtgtcctatttgtacaattttagaaaatacatggtccattttgtcatttaacaaaacagagagtctaataagtaacttttgcaaaacacagggtccaatgtgatatttatttaaaaaaatttatacaaacaattttttttcttcctttgaatttgttattttatttattttaatttgttgatggagatataaaacaatacttatttattttatttctttgctagctagttatgtgaaaaatatatatatttttttcaaaaatattaaataatttaatattgaaaagtaaccaatctaaaataaccgatccgattcgcatttttgcggattggattggatttgaactattgtgcggattggattggtccaaaaaataaaatccacacttagtgcggatcggatactcctatgagcaaaatagtaggataaaattggatggacactcttaagtagaactttgtctccttttttcacctttttcaatgtctggttactaataatatcaataaaatactaatgttt

SEQ ID NO: 13277 - DNA, 596 bp, Cannabis sativa
  modified_base (393)..(418): a, c, t, g, unknown or other
aggttagagatgaaatttagcaatgattagcgatattttacgtaattaacgatgtttagcgatgcttttagcgatgtatttgccatatgagactaaaaaagcatagtatatcgctaaacatcgcgaaaacttgagtgtgagttagtaacatttagcgatgtgattggcgatgtttaacgatttagcgatatttagtgatgtttaccgacatcgtgaaaattagaagaaaaaatatgcgaaaaacaagagatgggttgagaacttcgaagatgggtggggatttcaagggtttcaggatatggttgagcttatggattttgagattttggggtggagacactacaaaaaactgctaccttttgtgataatcttttagtcacaatataatttttnnnnnnnnnnnnnnnnnnnnnnnnnncaataaaaagttacttgtgactaaaacttaatatttagttataaattgtcactaatttaattttagtcacaaacaaatattgtgactaaaaacatatttagtcacaacaaatcgtaatttttgtgactaatacttttagccacctacttttatatcacaacataataataataataat

SEQ ID NO: 13278 - DNA, 528 bp, Cannabis sativa
aaaaaaaaaaaaaaaaaattgctcgatcagggagtggaaaaataaaatagcctgacaacaatggagaaatactgagctgtatgagcaatcaagctggtatgcagaaggaggagctgagagctggaggtaatacacagacgagatggggactgggtggattacagcttatatttgcctcatcaacatccggtaacccaagttgagggggtcgtacataacccgccaccaagggcacacataatatagagatttctagccttgaacctgttcaatgtgtatggtgaggacaatgtcagagatgttggcacataagaaccatttcattttgagttacttctatgacaataccagagtatgatttaatgtgaaattgaattgtacaacatactccttcaaaagtacaataataaataattgtacaacaaaccttgtttttcagataaagatacatgccctcttttccttccagcaatcatccaattttctttatttgcattgacttcgtataaaacttcatcctgatgcatg

SEQ ID NO: 13279 - DNA, 559 bp, Cannabis sativa
tatgtccacttgttgaatgtcccaacagtttgtggcagcaagagtgaaaagaattcgtatggtacaaggctttaccacggggctgtatgtttcaaaaaaatctattccatgagtttgttgaaatcctcttgctactaatcttgcctcgagtttgttgaccgagccatcggggttgtatttaattcgaaacagccatttgttggtaactatggtcatgtccgggttggggggaaccaatttccatgtctttttgttcttgagggctgtgaattcatgattcatagctttgttccatttagggtctgcgagagcttgtttagcattagatggctcaataatagttcttatatctgcaagatacacttttggtttaaatatgcctttcttggatcttgtaaccatagggtgagtgtttgtgtttgggacactaggagggggttgatttgtgtggacagaactcgatcttgttgagtctgtggggcaaggaactcggtttaggcttggtgagacagcatctggttgtaagggatcggggaaagggatgggagatgactggttt

SEQ ID NO: 13280 - DNA, 595 bp, Cannabis sativa
tgttactcaaaaatcagcaacagctactgatgcaattcccacatcagcaccaaccccttctgttaaagcaccttctaaggtcagtttgcctattcatactacaaaagcaggtcgccaaacaacaacaccttgtcatcttaaggactatatttgccacacttctactgcccatctcttggtcaaatatctcaattatgacaaacttagcattccctttcaaaatgccatcctacatgcttatactgagatcgaacccacctctttcaaacaggcatcaaaatttgttcagtggttaaaagccatggattctgaattttttgcactcaagaaaaacaatacttggactgttgtatctttaccacctggttacaaacccattggtaacaaatgggtctataaaattaaatacaactcccaaggtgaagtcaagaggtacaaggcacgccttgttgccaaaggttactcacaaactcatggcattgattatgttgaaacttttgctccagttgctaaattcaatactctaaaactctttttagcactggctgcactcaataattggtccttacatcaaatggacattgataatgctttt

SEQ ID NO: 13281 - DNA, 1034 bp, Cannabis sativa
gcaacaaaactacctatattaataaagagactccgcctttcaaaactcgtcgaaaagactaaacacgcctgtgcttaatcacatccttaattattaattatatataagggttacttttttttgtccttttcttttttcttatttttttaattaaaggaaacctatatatattaaaaaaaattaaacctaaaggtcattaaacaataaataagggtgttaataaaatatgactttttttaatattatacctaaaattaattttatttataaaaatatttttaagaaaattatttgcacaaatacttacgtgtcacgttagcatacataccgaaattcaaaataattataaaaaatgaaaaaaaaattaggataatttcgattctaaaattttttattttttgggagttttgaaaaaataaaacaatcatttagtcgcttttgatgtgaataaaatatcaattaattacttttccattaaaaatttattttagaattttacatatatataaataataaaataactattttaatatttgaaaaatatatatttttctatctccaaaaaatgacgactaatattaaaagtagtttttttgtttgttaataaaaaaaaaattaaacttaataatattcaacatatcaaataatatcataaattattgtaaatttttttattatattgtatttaaaagttattatatagtatactaataaaatactatggggtaatatttttaaataaaataaaaaatatcttttagtaacttatgaagtcggctacttatttaagatatatttatgttattttttaataactttttatattgactttaattatatttaataaattagtaaattgcaattagatataaaaaattaccattgagcaataaaatatttatatgtataaaaagctatcattaaggttattagtataataatatatagatatttatcatttggaaacataatttatttttgagttaagcaaagagaaacttattttataatatttaaatttctatttggtattt

SEQ ID NO: 13282 - DNA, 545 bp, Cannabis sativa
taagataggataaatagtgtcatagttcataagtatctaaattttaaatttataagtgatataaatttaatattcatttttaatagtataagtacctaatatttgtaaaactgtaatttttctctaattttatcaatgcagactctgttattgtccttaaatatgacacatataagactcaaattttaaattatttgatctaaacaaaaacatacaatatcagttttttttttcaaatacatgccgtatcagtttttttaaatgtttttttaataaattcaaaacgatatttgtactaacaaaattaaacaaaaaaaaattataattttacaaatactgaatacttatgccactaaaattaaacattaaatttatatcacttataaacttagaaatttagttacttactctattctttaccccataacatatttatattgagtgtaaataagtaagttatcccttaaaaaaggaaaatatcactaattttttttgttcaaaaaagtaatatatcaccagtaatattattagggatatgattttgt

SEQ ID NO: 13283 - DNA, 574 bp, Cannabis sativa
ctctaattatctgttaattctcaattaaaactatgcagtcattacaccaaccgtgatggttgcattctttcttcatcatcgtcatacttttgatttgaaataactaggtgaaatttgttgtataatttctccaaataaaaaggtctccaaaagttattcctgaaaagttatttgtctttcgaaagtatgttcccggataactatcctgtcaaatctaaaagaagtctcgtagaatgatggttgccatccggaagagagttcctggatgatcatcatgtgcactctgggtgtagtcctgaggaaagctagccttccttcggaaagaaattctggatggctagttgttcctcctggaagggagtccctaatagtcgactacaactagctctttcttatctgggaagctcctttagcgagtgctttggtctgtttttctagaatccctcatatacgctctcggatgcactcttacttatactgatgtggagatctcgctcaaaggagagttggtttagctggttattgcataactaacttaacaacctaaccacttgcaaccaccaactttaggatc

SEQ ID NO: 13284 - DNA, 564 bp, Cannabis sativa
ttattaataataattatatgcttttattcgagagagcaacttagctgagctgcagaaccaggaggaatagctatttgcccactaaaatcacgccacgtttgatataagctacgtggaaatgaatggtagggtcaacaaggttaattaagttgatttatatgtggtcttgcactcaggagaaacaatgcctcagagtaagtccaccaaacttttgttaaagaaattgtcaatctagtacactcctattttctttagcatttaagaaaggtttttaattatcattttaggtttgtagtgtaaaaaataaggtttaaatttaaataattgtttatcacatttataagaaaaattaatcacacctataaaatatttaaaatttattttaaacataataaattattcaaaaaaatttaaatatgtaaatatttttaaataactacaatgtatacaataaaaaaaaatcttaaaatctctccaacttaaacaaataagaaatatactgaaataagatgtttgcagcctattaattatatgaagcactatctatatatatatataagaaaa

SEQ ID NO: 13285 - DNA, 547 bp, Cannabis sativa
agtattaaccattaatagcagcggactaatacacccgccgccattaaagattaataccggcgagcctatagcagcggatcctattggcgtggtattgttttattaaagaaaataaaaaaaatatataatgtttataaatatttaatttataatttataatatatatataaatattttaatttataataaaagttataattttatattaaattaaccataaactaattatcatcccaaataaattaacaataaactaattattacataattctaacatacaaaataaataactatcatccacacataatacacataattgaaaacttaaataaatccacacataattaaaaattaaactaataattattgtccatacataattaaaattaacttaaactaattattattgtcttcatcaactatattatttaaaaaatttgaaccgccggtgttcaagtttaaatgggttgtttgtgcattgtcttgagcttatgatattggcggtgaagggtaatatgactgctgcaaagataaaatttcaataaat

SEQ ID NO: 13286 - DNA, 524 bp, Cannabis sativa
caaatcagatatgctccgccctgcttaattttttctggataagaatatatttaaaaaaaaaaaaacttaattcaagactcagaccccgaacccggaccccttgggacccgaacccaaatcgagaaccaagctcgagacccaagcccagacctagacctgagacctgaacccagacccgaacctgggacctggactcggaaccaaacctaaactcggacctagacccagacccaaacacgaatgcaaaccttgactcaagattgagacccgaacccaagacccgagacccaaacctaggactagactcggacccaaactcagacacagacctagacctagactcgagacttgagatgcgaacccaggactgaaactcgaactcgagacccaaatccaggactgaactcagacctaggacccagacccaaacctgagaaccagactagacctgggatccgaactgaacccaggatctggacccaaactcacacccgaacccgaacttgggacctcgactgggcccc

SEQ ID NO: 13287 - DNA, 505 bp, Cannabis sativa
atagggtaagtctatagtacctccttaaagggatatttcggtagacctctatctgtttcggtattcagaaaaatcttttagtctattttttttacgattgtgtatgttatagctatttagggccacctgtaaattttcacaaaattttaaataatttaaataagatttatatattttgttacacacacgactatttttttatatgcgtggtaagtaattattaattaaaccttattttcgacattataaactattcagttatttctaaaaatttacaagtagtcttaaatagctataacgtacacaatcataaaaaaaattagactaaaaaagttttctaaatattgaaacagatataaagtctattagaacgactctttaaagggtctactacataaattttctaacttatatatgactcaaaatttaagagcattgctattagacactaatagtgcctaccaccttttatatatgatgtcttacaattagttaacgatatttc

SEQ ID NO: 13288 - DNA, 662 bp, Cannabis sativa
gaagaagaaaaaaaagagcaagaaatagcatacctaaaatctcagcccataaccaatcttgtgcacacaccaaagcttccaaagtgttaggatgtagcctgttacgatgaggagtgacatgtctcccactagtgctaaaagctgactccaaaggaactgtagtcactggtatagccaaaacatctttagcaaccctttgtaaagtaggatatttcaacccattgctcttccaccatgctaaaatgttaaattcagaaatccttggcaaaacagcctcttccaagtagtactctatctcagacttaaaagtatccacatttgttgtgctagtaacgaacaaatcataaccagccaaatcatcaacagactcatcaacatccttatcatgctcagagcaactcaatgaatgattgatagtacttccatgatcttgattaatattgtattcccccactaaatcaagacacaattttcgaactctctcaatttctatagaggacttctcaccataaattcgagggaagtagtattcaatcagtttcatcttaaatcttggatctagaattgttgctatatatggccaatatcccatgtatcacagaccaatacttttcaaatttttcaatcattttttcaaccataaattttatctcaagacattc

SEQ ID NO: 13289 - DNA, 618 bp, Cannabis sativa
agagagagagaggaacatatgaaaatggtaatgtggagagtgaacaaattaagctagttgagtgcacttatttacgttctaaacatcatcatttcatcccaaccgaccatcacatggcactcaacttccattgtcaactattgcttcttcccaccacgttatcactctacaatcaataatatataacacaacttccttcctaaatctaatatatacccttccaaaaatgtatgcatatatttagaattcacatgtaaaatctatatcttatctgttaaaataatacttcaaatctatttgagaatcgtatgtatcttggtagctcgaaaattgatttccaaatccaatacaacatatttatcagtgccccaaaaatgtttgtcaggctgtaataatatagatatacatttctaatctcattttcagccaaatgaccacacatgaatcatgatgaatcatgcgtggaaaattttcaacgtaccaaatagtgcttaaatcattctaagcaaaagaattatatgttagaatttattttacctaacaccgacgaatgtaaaaggtaatcattcgaaataatagtaattgatgtgacttgtcttctagtattatatctttcaa

SEQ ID NO: 13290 - DNA, 786 bp, Cannabis sativa
ccaacaactccgccaaagatcccgtactaccacgaattagcctccaaacccgcagctgagcccacaacggtcgcaatgaagggcaaaagactatagcatgctccggagtctccgcttcctcaccacacctttaacaagtcagttgaagaggaagcttacgcttgataagctgggaattagtcggaagagcacgatgatacattctccaaaggaaaatctttactttctgcggcaccctcaaattccacattccattccaccaatgtgcttggttcacagaagagctaccattcctctcacccaccagctcaagagcaacagcatacccactcttgacagtataacacccattggaattataatgccaacaccatcgatccggacagagaccattccgcaacgggatactaagtataatatcgatgtccatccccaaaaaatattgagacaaagaatggacatcccagactccatccccgccaatcaaatcattaaccatcacattactaggaggagaaggtgaaataggccaaaacgttctagccctgggtagccaaggatcctgaaaagcattaatactcaggccgtcccccacaactttcctcatacccttttgcaacaactccaaaccccacatcaaacttgaccacagatgagacgacccttggcgatctttcgcctccaaaatagacgagttgggaaagtacttatgcttcagaacccggccaggtaatgaattaggcgattgtagcaatcgccactcttgcttagcaaccatagcctgat

SEQ ID NO: 13291 - DNA, 557 bp, Cannabis sativa
catcttgtgaccttaccgttactgagcctcaaagtataaaatggtaagaacctattttcctccatttctatctttgatattcttcctgtgactttgttcagaccctcctctcgattttacacagtaagtacctcattcttcctttgattttactcaagtgatgatcttccttaggcttcattacttcatttggttcaacatctaaggttcatatacatttttttagacatagtttacattaactatattccataaacccctagtttggtaaatttcatccaaaaattgggattgtccttcttctgtggagatgtcccattctagttcagaaatctatccaatttatagtaccggaatataccaaacataagagatttctgaaggcaagcttcgttctttgcaaatggtggcatggtctgaacctagttttttttattcctactccatttacaaacccaatgtttttatccaacgtcagtattgctcattgaccttttacctttgtctccacttgaatggacgtagattttgagagcttgttcaaaagtccccaagcc

SEQ ID NO: 13292 - DNA, 514 bp, Cannabis sativa
aggtgaaaagaactaaaaaaaaaaaataataactatgaactttgaaatacaaaaaaaaacacccataaagaagatgatgaacatgagagagagagacagagagagagagagagagagagagcaattaaaaaataaaagaaaaaaaatcatgaagaagaaaactaagtgaaaagataaaatgtgaaataaaaataaaaacataagtgtatgagaatgtttctcaattttttaatcattaattttaattaaaaagaaaaaagaaaaattgtcagtgatataaccggtcacatcaaaacttcaactttcataaagtttaaaaataatattataattaattttagcttaaacacaataattaaatggaacaaaatgtgtaagtttttatttaaaacaagtcagtatatggcagtagaaaaatttaaaaaaaaaaacagtataaaagtaaaaattactgtataacaatataaaaagaaaaaaaaataaaaatacaattggtgaatatatgaatgaaaat

SEQ ID NO: 13293 - DNA, 654 bp, Cannabis sativa
taaccactttaaaaagagactcataaggtgaaacagaagtagaacctgatttggaatcaccagaagtaagctccatgaatggagactttaagactgctccttttttctgatccctcttcagagacttaataaatgagtctcttgaaaaataatcatttcaagattattcttttcagaaacctcttcaaagccagaaccagcaacaacatgatttgagaaaaccatctgcaaaaaataaaacatgaactttttaattttaaaaaaatcaaggcaaaacactaataaaacaacaccacaactaaacaaaaacacacaaaaatagactaaagaaaaaacatactattttttctacagcagatgcaatagttgcaggaacattaactttgtcatcatcaacagtagggtctgcttgttaagactgacaacaaaaataacagtgggaaaatattaaaacaacaaaaaaacctatcatacaacaaaaaacaaaaaagtggaaaataaaaaaaaaataaaagaaacctggttaacatctgcaatagtttccaaatttttagacttcttggcatcatcaatagtggcatctttgaaagtagaactcattttgccagtatcatcatcctttgaaacacattcaacaacaacaacagcatcatc

SEQ ID NO: 13294 - DNA, 567 bp, Cannabis sativa
cgcctctcaatcgaaggccagactgctacagatcaagtctcaactatccacgattcagaatggtaacctttccattgctgattattatgacaagattaaacttcttgcagattccctatctactgctggtcatcctattgaggagagcgatcttatcatgcatttactcaacggattgggacctgagtatgacccagtagtggttcatgtaactagtttagttgataatctctccttcgactctattcaatcgctgcttctcactcatgagagtcgactggaacgccactacaccactggtgctccttccctgaacccatctgcaaacttctctgttggttcatcaagatttggttcaggatctactacaaatcgatcccatgggtataatggccgtggacaagcatcaagttacccaaatcgctcattcaatcgtggatatggtccttcaagcagaggcaatggacaacctcgtctccaatgtcaagtctgccacaaaagtggacacacagcagctgtgtgccactacagatttgataaaaacttcattccaccaaagattggtga

SEQ ID NO: 13295 - DNA, 802 bp, Cannabis sativa
attttgtttgtcttggaatttatcattgttgttgttgcaaatattgtcaagaatataatgcaatgttaaaagaaatgtggtttcaactcaaattgtgagtttttatttcttatactgttaagtttttaaaatttaatttatgatattaaaaatattaagttttaaaataaaaaataaataaatttaatgtatttgggctttctacgtgttcatatttataagttaacaccagtaatagtaacgggtgtaagagaactgtaatattgagtatttttacctccaaaaataaagataaagtatttaagtatataaactctgaaacattaagtatttatgccgcaatttacccttaaatttatttagggtgagggaatattttttcaagtagaaggttctctctcatgatgatatggaagtccccattggaaaaagaattattgaggtatagttttttttttttttttgtgatttttttggttgtttcgtttttttagtgatactgttgttttagttaatttttatgttattgtttcaggatttgattcttaaatacatacgttctgagcattactaattctaaagttatcacttgtgagtatagggtattatagggtcattaaggatatcttaactattttggctgactgccaaaaagaattgtagtgaatgttaatttcttacttgtttgtcttctttaatttatgagtagtctcaaagttttttgttgttgattgacatcgattttgaagacttctgttgtatcgctgaaaattatagttgtttttcggctgttctgtgattg

SEQ ID NO: 13296 - DNA, 508 bp, Cannabis sativa
ggcataaaacccaacagttccaagccaccttggccctcaagcgactcgaaggctcatcagatggtctaccaacaagacctctcaacctagaagacatatctacaaaaagaaagtagcaaagttaaaaagaagatcataaatattcaatgcaagacaagaatatgaaagatggtgtaatcaaccattaaatatcatcatcatcatcatgcgaggaatcatctcactcctcagtaaccgctttgcccttacctttagatgtaggcaaggggcaagttggtcttgtagagctctcgcctccgggcctgatctaaagagaaacatcaccaactaacccccgcagactaaacgctagcaaagggccctctcactcctctttagattctgagctatccaagacagaggcacatcatcatccaaattagggacttgtccatcaccgggacaagctccctctgcaattcgggctctgcactaaccgatgggacatgggctcttacaactctaggag

SEQ ID NO: 13297 - DNA, 556 bp, Cannabis sativa
tagaagcgattccaacactggacagaaatgtatacttatctcgacaagagagggagctgtgccttcgactgtctgttgagtacttcctgttctaggcaccaaacccaccattcgttcacatttaacgatttctacagattctaaggatggaagataacaacacggtaacccaacattaagctttggacatctatacagactaagatttttcagaagtggaaatatttgaccttgttgcctagcttcactactaaatgaccaatctttccactccaacatatctgaaatacgtaactcttctagacatctgaaaagaagaataccgctgtcatgaggtgtttcatcacctattgagatgacaccatcacatcctctaattaggagatctttcaaaaatggaagctgcccaagtgggggtaagatacaacaattattacagttgtcaaacctgattgatactaacttaaaaaatgcagagtccccaatccagtatgacaatattgtacctctgtaaaattcaatactaagatgttgcaagtttgtatgtggtcgaagt

SEQ ID NO: 13298 - DNA, 645 bp, Cannabis sativa
cccccctggttggccagttttttgtctctttgtcttgcttgagtatttaaattttttgtcaactcgtacgttatgcatggcgacttggtcctcttactgataggttgtactccacgtggcatcaatcttgcctatgtggacataccacatcacgtgggtaaaatttagaataacacatatcaattaagaatttattacgtgccgattgacaaataaatttcttaaagaatatatattaattcaagtcaaaaaataataatatatataaattattacctttgggaaaataattaaaatatacacatttaatattaatctacttcattgaatgtgaactaatatatatttaactactacatttgggcaagtaattacacatatagctaaccaaaataaataatattttcgacaacatataaaatttgttgataaaacaatcattgaaaattaatagttttcaaccaaatttctaaaatgagatatattaattacttataatatatcgataatcaaaaaataaattgttcatcataacacattatttttgcatcaaacaataaatttttacaattttagaacaacaaataatgaaaagatgtgaaagtaagagtattggtggagattgttgttgggaatattttacca

SEQ ID NO: 13299 - DNA, 502 bp, Cannabis sativa
gtagaattttcctaaaatataaatcactacatataaacatgaaatgttaaccaataaaacaaaaattaattatgaaatattaacattttaaataaaaagtaatttacggcttaaaaatctaaatttaactaactttcaggttctagataaatatctaagtttaatttttaacgttaatataatacttaagttatatttttaaaacttatttgtaagtacaatgaccattaagtgtcaaattattatccacatataatttttattagtatatttaaattatattttaaataaaaaataaaatttaatgacatagactaattaaaaactgtgctaagttttaaatttataatttaaatattattatcgttaaaaattaagtatatatgtacaaataaaaattaaatttaagtatttataatattaattaaacttaagtaaaaataagttatgaatattaaacttaagttattaattaagtatttaagcctattgttgaggagat

SEQ ID NO: 13300 - DNA, 608 bp, Cannabis sativa
gagtaattaataatgttatgagataaataataaaagagtgcacattaatttaaaaatcactgtagcctgcctaggcaatagggtgttacactaatggttttcacatatacttaggataccaccgactaaacttcgcatggtgacctcaccttacccatttgaatatgggggattgatttaattggatctttacctacttggcaaggatgtgcgaagcatgcgattgtcgcagtcggcttctttattaaatggactgaagccaaaccattagtttaaatcacctcaaaaacttcgtggatttcgtgattaagaatattatcttaggtttgaaatacccataaaaatagtgtgagaaacataactcaatttgatggagatttgttcactgaattttgtgagaggaataagattattaaaagcttctcgttagtatcaaggacataaactaatggtcaagttaaggctgttaataaaatcttaaaagacactataaaaaagaaacttgatgcaactaagggaaaatgggtagacgggctacctcaagtactctaggctcatcggacaacaaaaaagatagcaataggacatactcctttttcattagcatt

SEQ ID NO: 13301 - DNA, 524 bp, Cannabis sativa
  modified_base (68)..(70): a, c, t, g, unknown or other
cccattcacaagcccactttattagactcgaagatgggaaaacttaaaaggaattatttcacaaatannnaaaaacaataaaaaaaaaattataaaaatacgattttacggaattttgaatatttttacgattctttttgtttcatttacaaaaaatattgattttttgttatttgtatattattttttgttgttgttttgatgttaattttatgtaattttcttgttgttttcgtgttatttttatagaaaactgtaaaaatgtaaaaaaaaaaaattctttaaacgtaaaaattgtaattttttttaacaaaaaaatagtttcttatgtaattatcccaaaacttaaaaaggtttttacaaaaatactggattttaggtaaaaatttacaattttactgttacacaaatttttttacaaaaatactcttttataaaacaacggtaaaacaaaaaaaacagaacaattaaaacaaccgtagaataattaaaaaacaacgatggaacaaccgtaaaaacttaac

SEQ ID NO: 13302 - DNA, 669 bp, Cannabis sativa
ttttttgtgttttgcaataaaaaatagcagcccctttttccagaaacggtctactatttttagctgccagagacccaaaaaaacaacccccattttaggaaataacctaccattttttatggtattttccctgagaatatcatttgttagtgttttctcaatctttagtgtattgtcatgttatctattgatagggaaacttttagttttgagtctaagttcccaaaaagtgatttagcgtattattacttcagggcctataaaccgtcgagaaatagtttccactcaagttgatcgacacaattgaatttagaatcatggtaagattagtataataattacatttatgaatacatgttaaacatgcatgtcagttgccatcaggataacatattagggtattggtgaggtatacatagagttgcactgagataccaatagatatatgttaggcataaaactagccattaaattagtatatcaaggtatcggtgaggtgtacatagagttgcaccaagatcctaatagatatatgttacgctttgtcatacgaacattctagactcagtacgcatgggacgcggaataggattacaattgctatacgcctaattataatattgtttatgttatgttatgtttttgattttcttactgagtttttcgact

SEQ ID NO: 13303 - DNA, 578 bp, Cannabis sativa
tttttgaaaattagcgtagtttaagggtccaatattcaatataacatctaaaatatatatataatagtgttggaaagtttttacaaaaaaaaaaatattaaatttagagtaaaagtttataattttaactgttacattgaattttttataaaattactgtttttttatagcgctaattttttttagaacaattaaaaaataattgtagaataactgtgaaaatttagtatttttgaaaaaaaaattaccccataataaaaaagtaaaaaaaaattaagaatttggtgtaaaaattttatgtacctaataataaacataatcacctagctacctctatgtgtacaactgttgcttagtcagacttgtataattttctccacaacagaagacactttagaaaaatatatccaccccaaaataataattataaatatgttgtccccacatacaacacacatgcttaatttatttaagaaatgttaaaaaaatataagaagaaaaaagactactctatttatttatatctctttcttgcaaaaatctagctaccctcttctaatttctctctctctctctct

SEQ ID NO: 13304 - DNA, 578 bp, Cannabis sativa
ggggcatgtagtcaaactcatatgatgttcagatctttgctccccctccaggactattttattgacttcttcatttttgtcagactttcaccctaccaactgatttcgcaagcctaccgcctgctgtgaagcttgtttattttttatgtagcccggaattgggctccacctagttctaaagagattttttatttttataagcttcaagcccatctggccaatgagacctcgataccttttaacttccaaaagaatgtaaaggaatatcgccataggtttttcttctcctccgggttctgggcttttgggtgcccagatttgttgacgagctgggtcaggattccccccatgcacagtactgctcccatctaactattcctaaaccatgcataagtgtttgcgggatacaagaaggaagacttgaatgtggatgacctggttacgatgaccaactgccggagggccaagttgatcttggagaatcaatctgtttatgacttcaacttgtccaaagtccactgccccaacatccgaaatccttggagtgagaaggtgctcagggtagacatcattttgtc

SEQ ID NO: 13305 - DNA, 670 bp, Cannabis sativa
atcttcaaaattgagatatgagtgagacatgtacaaaaattgcttgaaaagtgctttcaaactcacttaaaatcacgttcatcagagtaatattgagtgagttatgaccattttactaaaggatgtccaacaaccgatgcctaagttgacattcagcacccagggtgacatccaatgcctaggttgatattttgacgtcaacatagatgctgtatgagtggaaaatcctaccaaaactatattttttgaagcctaagtgatatttcaacatcacttagccaatttcttgggtctggtgaattcgttcaccaattctcggaggttttgtatttttatagaaacaagagactcgaaactactcgatttgtatttgttttgccaatatttcaatttgctgaaaaaggtgaaatatcaatgtgtaaatttgacttatcagaagtcataattcttgtttgctattaaaatatagccatatgttagagacgagactggaatcagataagcgacacccaacggactagatcatatgtcaacctgggcactaggggctcaatattgagcttctcgggactcaatttggtacttctatggtatttgaaattacgaatgaggtctccaaccccgtttttgagaaagataagaagactgctcagagtagaatttacatttg

SEQ ID NO: 13306 - DNA, 743 bp, Cannabis sativa
  modified_base (75)..(79): a, c, t, g, unknown or other
  modified_base (161)..(164): a, c, t, g, unknown or other
ttacaaaagttaccaattggacttactgttgtattaaatgacaaaattgaccctatattttccaaaatagtaaannnnngaccatgagctcaattttcaataattttatctttaatataaccaactttaagacaatttttaacacgaacagatacagaaannnnaaccagttttgtcataacatctctagattattattaagctttattttgataaaaaatcagttcacggtcctatttgtacaattttagaaaatacggggttcattttgcgatttaacaaaataaagagtctaattggtaacttttgtaaaatacagggtgtaaaatagtatttaccaaaaaaatatattttaggtgacgtttggttgggaggaatgataacataggaatgagaatgagaatagaaataagaatggaatagaataaaatttaaaatgtataaaaaaaaattattaaatcttttctcatcattcattggaatgatctttctttccatttcaaaatgaaatagtcattctaacaaatagtagaaaggtcattctattggaatgacattccaatattttaatatgcaaccaaacaaaagaataaaatgaagattgttttctttccattgtattccattttattacctccaaccaaataccacctaaatgtttgtagcactgtaacttgaagtgacatttagtaataagaaatttaaattgtgaatagaattatataattatctatggtaagtga

SEQ ID NO: 13307 - DNA, 686 bp, Cannabis sativa
atcacaaaaaatgcaccgcaccaatttttgtggtgcggtttatgagatttttttgcttcgcgatgcgggtgcgatttgagaaattggattaactacatgtgcgggttagttaatttgaaaaaatggtcaaaaattgcaccacccgcactgtgaacacccctaccactatagactggaaattgtactcctaatttcacggaacactctatatacaaagtatagataaactataaaatcatctattatttctatcctatcgatcaatgatctattatagataatttataattaatatggactaaattactattttactatattttatcattaaaacagttgacttaataattatcaataaactaatataattattaaaatgagtgttcttttattaaatacttcaacttagctcaaataaaactattattataaatgtccatatttataatttaatacttccactcaattatactctgaattctcaaaatataaatatgaactagttcgtagaataaattggtactgaacaaatcaaataacttgaataaaattagcttaaagcttaatgacgtcaagattaaaatttaattaatttacgataaactaaggacgtgtttgatctgttggataacttatgggattggatagatttttctttgaaccgtatttggtgcttagttaggcta

SEQ ID NO: 13308 - DNA, 699 bp, Cannabis sativa
tatagtgatctgaataaaattctacgtcagtaaagagttaagaaagatatatagtgaactacacaattagaatctaaatttcagcattaatctcatgtaatgtgggtcactaaaaatataaaaagtaatatatctaggggtgttcataaaatagctgatcaaatccaatctgcaaagtgcagatatccacatttgtacggattagattggattagaaaattcaaatttgtacttgtgcgaattagatgttgattgacatgtaaaagtatccgatccactccaatccacacatatttataaaaaaaattaaaaaattatacatacaattaaaatttttaatataaaaaaaaagtaatttaaaaatctaatacatataatacacatttattttaaaacttaatagatcaaatgtatatttcattcttatatataattttttttgtacatacaatttaaaataaaattaataacatcatttatacatacaatttttttcttcctttgaatttgttatttgttattttatttattttaatttgttgttgaagacataaaataacaataattaatttgttttattttattgctagttatgtgaaaaaaaaaatcttctcataaatattaaataatttaatattgataaaagtaaccaatctaaaataacttatcaaatccgtacttttgtgattaaattggatt

SEQ ID NO: 13309 - DNA, 723 bp, Cannabis sativa
aagtttaactgagtttttgaaatattcttgtttaatgactggttttttgtgatgccatgcaagttttatttttgtttaatctataagagtcatataaaatatggacatatacatgatacataataaatgtatatcatttaaatataaattgtgtttgtacactcccatcatcatgttttttatatttaaatagttttaattctaattttttttatgatggtgtatatagtatttattaagaaattttataaatttttggatttattttacacgtgtagaatgagtaaatttttattcatttattttttaaaaaatatatacatatgtctaattaattttacacatttttggtaatttggtctaaaaaattaccaactatcttgcaaatatatttaatttttaagtgttttgacttcataacttaaaaattattttctattttagagttgtttagccaaattttttaaaaattgagttttaaaaaaactagacaaacccaaattcagacccgaacctcgaccccaaaccctgaccccgaactcaaacccaaaccctgaccccgaactcaaacctcgaccacttccgaggtcctaggccctaggccgggtctagggtcgggtccgagtctagggtccaagtcggcatccagggttcaggtggggtccgagtctgggtctgggtttgggttagggtccgagttcgggtttgggatccggggtccgg

SEQ ID NO: 13310 - DNA, 591 bp, Cannabis sativa
gatatagattttgtacgaactatatgagaatcatgattcatgaggttttagtgactatttatgttttattctttaagtttttacactacatacatactgaaattttttaatttttttaccgtggagtgaatttatttatttatttttttaaaatactgtgtaagttttatactgtctattgtgttaagttttcactgttgttccatagttattttttggttgttccactgttgttttacggttattttataaaaagacagtatttttatataaaaaaacttgtcaataaaattataaatttttacccaaaatatagtatatttgtaaaaacccttttatacataataggaataattacataagatactatttttttgtaagaaaattatatttttacgtttaatggattttttttttatatttttacggttttttcgtaaaaataacacgaaaacaataagaaaattacataaaagtaatatgaaaataacatctaaataacaacaaaaaaattatagaaatacgatttcacagaattttctaaataacatctaaatcaacattcaatatgcactttgtcgattagttaga

SEQ ID NO: 13311 - DNA, 514 bp, Cannabis sativa
  modified_base (344)..(362): a, c, t, g, unknown or other
aaattagaacagttgataatgtgagcctgtcatgatgacacactaaaaaaaatttgatttttagtgattttttttttttttaatataactaaagtaaaaaagttgtgactaattatatatcattattcctatgttgtgattaaaagatccatgactaaagataatagccacaaaaatcacaatttgttatgactaaatgtgtttttagtcacaatacttgtgactaaaagtaaattagagacaacttgtatctaaatactatgttttagtcacaagtaatttttgctgtaactaaaagtgttttttactgattttacttgctaaaagtcatatttagtcacaannnnnnnnnnnnnnnnnnnaaaaattattactaaaagtaattattttttgtagtgtgattatgtatagtactactatatataaataaaaggataaaaatcttttttacccttccattattacacttataaatttttgccccttaattattttgctttgtaaaaataccccc

SEQ ID NO: 13312 - DNA, 1106 bp, Cannabis sativa
aggccagactgatattctgaaaggacatacagagattatgcgttacttaaagaccttattgacactcattggaaatccgagaaggcccaatacagaggcagaggcagagccacagtcaaaccccatctcttcgagagatgagttcattcttcccaatgattacaaacctaatgatgtgaaagatgtactccatacacctcaaaacatgtcgatcatgtccattagagatacgcaagattcagaggtgcaagttttagagactgtttcaacaccagtggagaagagaccgaaaaagaggctgaggtggtttgacgagtacaccaaaataaagaagaagatgaaaccatcgatagctcatgtaaatgttgacccacttcggcccgttgacaaaagctactacataatttctaaaattggttagtgggaaccattggaaacaagtatccgagggatgtcttcattagtgtacacggtgtggcttggttctataagctacttactaaaagagaatgactttctgatgatgtaagtttcttaactaagtattatttgatgttatttactgttttttttttttttattttttaatgctctaaagtgctcgtgttgacttatttgtatgaattatgcagcatttggatgcgactttccatatgatgaggaggcggcaacacttcttcccagagttatacccacgtaagtgtattgtcatgccatcttggtttgtttcatcgttgaagggtcgatgggacgcttggaaggaaaataccgaccacggtggctttgtttgggatgagtccatcttggaactcattcgtggggatccactccaattcatgcaatcttagtaggatatggagtgcatatacatggccatcttcttggaccgacaaaaacattgggtggctatggaggcgaatcttgaggtcttagctatcacaagctctgggtttgggattttgggtttgttggggaaggaggacaaagaaagagaagaagataaagaagaaaaaaaaagagaataagaagaataataatttttttttatttatttattttagattacttttaaaatttttaattaatttttataataataaagataa

SEQ ID NO: 13313 - DNA, 526 bp, Cannabis sativa
aatgaatatatcattgaattaacaaaccaatgtctaacaacctaataaactataagaactaaacatcgcaaagacaatatgaaaaattatcgaaccaaacaagttgtttacctatccaaagagcatgtacaactaatccatgtgtagcacattggtagtccgacaagcattatcactagttttcttttttaagtttaccacaatcatgatgaagcaagtagtttagttgggtaaactttgccccggtccaaagtttaaatacttataactctacatataaacaagtgaaaactttgccaattggttgagtgttcattaagcttaagcctgatataaatccacatagtactaaccccccacatgaactaaaacaacaaaccgtttatcacaataaaaagggatgtatgaaatcttgtgacaaccgaaaatatttacactgaaagccttcaagtttaatttacttgaagtctccgggtgcctaggtatccacccttaagttttcactgttttttcttattccataaaa

SEQ ID NO: 13314 - DNA, 534 bp, Cannabis sativa
caaaataaaagttgttatatttaatgtatgtaatggtatgtatcaaatgttcaacaccactcaagatatgtaaatatataatctaaccaaatcatgatttttttttttttcttttgaaatttcacgatcctttttttttaaaaaaaaaaaaaagaatcataaatataaaatgaacatatcagtaattataatataatatttagagattcggccctcccaaaatttagagaatattttttaatcataattttttattttatcttttgcccttcctaattcttggtactttttttaattttgaaattaagcttttttttttttttttttttaaagaaaaatggacttttaacctaaagagtttttggcaaacttttggagtcttgagcctacgcccggactctctccatggccatctttaaggtaggacggttagggtcgtttttcaagatctctcagtctaagatgtcttctagtttctttgttaaaaacaatttaaaagatctttttttatttctcaaataaaaagtttatttt

SEQ ID NO: 13315 - DNA, 544 bp, Cannabis sativa
agtataatttttttttataaaatatctgacataatattaaagaatttttaaaaagatgttttatttataattttataacctaaaatttttatttataaaaatatctttagtttaaaattttaaaaaaaatatatctcagcaaaatgtaatgaaaacaactaaaaattaataatgaaaaattaatctcatgacaattatttatcaactataaaacaactttatagtaattatattacaactaaaaataaattataaacaactaaaaaaaataatttactatttttactaaaaaaatatatttatgtaaataaacaaattcaagggataaaaatattttttttcgtattgacatatttttgtattttttttttcaaatttttaatctagcatgtaaaattttttataatatgttataacaaaaatagaaaacggcttaaaaaccttgcagtgtggagtctaataattgaagcgttttaatatattttcttcctaatttatttcgtatggttgtatttagtgtatttcaagacaagaataaaagagg

SEQ ID NO: 13316 - DNA, 589 bp, Cannabis sativa
  modified_base (217)..(220): a, c, t, g, unknown or other
ccaacttattttttatacaggctctaattcgtactttatatttttattacaattgataatctaaaccctaaaatatatgtattttatagttttaggtacttttatatattttttcaataatagttacacacaatcatataaaaaataattaaaataagaataagttgaatatatattactatattttaattggtaaatatatatttattattattannnntattattattattattagtattaatatcaaattattagacatttttatgttttgtattttcgagttaatttatttatatttttgaatttgtcgtgtcgtacctaaatttattttttttcgtctgtctaagtcaatattattttatgtcgtaccatatcgtatttaagcacatatttttttgtatggaaattatgatcgtacttctcgagctcatactaatgtcatgcagtattaaaaatcctaatccgtatccacagaactatatacggtgaaaaataaattatagtgattttttttctttcgatcaaggaatatttgtatatatacatgcttaaaagtgttaacactaaatgacaaattaatatatag

SEQ ID NO: 13317 - DNA, 587 bp, Cannabis sativa
  modified_base (83)..(92): a, c, t, g, unknown or other
  modified_base (397)..(398): a, c, t, g, unknown or other
attcatggttctcttgtcactatgttgttcatccgttccaattcgcattattttaaactggttactttttaatattaaattannnnnnnnnnattaaaaaatattttttttacataactaacaacgaaataatataaattattgttgttttatgtctctaataataaattaaaatatataaaattaaaaattaaaaaattaaagtaagatgaaaaaaattatatgtataaagaataaatgctgaatttcgttttaaattatattttctttataaataataatagaatttacttttgatctactacattttgaaatatatttgtatcatatgtaatagatttttaaattattattttttgcattaaaatattaaattatatatataattttttttttnnaatatatataaatatgtgtgaattcgcttgaatcggttacttttatatgtcaatcaatcaaaatgtaatctagacaagtgcagactttaaattttccaatctaatttaatgtgcgcaaatataaatattcacactttgcagattaaattagattagattgagaattaaattgaattaaatattttataa

SEQ ID NO: 13318 - DNA, 924 bp, Cannabis sativa
caaggtgtattaattatacatacgtatacataaaaaaaggatctttttagtttagttgacattagaattttcttttttgacctgaatattttagttaagagtaatgctaattgtaaatttttgaaaaattccgaatagtttatagtaccgaaaacagagttcctaatattccagtttaccatgcacgttcaaaaaacttcaaacgtaattttggcattgtaaactagtcgaaatttttaaaaaattacatggatgatgttgtaagcataacgaataccctcgtgaaaaaaaaaaaattgacaaaaaatattccgacatgtgttttccggcatggagattgactaagagattgtaacaggaggttgacggccgtagcactcctctttagttaattaatgacttataaatgattccaactaagattttaatgacttaaactaagattttaattaagtttaagtaaaagttgggtagtaccgtacttgtttaattttgagtttgggagttataaatattaagctaattaaaatttttttcataaactttgatatataccaaattatatatgttttttaaacttttaaggtcattaaaattcccctaaattattgagattgttagattttttgtctaattttagtaagaaatgtctaacatgaatgaaagtgcaagggacatgacttagtacgtgtcaaagttcgagtaatatgatttagtaaatatcaaatctggggagcatgatttagtacataaacaattatcgaattaataaaattgaatgaaattagacaaaagtctttatatccaacaatctccatcgtttagggacaatttttaatggctagaaaagttcagagaacataatttagtataaggaaagtttaggagacaaaatttttgatttaattggtataatttaattat

SEQ ID NO: 13319 - DNA, 502 bp, Cannabis sativa
taataatttttttttacagttctatcaatataaattttctgatattttgtgtttctgttcagatctaataatatagaatttgagtttttatatgtgcaattttataatttcaagtatttatgctgttaaaaaaatttattgagtttatgctgtttataaattcaaaaattttaatatttatgttactatttattctttcagaaatacttaaacccaacaaaaaaatttacactttataattaaaattttttatttcttatagaccgtcattttttttttaaaaaaatattgtttataatgttgttttttctctaaaaatatcattaaaatgtaatgaaaaaaatgatatgtaaaaatgaaaaaaaaaaaatgcaattttagatacttttgctaaattttcgttatttataaaaaaaataataaaaaaaaaggaaaactaattatagttatttaattgggttttttaggaaagaagctaaaagcgcaggtgtgaaaacggcgt

SEQ ID NO: 13320 - DNA, 849 bp, Cannabis sativa
ttgggtctgggtttgggtcggggtgttagtcctggtttgagtcttggtcgggtttgggtccagacccagatccctgtctgggtcttgattcgggtccaggtccgagttcgggtctcgtgtgttggtccaggtctaggtttgggtcagggtcttggtccggatctaggtcccaagtttcgatcccggtctaggtttgagtctgtgttcgagtatacgttcatgtacaaatccgtatctagctttaagtctgggtctaggatcaagtcccaagtctaggtgtgggtccaggtttgggtacacaactgtgtctgggcccgagttttggtctcagtttggttctggggctaggttcgagttcggttctaagtttgagtccgggtcttggtcactatcctagtcttgtttgaggtccttgtttggaagttcttatttaggttcccgttttggatcccgagtctgggtcagggtcccagtttgggtccttgtccgggtttgggtcttgatctgagtccaaaatcttgatccctgtcacgtgtcccggtctggttcttgttcaggtcctcggtcccaggtccgagtttgcgttcaagatctagactggggtgcggttctaggtcccggccccatttctgtttccctagtctggttccatgtttggttctgagttcgggtccagggtcggcatcgagtccagatctaggttgagatcgaagtctggttcctggttcaggtctaggtctgcgttggagtctgggtcctggtccagctatggtttgggtctaggtccaagtctggtaacggttctaggtccaggttgatgtccttgttctagtcctgttcttgggtccc

SEQ ID NO: 13321 - DNA, 566 bp, Cannabis sativa
ttaaacaagaaagagtgttgtggtggcacgtgtagtccataagagactagagtaatttcaacataattaaaagtgagagagtgagtttttaaaaacaaggggggccaaatgtgcggttgcatgaagcagtcaagggcagtggcttacacatagacacagtcatattatatagggtattgggtcgaaccccctgctaatggctcggaaggaaaaccaaaccgagtggacataaaatacaaaataagataataatataaacatgagaattgttaaaaaaaaaaaatattataatttttttagtattattttattattagtgtaattaaatattaaataacttaaataaaataatttttaaaaaatattacttaaaatcatttatctcgaaagtgcttactactactactaccaatatcaatatataatcatgcatggtctatatttggcttggatgccaccgtgctcgcctcgtgtccttaacaaagaccgtatattctttcgaatagaatctttcattttgttgggttgccactgcgtatacaatttcgattcgagtgtatataata

SEQ ID NO: 13322 - DNA, 586 bp, Cannabis sativa
ttttttttaagttataattttttttttttttttacaattcttcttatttggtttttatcactttttttttttttttaataaaactttaactcatctgtttaggtgtttttttttttattaattatttttatgtaattttttcagttatttttgtgttgttaaagttattttttttcgttgttactttttttttactctcttcaaataattatttaattattcttaatcatttttatttgactcacagtcattggctaaaagcgagatcaacagaaatatagagcaagagatttttttcaagagtggattaggcagactgatcatttaaatttggttcatttacacattctaattatgttttttttttttaataaaataaacaagataaaattattatgaattcattttaaaataattttagtaaacatcatattacaaatatttattatgattctttccgatttatatcgttacacttatctattaatttgttcagattctaattactatttagtaagcgtgccatagtgtttaggaggaagaagcgctaaagtgtggctcatttattatatatttgtttatttat

SEQ ID NO: 13323 - DNA, 593 bp, Cannabis sativa
cgttccatcgaggaagaacgctgtagtgggctttttctatctcgatacttaccccaacgagcctaaaattatgtagacttgccaaataaagtgtcctttaagaacaagttcttctggatgtttggtctttctcccatcggcacaaccaaccatctttcgcaaacttcgtaagtgattgttctcttcttacttatttacatcagtcttccttttttcaagtttatgactaatgttttgtttgttctaacagctcttttgacgagacctaatcttacccctgagatggttagtaggcataggcgcctattaacccttccttacagtcttcggtcatgcaacttccttttgagcgaggttaacttgcgatcggtgggccttctcgctgataaagaatatacttgtgattacaagatttccaagtatgctttttggcaacagattattgttttgcccgaggatcaggcctgggattgcttggctcaagcacaataccttcaaagtactaccccttgggaatctagtgaaggagcatcccgaggtaatcaatgtgattggtctcctattgtacttagagttgagcgtagtacattagt

SEQ ID NO: 13324 - DNA, 566 bp, Cannabis sativa
ccacatttagctgccaacacactcttattaggaaaatagcttgccttcaaaaccttagtacacaaagaccccggttgcctaagacatctccaaatttgcttagcaagtaaaacttggttaaacaactcaaggtcgcaaaagcccaacccaccttcctctttcggcttacacaaatacttccatttacaccaatgaatctttttctttttcgccgacgacccccaccaaaatctcgccgccatcctatggatactagtaatggtgctcttagtgaggcgataacaactcattgtgtaagtcagaatggcttgaacaatagctttgataagaacctccttgcctcccatagagaacatatgacccttccatcctctcaacctattccataccctatttttaatcacatcaaaaacttgctttttattcctaccaacaagagacgacaaccccaaatacttaccatgattatccaccactttaactccaagaaactcagccaattccaacttcctctccgctgccacattctttccaaaacagacttccgacttttggaaattaactac

SEQ ID NO: 13325 - DNA, 552 bp, Cannabis sativa
cttcatttgtgactccatgatatcaagatcattaattcgatcattatttagttacgcaaattgattatatagtggttgttttctttacatttatatatataaattaaatatgatttaattaagtacttacacagaatatgccatgcattatgtaattatttaaagaaaaaattaaaattctttttgctctctttatatatagtactcctaatcatggttttaatttcgttttgatttaggtgttgctgcagctctgattgaatatacctgatctggacagccaatgaataatctgatgataagttttgtagagatttttgattccaggaaatttgtataagttagttgatatatataattaagttcgtgattatagcagagaatttatacttagtctaattagtgataactacaactttctttttttattattagtatgcttagttttccattttacctcatttttctttttatgaaatctattaatcatgtgattaattttacacgtcctcacacaaaaatggatattatacgtcatacatcatcttactt

SEQ ID NO: 13326 - DNA, 520 bp, Cannabis sativa
tatatgatattcagtgaactcaagatcatgatgtacggaagcaatgaaagtagtgatacatattaccttttaaatctatggtttacataaatttattcgatccaatttttatgaaaatgattcttaatattaaatatttaactgtgattagattgaattttaaatatccaatcaaatcgaatcacatgtttgaagagggtattcaaaattctaacacatctaatatccaattattttttatttaatttagatgagtaatttgattttatgttcttatacttaatatatatgtataaaaattaagattaaaattttacctttttttaaattggattggatttctaatccaataaatattggatctaaaaaataagatagatctaattcgatttaaaaaaaaaaatactatatctaaaatattggataaatctaaatcaatgcaaaagatatacatcaaatgtatccaatggatagaggcgatccaatctaatctccaatgaatataatatttgatcgatag

SEQ ID NO: 13327 - DNA, 737 bp, Cannabis sativa
taagtatgcgatcagtattgattgcaagagaatgatggtgactttttagcctaagggtgaagagccatttgtctttgtgggtcgattctgggttcccaaatcccaatcatctcgataataaagggtagagacctattacaagacgaatgcataagatttctagcagatgtaatagacactagcagacccgaaatagtggggctctaaggatattagggttcctgctataagctaagcatcatcaaatataaagaccacttaagctatgttctcacaagaatcagcacgacttacgactctgcagcgtgacttacaattatgaaggatagattgcttagttacctttacacctgagtgatacctaactcataacagtaatatctattcagtacgacccataatgcacactatcactatttaagaaatctcttaaagaaaacttagaagaacattttgagagaagaacactagaaatttatttagtagaaagcttttctaatgatcttacaatgaaaaggatggctctatatatagccatttacatgaggtaggatacaaaatacgaaactttctagaaatttcctacaagcaaaaaaaaaaaaacacacaaaaggacaatctgacaacaaaaggacaaaatgaaaaaggacagtctgacaacaaatggacaaactgacaaacatagaatacgccaaacaacaagaaaaaattcttacaaacatcatgactatcaggaa

SEQ ID NO: 13328 - DNA, 553 bp, Cannabis sativa
gagagagagagagagagatgatcttaaaggtgtgtgagagagaggaagaaagactagggtttctaacttagaggctaaaattagacttatgttttctagattagagttaaggcctttatataggagagcctaaaccctaatttacaactaaaacccttagatatttacatattaaattaattaaatacaaaagactaaattgccccttaaaagtagatattttccatctagttttttggctattaagggcccaatttgtaggtagcttgtagtccacgtatcagactgtacaaagaatcctgtcaggtcaatcctggccagccatgttccagtcaagtcaatccttgccaaccatgctcctgccaaggtccaacaggttatattcatgctaggatttggtaagtcatgttcctttcagctttaccaagaggagagcagcctttgaatgtggaggccagcctttggcaagtggaggccaactttttacaccttttccttgtagaggtcaggtgcccttagtcaaacagaggctcccttggtgtgaaagtcacct

SEQ ID NO: 13329 - DNA, 735 bp, Cannabis sativa
gcagaggataactagttatttttatttcagccagcttagtcaccaattgctaggcgacaccaactgcgcaaccatctcaaaggtttgcaggtatgccaaaaattattttattgcatgaggtcgtcgtggaattgagcaccccaaattttagtttgtgctgcttttcaaatgttctatccctactttgagaataagggatagagcgaatgatatcctttctttatcaactgagcagagaaacattattcggttggccagtatggacaacttccggatgtatggcttgtgtcctccctctccctgagttgcaagagtgtcgactgctgatgaggcttggcctgattcggatgatgaagaagtagctttgtctcgtattcaacaaaatttagagaggagagagagagctctccgtaggcgcccagcctgtggtagtctagtaggtgatgcctccctccatatcatacctagaggcaaaaattttgatagacttacacgtcctgtgcgtacatctaggggcaagggcaaggccgtagtcgtgagctctgatagctcctcttctgacgatgttggtatttgatagttaataaacccatgctttatttttggattgaatatttatgaatgcattctcactttgctactttctttatgcagacatgtcttccaggctaagaggtcttgcaggtgggcctttggatgagcctagaagaagggtgaggaccaaggtggccagga

SEQ ID NO: 13330 - DNA, 686 bp, Cannabis sativa
  modified_base (385)..(385): a, c, t, g, unknown or other
aagctttatttatattaaaataatgttaggctgatttttgcccctaaattttagtatgtactaaattatgttttttgaatttttttggttgccttataccattaagattgttggatttaaggatttttgtctaattcattcaattttacgtgattgtttacgtattaaactatactctccaaattttgatatctatcaaatcatgtctctcaaacttttatatatactaaatcatgccccaaattttcatacatgttagactttttttactaaaatttgacaaaaatttttaaattcaataatcttaataattcaggaatattttaaggacgttcaaaatttaaggatgtaagacccagatgttatttgtggcaaattatgctgntttggtcatctgcctggttgttagtttcatctaaccatgtagtctaattgtttctttgacaagtcagcttagtaatctcaaaccgaggacagctgtccttctttgttggctgagctgttaaagtttgttagcttaagagttgttattataaaatcagggattaccgctttttttaactaactcttcttcattgattagaatattgctctgataccaattgaaaagtctaacagtgttgatttctttaaagttgttttaacatagctatatttatcttaatgtgcaagaaactaaacagaga

SEQ ID NO: 13331 - DNA, 554 bp, Cannabis sativa
aaaacacagtaaacgacaagaaaaatcttttttatataagaatggtgatgaatttcgtattatattcttaatttatgtcaatttttatttgttacttttatgactgttaataaattagtatgattattttttatggtaaaaaggagagaaggggataccagttgtgactcttctcttgggtgtaattatgacaacttaatttcgcttgtgccaagaccctcaaaggtgtattgtctgcacctactacgatgaagttgtcacatgaatttcaactaagcaccacgtgtatgaatgcccttaaaatataagggcgtgactaacctgatagacactgtctcatatttaagactcctaaaggaaccaaatttaaattcatgatctctattttaagaaaggggaatcatcctatttactaattgtggtattatttcttaaacctccaatcaagattcggtaagttagttagttagttagttgtctttaactaatttaattgtcaaaagagatagcaagtatattgagtcccttgtcctatataaagtgaactactcctc

SEQ ID NO: 13332 - DNA, 605 bp, Cannabis sativa
ctatagggtggccagggttagcttgtatggctggcgaggatctgggcacaagctggccagctaaaaggtgactttcaaaccaagggacctttcgtttgatcaagggaacctgacctctaaaagaaaaaggtgtacaaagttgtcctccacttgccaaaggatgacctccatatccaaaggctgacctcctcttggtaaagctgataggaacatgacctggtagaccctggcaagaatatgacctgccagaccctggtaggagcatggttggccagacctcatcctataggcggatggccagccaggagtggcctggcaagattctttgtacggcctgatacgtggactgcaagctaattgcgaattgggcccttaacaacccaacaaattggatggaaaatatctactattaacgggtaatttagtcttttgtatttagtcaatttaatataaatatctatgattttatctgctaatgagggtctaggctctcatatataaagggccttaacttaatcctagaaacctaattagtcgctctaagtcttataaaagcctctaagtctgaaaccctatttctctcttcctgtctctcttgtacacac

SEQ ID NO: 13333 - DNA, 619 bp, Cannabis sativa
ccttaattacaggaaaagcaaaggtatattatcagtaagaaattcccttttcttttgcaacaattattggtgctattataatggttgtatgtaatttgttttgtttgtttgctgttggttttttactggtattttgactcacaatgttttgtatgaatttcagtactatttgtgactttaaaatattatacgtgacacttgctaatatggccctattattaggcttagtcttgattgtcgactacatgtatgcccagctgttttcaccgaattctcattgagtttgtgactgacagcaaaaagcttgacaaaaatgaaggaagccaaaatgtaagaagttgtttggttgtgttttcaagttttagtttttagagttgtattttcaaatttgagaatagaaaatagttttttgtccttttaaaaatttaatggtatttgacacaaattttttaaaattatttttagattttttcttactaaaaaaatttctttattctacaccataccatgacatgaatccatcctactccacacccgattgaacaggaccttggctcgaattcagacttggccccggaccgagacctagacacttgacccagacttgaacccagaccga

SEQ ID NO: 13334 - DNA, 873 bp, Cannabis sativa
tattttcgatagatctgtgtggttattatttgcattaatgttgttctgttggctttttttattgaaatcgtgagatatggttttcttgccaaactgggtttttaacaaattatcgatgcttttttgattatatatcgatatcttcttgataattaaggtaagaaggtaagggatgataactttcgataatttttcgatggtatatcgataatatcttgatccaggacaaaatatagcaaaattaatcacacaaggcaaaattatcgataaaccatctatattttgttgatcataaaccatcgataatcaattaaaatactaagtaaaaaatatgtcatgaaccattgataatgtagtacatcaataaagcatcgatatactatcgataatatcatggtttatcgatggcaagctgatatattttttgcttggtattttaattgattatcgatagtatatcgatggtttgtcgatgattctgcctgtgcgattaattttgttatattttatcctggatcggaaatagtatcgatataccatcaaaaaagggtcagaaattgtcatctcttaccttcttaccctaattatcgagaagatatttatatataattgacaaagcatcgataatcaattaaaaattccaatttggcgagaaaactagatctcgccatttcgatgaaaaaaaccagcaaaacaacaccaatgcaaacaacaaccacacaaatctatcgaatataaattacatactattctaaatatttaagaaattttttggacaatacctacccattattgaggtgaatgtgtatgattttttttagatgatgaagtctggttgttcaccaagataggtcgagagagagagagagagag

SEQ ID NO: 13335 - DNA, 527 bp, Cannabis sativa
atatatatttgctataaaatattagatctggataggcttaaatatattgaatgtggtctaatagacacccctactcttaataatacacaatatatttttgagaggatggtaaaatttaacatccaatatataattcaatcggatctgaaataatctaaaaatattggatgtggtttattggataatattgccccacgtggatcaaatgtaaaaatattgagccatttattataaaaacacgggctactctcattaccaattagttttgagatggaacctcatgaatattcttaacatgttatcagagccatattcttagcggactttcgatccacacttatcagataattagccagcccgcaaacgagcaaaaatgaaactcccacccacgaacaagaataagcgagcaaataaaaataaattaacaaatggcactacttgtgataaggtgactcaagattggtgtgcaaaaatatagccactatcttgagagagaatattggacatgtattattcacatggatcaa

SEQ ID NO: 13336 - DNA, 850 bp, Cannabis sativa
ccctctccatgctcttgccatcacagctttaccaccaccgccacctcaggcgacataacctgagaactcatagaacccaaaggtaccttccccctcatgaatcccaacgctgagcctgatgtttatttattttttctcgatcaattttgtattttggtttgtgatatttgtgattttatatctgaaatcaatttgcgaggtttgtgtagttttttttttcattttattgggtttgtgatctgtgaaaaaatgtttcgacaatgatggtggtggtttcggtggttgtagatggtggtgttgatagattgaagaagaagaaggttgacaatttgaagtgatagtgcgtggtggtttcggtggttgtgttatgatggtggtggtgggaagaagaaggtttctgggtaaggaagaagaaagaagaagaagaaaaagaaaaaaaaaaagagaaatattttaattttttttattttgaaatttttttaagttttaaaataatttttataaaatgtaaatattaatattaggtgaaccaataaaatttcgctatgtgtatacttgtgtatacattgatagttcattttgacacttaacagactaaagtggacgaaaaaagtacagagcaaaacgattgtggaaattaaagaatttaaccctaattatttcagtctaaggactaatcgtgccaaactttaaaattcaaagaatttgactgtaaattaccttaatttatacaaaacaatcacgcggttaggtatagatggaataaatatacatttattatagatcaaatcatatttaaataaaaaaaaaatttataacatagttatatattatatgttattatatgaat

SEQ ID NO: 13337 - DNA, 647 bp, Cannabis sativa
  modified_base (308)..(311): a, c, t, g, unknown or other
ttattagccagagacttcaaatgagtattgcatctgaggatagtttttatttagggcttccaagcaccatgtcccgcaaaaaaattgttgttcttggctatctcaaagataaagtcaggaaaaggctgcaacaatgggaaggcaagttcctctcaagggctgggaaggaagtgttggtgaaaactgtggctcaagcactaccgagttatgcgatgagtgtttttcttcttccaaaagaaatcagttggagcattgaaagcatgatggcaagttattggtggcagactaacaaggatagtggaaagggnnnncattggttgtcatgggataaactttgcaaacacaagaaagggggaggaatgggatttcggaatctgcgggactttaatttggctatgttgggaaaacaagggtggaggcttcttacaagaccaaattctttggtaacccgagtatttaaagcaagatattttcctcagggagactttctatcagcctcgataggttccaacccaagttttgtttggaggagtatatgggaatcccaagacttagtaagaagaggagttcgatggtgtattggttcagacaataacattccaatactccaatctccttggttgccagatgagatcaatccttttgtc

SEQ ID NO: 13338 - DNA, 568 bp, Cannabis sativa
tttctttcatcagtacaagcaagtcatgtctaagagcacttacaacaagtaagctataatagtttaagttataaaatttaggtcaaaataataataaaaaaggcctccatcaaatgagctaaacgagtgctctattttagctcaccatattttcttatgaagttaagtttacctcttgtctaaatttattttagggtaaattctattttagatcttgtgttttgtaaaagttaccgattggaccctctgttttgctaaataacaaaatggaccatatattttccaaaatggcacaaatatgacactgagctcaattttcgataattttttcttttaatataacccaagttgaagagaattcctaacacgaatagatacacaaaaatgtaactagttttgtcataatacctctagattaggttataataaattttattttgaacaaaaattagttcagggtcctatttgtaccattttaaaaaatacaaggtttattttatctctgttttataaataattagcaattttgcctcctggactttcaacaatactaattttggtccctaaa

SEQ ID NO: 13339 - DNA, 762 bp, Cannabis sativa
gcggtggcacagtatatatacatagtgacatactgtatgaagtgtaattattattttaattatcgtactgtattattttaattatcatgggtgctctattgtgtaggcaagggtaaagcaatgtcgagtcagccatgagatcaagggctttgagaatgacttgtacatgttccagccaagctagatcatgagggttgggtctaacagggaattgtatagaaattccattttatcatttaggttggcctatataaaataacttgtaatattttgcaaataattttaacgggatcccgaatatgtaaccttaaattcttttggtttaaagtaaaacatgtatgtttattgcaagttatttatttaattaagtttattactcatttcaaattacttggcttatagaccccgattaataaaattagtagattgtaatcacgacatgtgacgtttctctaagtagaatgttacaacgtgagtctttattattagttggaactggtagacgtagatctgagcattggtctacactgaatgttaacatgatcaatgtaagtgttgatggagcgattttcgctaacttggagagatttggcatgggttgtttggctagggggcatgatgggagggtgaaggaagcctttaacagggataagcaaggtgttgttctttctgaaattgttgagatagtgagtattaaggaagccttaagttgattttatgaacatcaatagtcaaatgtcatattggagttagatagtctta

SEQ ID NO: 13340 - DNA, 511 bp, Cannabis sativa
ttatatttttatgaaaattcacattgcaactgtaattaatgaagggatgttcataaaaaccgaaaaaccgaaactgaccattaaaccgaccaaactgtaatcaaattttcggtttcacgtcatcaccgaatttagcgattagtttcggttacggtttttctgatatggcaatcaatttcgattttcaaaaaaaaaaaaaaaaaaaagattaaaccaaataacaactaaaatcgctaaaaaccacccaaactgcccaaaaccacctaaaattgccaaaaatcgtctaaaaccgccaaacgggaaaactgccaaaaatcgtacggtcaattttatacgattataatttttaaacggtcggttacggtttttgtaaaataaaaatcgtaactgaccggtcaattataaagttgtaaaaaattgaccataactgaccgatcttcactcttagaagcaacctaaatcacaacccattaaattgatatatgtctagctagacgtggtgtgaccaaaa

SEQ ID NO: 13341 - DNA, 595 bp, Cannabis sativa
caacattgcaagaaagttggtattcctagacactaaatagtaccaaaaacaccccaacaaaatggtctagctgaaagaatgaataggaccattatgtaaagagttagatgcatgttgattcactctagtttactagaatttttgggcagaagctgtcacaactacttgctacctaatcaacagaagtccatcatcagctattggtttcaaaacaccaatggatgataagatatgaaataatgacaggtatgatcatctcagagtttttggttgcatagcttatgctcatgttagacaagataagttagaaccaagggctagaaagtgtatctttataggttatccagaaggtgtcaaggggtacaagatgtggaatgtagaacctggtaatcatcaaaagaaatttattagtagagatgtgctatttgatgagaataaggtatacaaagatacactcaaaactcaacaagaaaatggtcaatactaaaacaaatgagagcacacagatggaggtggagtttgacaagaacaacactcactcaggacaaattatgaaggaagatgaagaagatacccctgttgggttttatgccct

SEQ ID NO: 13342 - DNA, 564 bp, Cannabis sativa
gcaatccaacataacctcccacattcgacttaacctgccgtaggcaatgaaatgcaaaagcaagataattaggtgaaaataaaatattgataaatattattgacatttaaactctcaacttcatcaaagacactgtatatagataaatagttatttaaatgaactgggtattatgcaaattgtggattagcattccagtcaacacagaaaaacaactagatctgaacttataaccaacataaaaatatgatatcactcaacaccttaatgaacgaaaaatcaagtgtgacaagtggggaaaaagaataactattcatcagtgtcatatattgattaagcataaatacttatgagaaagttaaaccatagttacaatcattcgcccttcctaatttatggcaagggttaacattttttcacccaacatgcattaaacaattgaatatgaagacttttttacagaagtataagttgtatttatgcttgtccataaaagttcatataaataaaaaatataaaaccagaaccgattagaaaccaaaacacatacccgccaatcaattc

SEQ ID NO: 13343 - DNA, 552 bp, Cannabis sativa
aaccttaatcaaaatatgcttaactctttgtacattaattagaatcatccagagtattggagaacactgtcccacatgaattaaatgtaaaagtattgagacatatataaaaacatgagctactccacttatcaccaattggttttgaatggaatctcatgattctcatcatggtatcagagccatattcctagcgagttttcgatccacacctatccagatggttagccagccgcacgagatctagatggtgcgaagatgcttgagatttgaacaaaaataagcaagcaaatggcttggcctatgataattaggtgattcaagattggtgaactcgcctcggacttacactatcaataatggtaggttacaaattggttcaaagacttcaaatcacaactctgactggtaatctctcaaaaatttcctctacattttttaaaaatctatcttgatttttctcatactaatcactttctttatttttctttacaaaatgtctcattgtctctctcttcaactttctagaatttttgaatctcgactaattaa

SEQ ID NO: 13344 - DNA, 524 bp, Cannabis sativa
gaaagtttaaacaaattaatatatacgtttagtgtactaaatatatataatataataaattattaaaaatataaaatattttgatcaaagaaattaaatgagtttcacttttatttaaagtggaaacaaaatagggcattgctgcaggacgatctttagtgaatttatttgggttataacttaattaaattattatgtatttttttaaaaaaatcaattttagtttgtgaagaatgttattaataagaaaaaaaaaatattattattctaggtatatggttaatgttagagtaaatatcattattttaaatttgtattttgtataaaagttactagacttgttaaatgatttgacattgtattttaatttttaaaataatataaattattagttgatttttttttttttcaaaataaaatttaataataatccaatataaaaattttgtaacaagactgagtatattttctatatttgtttgttataaaaaaaaatcaaagtataagtgtaaaattaatgatat

SEQ ID NO: 13345 - DNA, 780 bp, Cannabis sativa
tcctaaacaggattttccattttttattgcttttatctggcatatttggaatactcgaaactcaattttatttaataaatctggtactcctaaaaatgtggaagagtttattattaattatctacaggaatatattgctgctcagggtaactaccaaggagatgagctggattctgaggctgtccccatatctcatactactcagcagcagcattctactaccctgcatcttgatactccatctctttttgttgatgcagcccttgaccacaagaatggcttaacaggaaccggtttcatcttcaagcttggttatcagactgtcttagcttctcactatcgtcctttgcccggtgctgtttctcccatttttgctgaaggccaggtgcttctgcagagcttatggtggtgtttggattctcaattgtctcctaagtttgtcttctcagattgtttgaatttggtatctaaagtgaatagtgattggcaagataattctgctctttctggacttgtgtctcggattcgattgctcttctccaactttccggatgcttctttgcattttctacctcgtcagcttaatatggacgcccatggtcttgccaaagaagccctcaggccgagagaagatagctagaggggattgttttggtccctctttttattgcttgcgttttagtttcttctttttctgcagcttctcttgttcaaaaaaaaaaaagcatgctaataaaattatatgtcatatcaaaaaaaagtataatagaaaatagaact

SEQ ID NO: 13346 - DNA, 632 bp, Cannabis sativa
tattatagataatattgtataaagtttccacagtgcattgggggacaaggattaagggcgcccaataccagaatacaagataattttaaaagggtaagccctccattgatggcaacttggcaaggcattaaactccacatgttcaaatttctagttatcttttaattatttttatttttattttcaaaggggctcaaatttatagctgagcttatatattataacctaaacctatcacatgggacttatttctgttaatttattgggattcgtatggtcttctcaaatttaaatctgtacatacatgaacctcattttgcttagataaattcagatcttcagatgttttattttttattttttattttttgctctttttaaattagtaacattttaaacaataacgtgaaatacaaccaacactaacctttgtaaggaaagacaaatgggggaaagacaattttggagaaaaatttggagagaagcaaaaaaaagaaggttgtttagtatgggagaaaaggaggaaaagaaaaatagaaatgttaaggcaagttacggtgttttgttaattattctactaatatttattaatcaaaggattttcacataaaaaatgaaattaataaaatttt

SEQ ID NO: 13347 - DNA, 664 bp, Cannabis sativa
  modified_base (333)..(335): a, c, t, g, unknown or other
acaactaaacactctcctaaattcccccatcaatgtattaacccagtctcttaatattagatggataaatattattttgaaccttttgtttgcaaaagttataaattagactctgtgttttgttaaatgataaaatagatcctgtattttctaaaatagtaaaaataaaaccctaagcttaatttttgataactttttttttaatacaaccaacttaaagacaatacttaatacgaacagatacaaaaaatgcaaacagttttgtcgtagcacttttagatcgaattataattaaattttattttaacaaaaaaatcaattcagggtcctatnnntactattttagaaaatacatgatcaattttatcattgaacaaaatacagggtccaattagtaacttttgtaaaacagaaggtccaaaatggtaattacccatattatattgttattggtacaattaagtgatatgtcttatgtaatttaataaattaatttttataaaatattattaactaatcctaaaattttacttataaaaaatattgaatattaaatagcaatactcatatatttatatgtatacactttcaatatcatataaataaataacattaaaataaacaaacatgctaaaaaatattttttaagtataatattattaat

SEQ ID NO: 13348 - DNA, 514 bp, Cannabis sativa
aagctattttagctaaaaacaatatatcaaagcggtaaagtttatttagcattgctattaccactttctccacatatcgcgttgcgattggctagcgatatttcctaaaaattattattaaattgtatgagactcgatacttagtgggaccaataacgatattgacacataagaggatgttagacactgctggtgccctttagcatatctcttacttttactctatcgagtctacagtgtgcaccctagaaaggagtattgtggtaaatttattaaaaattttgtacagtttataatgcatggtaagtaacacgacgcatgctaagtaactgtttaaatcttttttcaatgttgtaaagtgtttaaaattttctaaaaatttataaatgaatctaaatagctactacgtatgcaatcatgaaaaaataattaaactaaaaagataatttaaatatcaaaacaaatatggaatctaacaaatttttaagaggatttactactcaaattttccaaa

SEQ ID NO: 13349 - DNA, 533 bp, Cannabis sativa
ctttctccaataccaactaacatctagcttaagctcatgaacccaaacactttgattctttaagtaaatgctattgatccattttacccaagactgtcctgcttcaatgctagtgcccacaatcttttcgatttgcaaaccaattcccaggaggacagatgaagcttgcttgaattttctctttctttccaaaaaacgtttctgcatagtttatccacttccttgatcacactctaaggtagcataaaaatgcccatccaatgattttgatgcctatcaaacagatttataatctgagttctcccttcatatatgagatgtctacttgtccagtagacagtttcctccttattttagtaaaaataacctcacaatttgcatatttttatttggttggtctcaaggtgactcccaaatatttcaaaggggaggattcatcttcgaatttcattatctccatgtgttattctattttttacactatgacgtggcttctagctagatgacatgtgtcttgcattcttcaacttaag

SEQ ID NO: 13350 - DNA, 672 bp, Cannabis sativa
aataaccgacgatgtagggtccctacagcgtcaaatatttttaacccttttagcctcacctagaacagcgttggtggtgaattttgccgaaaccaacgctgaatggccttaaaaaccgcctctaaagcttaattttgtagtagtgaaaagaacaaatatgttaataataaatgtctaacttaaataataaattttaaaaatgaaaacaattatcatatttgaatttacatcattatcttgatcatttacggttatttgtttagttcgtgtgccggtaaaaaaaaattatcaaaataatataataaaatattaataattaatgtatagacttatataataagaaataaataattataccttgtttgtcaattaccaaccaactttgagtacagaccaatgctttcaaagtagtaggatgaagtctcgcgcgatgtggactcacgtgtctaccaccaatactgaatgatgactctgaaccaacagtgctaactggcacaacaaatatgtaatggcagtaatgttcaacacaggatatttagatcctgttatcttccaatagttagatatattaaagaatttatcagtcctgggtaatacttggtcatctaaatagagatccaactttaacttttcatatatttcaccaagtgaaactctaacatataagtcata

SEQ ID NO: 13351 - DNA, 789 bp, Cannabis sativa
  modified_base (577)..(582): a, c, t, g, unknown or other
ctcttagtggattttggtggaatgttcatttcagcttagtttattatagaaaaaactaagttttattgcattaattattatacaaagaaaagacaaattagaaagaactatctcttgaaattctccttctctctttcgaccctagcaaaaaccagaaaaataagcccaatctcatcaagttttctgagatttcatcagcaaagatttaaggtagcttaatcctaggtatgctctagaaacttttaatttgtaacgtccccgcttcaagtttttattgggcctttacacccacggaatgatggctcttatatacgagtacgtcactctggctgcttcatgggctgacgactagccctacaaaccaacacgagtgtttcaagtgtgctttgtcctcactcacacgcttcttggaaaaacttcccaagagaggtcacccatcctaaaattaccccaggtcaagcacgcttaaccgtgaaaatctttcgtgatggactaccgaaaaacaagatgcaccttattgatacaggtagtaccaatcaatccatttaagccctcttcaattgtgtagtcccatacnnnnnnagtctcagaatcatcccacttgatttttcccatgcgatgtgagattgcacagctttaattaccggtattttctcttacggatcacgagattactgactgtcacataatttatcacgatttttggaaaaaatcttttaataagtaaagatgtgcactgtaattagaaagttactgtagcgtacctaggtattagggcgttacatttat

SEQ ID NO: 13352 - DNA, 518 bp, Cannabis sativa
caatcccgaaggtctccattgatgcccagcctgaagatgcttagcttgaacaagtttatccactttttacatactttaatatttttatcttttgggataaggatcctttttttttttgtatatgcagagataattttttatgcccttgttgcggggcttttaagtatgtagtcatatttcttgaagagtgcagagaaaattttgaattttgaaaggtcaaaaattttaaattgggaaaaagtggtaacttgaagtcgtaaagggtattaatacccaaagaggcaattcacgtgaaagaggatgggagatccatgatcaaacctcaagaaacacaagcttcatcaaatggttggggagttcaacaatccaagcttgtcatcacaattgatgatccatagaattgaggcacagatcaatgatgaagatgacatttattaatttttgcgccaaaaaagtgaacaaccgtcaaaatattgtttctataaagtaactcattgatactcatgtctttccaccac

SEQ ID NO: 13353 - DNA, 616 bp, Cannabis sativa
tcaatatggaattcgagcttcctcggtctctcaatctctctttagatagaattttgttgtttgcacagaattagtgaagagctcaaggaacgagactctatatttataggtgagatactctatcagtatctgggtcatatcaattatcaaaatattttgacaattaattggaaaataaaatcgggtaatgaatatcaaaatctgaccatatatacaatattacctaattaattttgtctagattcaatgaatataaaatattcatttatctcaaaataaattatttaattttattcgataaatacaagtattctaataattggtacaactattgaggttgagtatgaaggtcaggatgagtagcgtaactttgagaagacatataaccaatatattgtgatggaaaatacttatacaaaaactgtgggtcatttaatttggtgcgctatacaggtgccaaacttctaagtgagtcacacataaccatccacatctccatcattgttttgatagcttgttcgaggtcagagaattgattagtaaattcagtatggaagtatatgcaatcaaatacttaccataaatatcaatcataatattaataataataagatat

SEQ ID NO: 13354 - DNA, 552 bp, Cannabis sativa
  modified_base (198)..(200): a, c, t, g, unknown or other
attagtgatactttttaaaagttacattaaactatataggactgatacttaattggatcaatagcgataatcacataggagggtgctaagcactactggtaccttttagcatttctcatattatatagaccatattgctataattaggcattttgcccaaaaccatatcaatatacattacaaatttttttacttttnnncacaacaaaacttgtgactaaaaagaaaaaaattgtgactaattataaatcatcattcttatgttgtgactaaaagatttgtggctaaaaatattagtcagaaaaactacaattattgtgactaaatgtatttttagccacaatacttgttgtgactaaaattaaattagtgacaatttgtatataaatactatattttagtcataaataatattttgttgtgactaaaagtcacatttattcaaaaaaaaaatatatattgtgactaaaaattatcactaaatataacaaatttttataatgatatattaaattatgtgagacttcgtattaacttaaactaatagcaatt

SEQ ID NO: 13355 - DNA, 602 bp, Cannabis sativa
aaaaattaccaaacaactaaatagctaaaagttgatgacttaacttgttgtcttcaatcttctccacatgattagttgaatggtcaataatcctactcttgattttcttttgcggtgactggagtgttatcgtctaccgtcaactttctataacaattttttaatcaatggaagagtatcttttttttttaaaaaaaaaaaataattatggttgtgtttgttatagttacaacaccatttttgtaaattttttaaaaaattcaataatttatggtattgaaattaagttgaagtttttcgaacacacgtggtaaactgaaatataaggaattatgtttttcggtattgtaaactatttataatttttaaaaaatttacaggaataatattataactataatgaataccactataaaaaaaaataatgtgtaactgtcatattatcacttcatgtacaatttattagccgtaatcgtttgaaggtggaagagtttaaataattaaaaacaatattatctcatcgatgacatgatattaccttatgtaaaaatgcacataatgaggtctgattctagataggcttgactctaggtataggcggg

SEQ ID NO: 13356 - DNA, 591 bp, Cannabis sativa
atttttgaaacagtgaagagtgaggagaagagttttatctaaaatccttggttgatggtctttatcttagacaccaatctcaaaaaaatttatttatcttagacaccaatctcaaaattttttctataaataccaacttacaaaaagagatagagagagaaataaaaaacatatataaagtcttgggattaatggagatcacatgagcgcgtattttactttttcaaatttaagtaaaaaaaattgtcaaaaaaataatataagccattaatcaactaaacacatataaataaaacatatatatataaatttttaaaaatgggatcacatgttagttggacttaaaattcaaatttaagaaaaaaaaataaaaaatctacatgaaagtgacataaaagtcatcaattagtaaattaaataggtttgctcaaaattaaaaaaaaacaatatacacagtaaaaatataataatcgttgtgtaacagtaaaaaaataaataaaaaaggaaaaatgaggataggtaaatttccaaaaaaaaaaaaaataggggtacacaatttcacatacctttttcataaaggtgctattttcc

SEQ ID NO: 13357 - DNA, 550 bp, Cannabis sativa
atatatcgatcctcaaaggtatattgtatagggtatgtctataacttggttggcttggctgctaataattaaccaaacattcaagtatagggtatgtttataatacactttctaagatatttagagagttttttagcttaatttatttgtatgttatagttatttaacattatttgtaaatttttaaaaaattctgaataatttataatattaaaaaataaaatttaaatatttaatttacacgattcattttttttatacatgtactttatttttgactaaattatttcaaattttctaaaaatatttatagatgttattaaataactaccacgtatgtgatttatgaaaaataaaaaatcagactaaaaaatttcatagatgacaaagtagagaggtctaccaaaacaattttttagtagaatgtattatagaaatttcttattctatattgttagttggttattcaattttttttaagagaactttttttttttttgttttttggatctttaattttttatgatatttttagttagttatttaattt

SEQ ID NO: 13358 - DNA, 1152 bp, Cannabis sativa
gtatgtaagccgaaggatcaagacagagctttcggtgcattgagcagtggaatgtggcagctataggtaaacatgtgtgggtcttagcacatataaaagacaatttatgagttaagtgaatccatagtgtacttgaaagaagaaaattggtgaaattataagacccaccaaaataacaattggtaatgggctcaagtaatggaagttagagatcaactcaaagtttttgctgtaaaaaccagatggaaactataatgaccacgtaatgaaacatgaagattagtgattaattaataattaattagtagattatgaattatttgtgtaatattaaaagtaagtcctattattagtgtttatcaaaatttttagaaattgattataaaataaataagtttaagaaagaaattaattaaaaaagaataaacaataaattttatgtggtttgagtattaatgaactctagtccacgagttaatattattgagctaaaaaagtttcaacgtatttatcacaagtatttttttcctaaaagatgaaccctatgttgattttatggtactaaattaggtacgcagtggaataaatgttactgattatcatcgtaccatatccctaagatcaccatatgtatttatattaaatctaaaagtaaaatagatgaaaagatagtttacctctcgaagcctatcaggatatcctcgagtctttcgtatattgtattcttagaacagcaatgtcaaactcacaccttgattttccatatattccaccacacacaaggactagtgtgggctagtaggataaaatgtatataaggttctaataggattctcaatacatgagcaagaacaattctatagtgtttgagagaaaagattcactactacaaaaaaagttttttgcttcggtttttaggaattttggtatacccaacgctgatttttttgcttcagttatgaaccgacacttattgattatttacttcggttatgaaccgaagcaaaaaatttttttttgcttcagttcataactgaagcaaaaaattagtgcaccgacgctaattattttttgcttcgatcataaactaaagcaaaaaaaaaaaaaaatagtaattataactagattgatgccacacgaattttttcagtt

SEQ ID NO: 13359 - DNA, 548 bp, Cannabis sativa
tatatatctcattacaccatctgactctttcccgtttcaggccataacaagttataacccctcttgatatatatgatccgataaacttctctttgaaattgctgctcatcaattagttagttcacgaaatatatccttaatatatagctaccaatttagtccacgaaattgctatcttttatatacacataattaatttatttcacccatagttcatccttttttgttagatatatagcccatatatgagttgatattttatttgataacattgtcgttaaatacactatatatatttgtatatatttaagagtttcgataatattttagggtttttctttcaataaaaaaagattttagggatttttttaattatatttttaaaaagtatatattgtacgaattatttcattaattttatgcatgagttattatgccatatatataattaattgattaattatatcatctttatttactcgtaactaaaatcatgatttattaaatttaaattagtaaactcatgatttagtaggaataatgtcacc

SEQ ID NO: 13360 - DNA, 501 bp, Cannabis sativa
taacaaaagaaagaagaattaattcttctctgatacacacggagtcctttaggcttatcatatttgcgccaagaaattgtagcacaaaaaataatattttttagtactctggcattacttttagtatctctttatttcttattttggcgataacttgtgattatatttatattatatgtttaagattgtattttaacaaaaaatttctaaaataaattatttaaatgccaaggtccaggctgttggaaccatgttctaaaaatttagaaaaacaagtaatttattaagggaaatttaaagtctaagaaaaaagtttgaagtcctaaagttctgaccataggaattagaacttcaaggaactaggaaataagattaacttagcaaattaaattcattcaagattcaacaaatacttgatgaatttagactgtaaataagtaaaatataaaggagttacaatatttacatttaaaagcctgtggcaaggacacatacattgtc

SEQ ID NO: 13361 - DNA, 644 bp, Cannabis sativa
agaaggagtaaattacaatgagattttctctcgagtggttaagcatacttcaataaaaatacttctaagtttggtaactacagaaaaccatgaactagaacaactaaatgttaaagctgactttctacatggggaattggaagaagagatcttcatgaaacaaccaaatggttatgaagaaaaaggaaaataagattaggtgtgcttattgaaaaggtctctctatggtttaaagcagccactaaggaaatggtacaagaactttgatgagtttgtcatcaaaattgggtttaagagaattcacatatggcatttatgtctatgttaagaactcaaagacaatattatacttgctattgtatgtggatgacatgcttacagctagcgaccttggtgaaattgaaaaagttaagaagcttctaaacaaagaattggagataaaggaccttagacctgccaagaagatacttggggtggaaatcctcagagacagaccaagaagaagtttgaaattgtctcaagaaagctacatctgcaaaatcttggacatatttggattctcagatgttagacctatatgcactctaattgggcagtagttcaattgtctcagactcaaccacctgttatagaacaagacaaag

SEQ ID NO: 13362 - DNA, 829 bp, Cannabis sativa
caggcaagcactagtagtgccatccaggcctctagtggaaagaacactgggggcaagcgcaacaacaacaactctaggcagaacaatggcgaaaaggggaagtacaatatttctccacaccacgaatctagaaagataaggaggtgaagtacacctgcttcaccctcctaacggagaaacctaagaccatttacatggtaacttagtacattgtcccatacaagaagccccctcccatgaaaagggagatgagcaagagggatatgttaaatttatgctgatatcacaatgactttggccatgaaaccaacgagtgtcaaaacttaaggagggagattgaattctttataaggagaaacaatccccacttgagtttttatgtttagaacaaccaatctcaggcacaagttgctgagaacggagaccccacattacaggcaaaataagcaagggtatggaatgttatgctcagacactccctcacgagcctaaaagcgatatcctagccattgaatagaggggctccaagcaactcaagcttggggagcttgtcatctcttttacagaaggagatgttgcccaagtatacttctcgcataatgacctccttgtcattactacacaaattgggaacataacggtttcaaggtgtatggtggacaatggagcctcctccaacattcttttcagatcaacatatgaaaagatggggctcaaactaatcgacttggaaccttgcatacaagtaatgtacgacttctttggccaagatattgcgcccatggggtacatccgactgcccctaacagataaagagaatctaacaacc

SEQ ID NO: 13363 - DNA, 531 bp, Cannabis sativa
taatgcatttaaggagagtagaagagaagcctttggtccgagttggaattttttcgactttgttgtggcagaagcacatgaccaccgaaggtgtgttggaaagtatgatactagcttgaaagtgatgaacaaacttcttggagagtacgtggatggtgtcaatgtcttctgtgcacaagtaaagacttttaatatattattattactattattattttttttaagtgtagattgtaaggtgatattatttgatcacttgtaggtgcctgaattcattcagaggttatatattgggtcgttaattctcacatcagaagttaacaaggttcaagacattacaatggagaaagctattcatttttcaagcgccatatgagtagtgtctgtagttttctattttaattattttttgtcgatgtacttacatttaattcagtgacaattgaccaccttcagttttatttttatcttttatatatatatggatgttgatcttgataagagcacaacttcatagtttttttttttttt

SEQ ID NO: 13364 - DNA, 730 bp, Cannabis sativa
tatggtaggacttaataaaagttttctacggtagggtattttttttaaccattgattttagatcgtgtggttattataaattatttttattatttaaaaaattattttaaatttttttatataggtatttatttttaaaaaataattttagttaccaactttgctattatagtgttaaaatttattttgtaaaacagtcagcaaattaactaacacatactgttgatacggtagctcaaatctattatgatcgtagtatttatgagtctaacactacgactactatgttggatatcttatattcggaatgctaaatttaataaaattgctattttttctaaaaaaaagaattacttcttaataatattttcataaaattaatgtaaaaaagtaaaagttaaaaataacttttaaaaatttattttgatcatagtatattttttttctttccaaataatacaatttaataatgtattcactccacttttaaatataatttaaacataaataaataaataatcacctacacaactaaattcaaataaaactatagaataactcttaatatagttttattagttgaagttaactacttataaatacactttgatggaaaaccgaaaaatagtaaattttattgtaattaatagtctatctacaaatattttaaatttagaaatagtcataatattaggcatatattttgtacactatattaacgttctaggta

SEQ ID NO: 13365 - DNA, 510 bp, Cannabis sativa
gatttgtctctatattttgtttttgcctttttcagcttcaaaagaaacaagtgttggtagaaatggtaattctaatgtgaagaaagcagtgataattatagctttcattctctttgttggattagttttgattggctattacattcagaaggaatacatacatggtaacagtctctctttaaccctttactttatttttgtcatacaacacttttggcttgaaattattttgatttgaacagaacagagcatttggttttgtaaaatttaagtgcatacttactaaatttttgactactgagataacattaattttttgatttgtgtaattgtatctttggtggttaggaggggttgtgttagttgataggattgcatataactgtttctttcatgttttctatcttcttttatataaaaattcttgggtataaactagctttaggtatgttagtatttttctgtatatgaatatgtggtgaatgattatcctctaaacaccattgttac

SEQ ID NO: 13366 - DNA, 713 bp, Cannabis sativa
ttttttttttttttttataaagcagctccttattatttctttaacaaaaaaaaaatcatttatatatgtagacactaccatactgtatactgtgtaatctctatttaattttaattttattagccaaaaaaaaaaaagtacctgaatgccatgaagtacaaactaaagttcttacaatcaaattacctatatcgattcaaactaaagtctttttttttttttgaaaataagacccaaaggttacagagggaaagggtaggggtcttggctattccaactccaagtgttatctagccctatggacacttgtgccaggttatgagctgctgtattcccttgccgcctagtgtggtgaagggtaacagtggggaacgaagataacagccgtcgaatagctttgattgtgttgccaaaacttgtaagattttcatttgatgattgcaaatccgtgaggaggtttttgcaatccacttctacatggttgatgttgattcctttatcatgacaccatttaagagcttccaacaaagcccaaccttccgctgcttgaggatgcaattgtccaattcggttaaaagctgttgctgctataacttctcctgtgtgatcacgaactaatgctccccctcctgttctattctggtgagaggagatggcagcatccgtattgagtttgaaaaatcccacttgcggaggttcccaaaccagaagat

SEQ ID NO: 13367 - DNA, 695 bp, Cannabis sativa
gaaattctatggtgcacttttttaaaaaaaatgtactgatgtatttattatgtttttggaatccaaatagttatttttttaatgacagagtacatatttaggacattcaacaaaattttaaaagatttaaaataatttaatatactgaaaataaatttcaaactgtctattgcatttgcactcgtattttttagtttattttatatgcatataaaataaattgtgtaattaaactctactttttgtattataaattaatttaaatttcttgaatctttgtgaaatattttaaatatttacgatgtagatactttttttgataaagaaggaaagcttcattaatcaataattgaacaaatatgtacaaatacaagcaaggggcagcccccaatcaaaataaactctctacaaattttctctcatgccccctcaaacatctatttttaacttgcaatctatagtatatgattctttttacatcattaacaatggagttgacagaataagaatgcctattgaaaatacaattgttcctattgttcaaaagactatacattgttgcagccaacacatcgacaagaattttgtgtctaaagttagtggtcctaacctgaagccaacttttccaaccggtggtagtagtcggccaagcccgataccctagccaagcgaaaattccctgcaacactctattc

SEQ ID NO: 13368 - DNA, 697 bp, Cannabis sativa
tatgtgaataatttgattagagtagcgcttaaagtgggattattatttgatgataggagaaaaatctttaagagggaccaacgaattttttattttgtttgtaacatgtaagtaagtctgtcttttattgttttgtggatgttggtctgtgtaacatttgttctgttttgattaataaaacttcctcttttaataaaaatataattaaaattttgtggataaataaacataacaggtgtataattgtatacacatagacttatacttttagcacttaactttagaaatttaacacaatggtaaaaaccacaacaaaatgtaagtttgaaagattttttcacaaaaaaattagtttgtgagattaaatgttacaaattgtataattcaaataattttactgttaatatattttttatatatatatataaaatgttgatattaaataggctacaaatccccattttaaaaaaactaaataaataaataataataataataggaccacaaatcagtggtctaaacaattcattatcagtggtctaaacaattcattaaaaagaaaaccaatgaattgttgctagttggttgaatttatttatttattgatagaacagttgtttgaaatttgaagttagctaaccagtgttctagtcattttttgttttgtttttaatattatgttatttatttgtttaat

SEQ ID NO: 13369 - DNA, 637 bp, Cannabis sativa
ataataactgttctatttctcatagttatatatatttttttatggctaaagtaatatataattaaactactaaaagaaatttgtttttgttgttttttaattgacttataagagatttgcaccggtaagcaaaacaaacgtaataaccataaacacaaatagtatcttctttacgtcaattttcaataaatgcataaaattttatgaaaatgttcataaccgatgcaaattaccaatatatataaacatatttactcaataaaaaaaaaaaaaccaaatttacgatggccatctcgaacccaaatctaaaataaattcattacatctgcgatttgaacgaaagagataaaccacccaccgctaccagatctaagtataaaattaatgcatgtaaatatatacatctataagatatatatacatacatatatatagcagagagagaaaaattgcaacgccttaacaaataggcacgttacccaagatacttaagaaaccataatcccctaaccgggattactaataaaagttagcgcaaaaattaaactttaactataaattggaatgaaaataaacctgtaataatttaaactttacaaactaaaagttgcaagttttgggatcccaaaaatacttt

SEQ ID NO: 13370 - DNA, 518 bp, Cannabis sativa
atacaagccaaagcctccttccctctttgttaaagcaaaattcgagttttctagttttcacaacttagctacaactagagctctacatttaagtcgaaatttttagcatgataccaaactaacacaaaattaattgttacaattataacacaacacgaaaaaaatatgaacttataagattcaacataatacaaaaaacaaaaagacttagtgcatgtttgatatcgtaattaaaaaactgttttttttatttttaaaaacagaaaattattttttaaaaacaattaggcttgtttggccttgtttttttaaaaacagtttttagaaaacaaagttacaaaaaacaattcacttttggttaatattgcttttagaaaacactaaccaaacatgacttgtgttttgaaaacttcaaaaactattttttgttttaatttctaaaaatacttttttgaaaacaaaaaacagaaaacaataacaatcatgctcttaggcatgatataaaaagtataggctta

SEQ ID NO: 13371 - DNA, 567 bp, Cannabis sativa
attctgtcatgcctctagcatgaagaaaagtctgactcttacaccgaaatggcgactacgctatgttagtaaatgaaaaaataattggtattcaaactgtaatttataataaataatctgctggtattcaattttgaataaaatgtacccgatttcaagtgccaacaacttgatgagattgtatcatgaagttgaagtatccaaactatctgctgtcgagatttctggtacatgatcatctttcaaatagagcggaattcttactcctagctctctgagctggtccaccaaaccataaagaaattcaaaggtcagcgtagactgtgcattcagatcttctctaacttgtggttgaatcctaaaccattctcccaacatcttgtgcacatgggcacgaatcattcgccatggcacaggatactgttcgcatagctgcaagtactccaccaatagatctgcctgatctaattttccatctacgaagctttcttcactgcctgcaacccattctgcagttcgatatccagcaaaaacagctggattttcaagaagagtctcagcagaaag

SEQ ID NO: 13372 - DNA, 607 bp, Cannabis sativa
ggaagttattattaatttgtatttgttaaaatcctttttagaattattaaggttgtatcatatatttaattataattttctttatttatttattatttttttgagaacaagtatttctttatattgatatcatgaaattattaaaaaaaataatatgaaaagaattaattaaatattagtattaaatataagagtgacacataataaaaaaataataaaaagaaattatgtacagtcatttttcattactctacttaagtattttctaataatttttaggcagatttttaattatatacatgaatttgtaaataattacaaaaataaccctgacctaaataatcctaaaaacactgatagcttatgccgaatgacaagccatttgatttctttttgattctctttcctacgtaagccattttcaattatttttttctctaaaaaaaagaaatctttcatttttgcctttaaaaaattattttctccttgtatccactctttgtaatttttttttctatttatttatttatttatttctaaaagcattattaaaaagagaagtttcaattatataagtatatttaaattaagaggagtgctaatcaca

SEQ ID NO: 13373 - DNA, 538 bp, Cannabis sativa
gatctctatatagtagaggttggagaattttattttaatatatatatatatattacttggaaactaataatatatataaattaaagaaaaaatgggcaatatatatagaacagagtaatatacttgaatggtacttaaataaattaactataaatattaattttaaaaatattaaattattagattttaattcaataataaataataaaagaaaagtttaagtatttatattaaacttaactacttaatttttatctctttttcgactaagtactctttttttaattaatcgataaaacaatttcagtccatataatgtaaatatatatacttaattagatagctaaattaaatatagaaagtcaaaatattcatttataaggtaatactcattaaaaatgaaaagtttctaccaaaaaactaatttttagtcacaacaaatttgttattaaaagtaaaagttatgatttaatttaaaaaaaatcattaaaccttattttatcactaaaaaaaattatggcaaaagatattataattt

SEQ ID NO: 13374 - DNA, 764 bp, Cannabis sativa
tctggttggccttgacatatttgtgtacatgcgggttaatttttctcttcaggaattcaatttcttgcttcaaattgttgcattcattagtttcatggccataatctccatgaaaacagtaaaatttggacatgacccgtttacttatgtcctttttaatgggagcaggtttcttgtacggaactactgactgagtggccatgtagatggtctccaggtcctcagtcaggatagagaaagcagtatttggaaggattctctctagggatctgtttggctttgcctgcgaactttcccttttcccccttgccttgtctaccgttgttattaaatcttttaccgcccgaatttgaactactagggtactgggggtttcggacggatgttccagctgaaggagcctgcggttagcccggtctaggctcaacatttgcctgttgaatggcatcttcacgcttgatgaaaccatctgcttggttgaggaaatcactcatagagtctacgcgaccactcttcttgatgtctttccacagctctccaagaatttcgatgcccgccagtatggcggctaacttcccttcttcagttaaacatgcaacttttgtgacctctgtcatgaatctgcttatgtaagctcggagacgctctcctggtctttgcttcactttgaccaggtcttataaatcactacaaaagtacgtgtaagtcgccggcaaacctttgccggtgctaattgtcgtcggcaatggctcgtcggcgaatga

SEQ ID NO: 13375 - DNA, 550 bp, Cannabis sativa
ttttgaatcattttataaaaattttgttaaattgaaatttccttttctaatttctcaaaaaaaaaaaaaaatctttttctaaaaatgtgttctctcattttcattagtgttgacctcgcttttagctaacaacagtgagtaaaaaataaagcgattaagtaagataattaaaagaaagtaaaaacagtatagtagagtgaacaccaaatttaaagaggtttggtcccgtaagtatggtaatagtcttttctcctagtatttctcttgaaagctcttacaattgatcactgagtaactttttctcttagatcactcttttctctctagagtatatttctgcaacaattttctcgatcccttttatagtgaggattctgttataaatataatatataaaaatagataaggattctgttataaatataatatatattgttatataaaaaaattgagataaaattactctagatgtcaaaaatagaaaacattagtatgagaaaaaataatgccgtctaagaatctccccatataaatcgaagtctatttatca

SEQ ID NO: 13376 - DNA, 684 bp, Cannabis sativa
taagaaatatagtaattaaggtggcatttgatcgtagataatgaaattgaaatagaatagaaagagaaataaataatttttattctattcctttagttggttgcatattaaagtgttagagtatcatttcaattttttatgaagactgtaggagttaaagagtataattggaacctctcaattatctctatttacacacttatagtacaattacataatctgacaataatatgacaaacatactaaattatataattacctctaattatacacaattacaatccaaacatgcccttagaaaatttggtgatactcttttattcaatttataaaagagaaaatattttatataatattatttaatttttttttttaaatttacggttggggtttttaaagtggattctcttgtagtttttatgtggattgctatatagattttagttgcaattcaagttgctccgttaattgcaataggaatttccaagtagaattctataaaattattaaaaaagttgttttaaaaagtgaaaataaaaaaattcttttataaaattggtattatataaaacaatatattcgtataaggaaacaaatttccaaaattgtaaaaaaattaacataacataaatttggaaagaaatttataattttctatataattaaaaattaaaataaaaatct

SEQ ID NO: 13377 - DNA, 704 bp, Cannabis sativa
atatataattacttttaggtgtgtatatttggtacttagatactactctaaatttaaaatatatacatatataaaggagaggagacaatgatataatattttaaaatctctttaaataacactattaaccaaaaataagatatctatctatctatatgtatataaagcaaaagtatgaggcagtgatactttattataatcttaaatattgcacatatatgaggcttaattttttttttgttggggtaataaaggttaaaataacaagggtaacaaaagttacacaaaaggtggtgaggtttctttcttccaagaaagttcattgtctatcctaaaggtatgcttagccaatctatgagcctcaacaataaagttgctgcgcatgagagagagatgcctcatgagaactagacaataaaactttaatatcagaaaagataatccccagctcatgcaaatacaatgtcagaccctccaaagttgagaccagagaaagtgaatcagaaaaaaccctctccacgggaagtcccacatcttgagcctaacgcaaatctactagtaacgcaactgcttctgcctggaaaactgaaaaggacctgcaaccgaaatagtttaaaaacaataagtacttttaattttttaaaaccgaaaatactatattagcacaataataatgctgtcaactaatcactttttaaataacc

SEQ ID NO: 13378 - DNA, 520 bp, Cannabis sativa
aaagaccttgtaaaccctgccacagttgctgccttccttgctcttcattaaatccatacacaaaggttgcataaaattggtatttaccatcagaagttgtaacccgagtgtggataaattgactcgagcaattcaggatacacactgtgaactgattgagattccaagctaagataatccttcctcccttatgccaagccaaattagtagtaaaacaccaacccgaaaacatattcatatgtaaggctccaagctttggagccttaactctcgtcttaaggagaccaaccaaactagctttttgattagcaataaaatgcttgaccatattttgctttttctggctgttgattcctcggacgttccaggaggtgattttatccattgaaaacaggaggatctccccctcctcctgtcttctctgtttccatctggagtgactctactgacacttttgttacaacctcttctataagagaatgacagtgtagagcttgaaaagaattagatgtggatggtc

SEQ ID NO: 13379 - DNA, 682 bp, Cannabis sativa
gaatttgaacctcctttacatgaaaaaaaaaatgtgaaactattagactatacttatgacgacatttcttactatatattgttatcatattcacattatttttggtgattttattttttttgtttatatatatattttgctacacttaaataataagctttaactatatatcttaaatagagaatataatattaaatttcttccttaattaatataaaattttatttatttactatattataatggaaaagtaattatataatgatttttgtattttttgtagagttagatttagagagaatttaagtacatagttggtgaccatactataagatatgaatttttttttttagagaataaaatctttttaagactttttagctattttatttattttttgcttaaaaaaaattaattttgactaataaacgattacatgatatatgttttttataataatgttagtgtttataatgtttgtgtaatgtacatgtagaactcaatattatatatgatgagagaaacatagtatactaatcaagaggattttttttagaaataatttttttttaagaaacaataaaaaaaaatatgtcataggatcacaatccatataaaacaatgaggaatccgtgtagatgctcttagagcggtttgtgttgtattgttgcctgtgaaatat

SEQ ID NO: 13380 - DNA, 642 bp, Cannabis sativa
taaaatctatcttgagctcgagtaaatttaatctgtacggaactcgtcgtcttgtggcctaaatgtcccaattatgaagtaaggtaaagtaatcatgtatgccataaacaacgtgaactgcagcaatatgaagagtttattaggctttaccaatattcaatgtacttccaacaaaaaaaaaaaagggaaacaaagaacttaccaaaagaggaagtgttaagaaaccccatattggccacaaagcaaaggtgaacctgccattatatgtcatcatcataaggaaaaaataccaaacacacagtgcagctaatgaagttaaagaagaacagcaagaatctttcttacaagaaatacgagatcattccaagaagagtgacaaatggcagagccgatgtactcgttatttcccacttttcatcaaatctcttagcactccatgctagtatagttgtataacaaaagatgataaaattcaaaacaacccccaccatcccaatgtataaaggcattctgcaaagtacagagaagtgtttagacatacttgcaacaaatatcaagtgaattgaagagacaacacaactatgacggtatagttttagtaatggaagtgttaaaaaagtagattatcataaaggcccagca

SEQ ID NO: 13381 - DNA, 518 bp, Cannabis sativa
acttcggtaccttaagggcacaatgagagagggtaatcatcttacacctacatctgaattgactctcacggcatactcagatgctgactgggcaagctgtgtagatgatagacgctctacgggaggttatttggtattcttagggggtaatccaatcagctggtcagcaaagaaacaacatgttgtggctcgatccagcaccgagagtgagtttcgagccttggaaaatgctgctgctgagtttatgtggatccagtctctactacaagaattacatgtccctgttcttcacagcactgtcatttgggttgataatcaaagtgcaacagcattggcagccaatccagtttttcatgctcgatctaaacacatcgagattgatcttcactttgtgagggatcaaattgtcaacaaaaaattggctgttcattatgtcccagctcatgatcaagctgcggatgttctcacgaaagctctcacaacataacgttttctctatttgaaatccaaactaaaaa

SEQ ID NO: 13382 - DNA, 653 bp, Cannabis sativa
tatgtgatcaaatgcaaatgtgttttgtgtttttttcatggaaaaattgaaataaattatgttttaaaattaatgaaattaatatttgtaagaaaatcagtttttaacattcattatcataaaaatattgaaaggaaaaaaattataataagttgtttgttagataatcaattttaataatatattttaaggtgtttctatgatacactttctaatataattagcatataggtaattttttgagtgaatttttgttttatagttatgtacgttatatatatttaaaatattttacaaaatttaaaaaaatttagaacaatttacaatattaaaaacaatatataaataatttagtttgaattatgtttttaacgtgttaattttttttttttgaattttttaaaatttttaaataattacaaaatacacaactataaaaaaaattaaattaataaaattctttcgaatactaaaataaataaagtatattagtatatcccatttaaaaaagattgtgttgtaaaaagttttcaatatatatttcttcatatctatttgtcatcaaatttagtattcactaattttttctcaccaaaacataaaaaaaatcttggttctgattattttatattttcttatttaatttttacata

SEQ ID NO: 13383 - DNA, 508 bp, Cannabis sativa
ctttctatctttatagattttaatcctgataacatagcttgcttctcccaaatccttcatttggaatttgtcagctaaccactgcttcgcatctaataacctttctacattgtttctaataagtaaaatgtcatcaatataaataacttaggaaaatacactacattacctttaatgtatttgtatacgcatgcttcatcttcattttgtttgaatccatactctttaatagtcttataaaaggtgatattccatgatctagaggcttgttttaatccataaatggatttaagcaacttgcacagttttcaatcttaatttttctagtaacacatacccttctggttgttccatataaatgtcttcatcaagattcccatttagaaaagcattcttgacgtccattttccatatctcgtaatcataagtgacagctatggaaagaagaatgtgaatgaatttaagtattaccatatgagagaaggttttttttgggttttatgcccta

SEQ ID NO: 13384 - DNA, 576 bp, Cannabis sativa
aataagaaatattatttacattatattatttagttaaaatgacaagaaaaaaaaattaaaattattttattcggatacaaccataaaatctttattattactattgtaattaattattagattctacatattttaattttataattattataaaaaaaatcattaatcattagtagggtgttactttgtggtagcgttagaccatctctaataattgcacaattttaatatatattttgtaccaatttagtgccctagcatcatgggtgtgtttagtatttctcaaattttacattaatttggtgggatggtttaagtcaaaaagaaaaagatgaatactaattacaatctcttagtcaacttctatgcctgaaattacatgtatttgttataattacatctgatattctaatttaccacgcgtgctaaaaaactccaaacattattgtaaactatttaaatttttttaaaaaaattacaggaataatgttgtaagcgaataccactattaaaaaaattgaaaaaaaatctttcaacatatattttttatatacgaaaattaattaaaagattgta

SEQ ID NO: 13385 - DNA, 547 bp, Cannabis sativa
cgggtaaaatacttattaatagataataggaacagaaatttatagtttttgatttaatttaatgattcaaattaaccctttaaaattatacaataattaattaattaatttatttataattaattttaaatattattaattataaatttcactaacaaaactccaaacttataatttctttactttttattttatgtctatttaaaatttaaaatttaattttaattatatgtatattttaatttcaaatttacataaaaaaatattttaattaaatttttttttaatacaataattatacttctagaaaactacaacatattcaacttataataattttataataatcaataaaagtactctaaaaacaattaaaacatcacttcctttagtagtaataatttcttttcttgttaagtgacatgagttcgattcttgagacattcatttgataattttatagcattgaattaattttttttgcctattttattttatttcatttactctttttttgaagagttttatctcctctttatctcaatag

SEQ ID NO: 13386 - DNA, 526 bp, Cannabis sativa
cataacttcgatattctatctatccataaatatttccccactaattctgagatactaaaccatatcatagtgacactattggccatattgtcgaatttctactgttattgggcataaaacatgaaaatgtcaaatttcatatataacatgtatggcacacctagaattcaataaaatctctgtaattggaaaattatataactaatgcttatttctgacaataggacttgtttttataccaaagcacatataatcataaataatgatttaattactaataaactgctaatttccatatctaattatacgatcattacaattatccccccatcaaaaggattttgtcttcaaaatctaacatgaataacttcgaatattaagccctcatgtcaaactctaaatcctaggtagcttcccccccttgctgtttctctagagtactttgaccaaagctatggtcttgtttttaaggacattgtcctttctatcaaggatcataactgactattcctcataggacaagtcc

SEQ ID NO: 13387 - DNA, 519 bp, Cannabis sativa
atgaaaccaatcacgttgttcataattagggccgacttcataattaccataagtttcacaataccttgtagactttacgaatttcaaaatgagttgaatccagctttcaataaaccccaattttagcagcatggcctcaacaaagatttattaaatgtatctatatacaaaaaaaaaaaaaaagaaattaatattacaattcaaatttaaacttgttgcacatattaaaagaaaagattcatttttttataaaaaaaaaattatatttctattattattattattatttaaaaaaaagaaaaaaaaagatgtgtgatattttaaaaataataaaaaatattatagtaattaaattaaattataattaataaaaaaattaattattattatgttttctgttttaaaaaaattattatattttcattttataaataactcttaaattaaagattagaaataattttatttataatataaaaaaaattaattataaacttaaaaatatacataaccaaaata

SEQ ID NO: 13388 - DNA, 635 bp, Cannabis sativa
  modified_base (509)..(513): a, c, t, g, unknown or other
atctcctaatttttttttctcttaatttcaatatatgattaattttttgtaagttatcttttttttagagagaaagtgcaatttttgcatgatacattcatttatgtttatatatattaaagtttgtgaatctattttttgttttctttgatatgtgaaatggaaatataaatatgtttatatgggtatgtatgtttgtgtatatatatttgaaaaaaaaaataactttaagacataaactcagcaaaaatggtactttcacttcaaattcaataaaaaaaaaataggagattctagtaaatttatgagcaatgccaacaacttgacatttgtggtcatgacgcattggaaatttattctaatgaattacaattcttaatgttataactataagtgaaaattacagttacgaaaatcacaatttgttgtgaataaatatatttttagtcacaatatatattgtaaataaaattaaattagtgagaacttgtatctaaatactatgtttnnnnnacaagtaactttttgttgtgattaaaagttatatttagtcaaaaaaattatgttgtaactaaaaaattgtcactaagatagctatattttgtagtgcgctgcggctctcaaaatttgagcat

SEQ ID NO: 13389 - DNA, 520 bp, Cannabis sativa
  modified_base (254)..(257): a, c, t, g, unknown or other
tttcatcttgggatttttgtttcaggtgcagggtaagggtcgactaaactacaagcatttagtgctcatgaattttagattgtcctaaaagaataattgaacccactcaaataaacttgacagaagtacctcagtagctatctttattttttcttcatgatttccccttgaaagcttaaaatatttagtagtaacctgcaattttttcaaaccttccatagttcttaaaaagtaaggaaatatatatatatatnnnnatatatatatatatgtattattttataagaaatgttaaacttttactttttgtgtgcagatattgttactcaaaaatttatgtaaatatatattacatagaacgaaatcccatattaaaaatttgacaatgcataagtcttttatccacgttatgacaatttgcacatacaaaatcacagaagaaatattaaatatttactggaaaaatggtcatgctagctaaaataatccagaatagaatgctagaaatcatttccaaaga

SEQ ID NO: 13390 - DNA, 504 bp, Cannabis sativa
cccagaaattgagaagttggcttatgatcttattgtggcattgcccaaattgaagccatacttccacgcacatgcgattgtggtgttgaccaaccaccctttgagacaagtgatgcacaaacccaaaaccttagggcgcctgctcaaatggtcaatagagttaagtcaattcgacatatcttacaccctgagagtgtctatcaacgggcaagtgatggcggattttatagtggaattcatctatcatccagaatgggagaccaagggcaagaggttagtgaagagtcaaaaagtgacgtagaagaagagtccatttgagaattgcacgtggatggagcctcgaatgacaacggagcaggggttggggttgtattgacaatgcctagggaaatttgaatgcattgtgcaataaggttttgttttaaggcctccaacaatgaggccgagtatgaagcaatgctagctagattaaggcttcccaaggaattgaaggtcgtgtgacta

SEQ ID NO: 13391 - DNA, 557 bp, Cannabis sativa
cttggaggaatatcacttggcacatgctgttgctaaaccgtctattgcaacagctatccaacgctcagctactgccccaaaaaatcaaccatggctgaatcattcatcgggcagaatgaaataaaacacaaatgcagttattaacaaactaaatcaaactttctgctttgtgcgatactacatcatagcaatggtgacgttgttactgcaatatccaggcctctacctggctgttttaaatcggaagttatggaagctttggctttaatgtatggtctacaatggcttaaagatcatcacgtaccagtacattatattgaaaccgtttctctactagtagtaaaagggttgaaatcttctcaagcctccatttcaaacttccatagtttgttaactaatatttctcacttcgcgtctaatttccttagagtgtaaatctctcatgttaatagatctacaaatactactgctcatgttttagcaaaatatgctctttcggtggactctatttgctcttcattggaggaaatgcctcctcccctgatggctattgtatt

SEQ ID NO: 13392 - DNA, 664 bp, Cannabis sativa
aacaggagaagggcggatctgagctgatcagaagcaaatctgaacaagttaaggcccgtgctccacctccagtacttaattcgaagaccaaaagaggcagggaaatgctcgcccattatgtgaatcgatcggtacctgaggtgaacgaacagctggctggggcggacaatgacctatctctggaacatgttatgggaggagtcctgaaggagctttcgagggtaagtcttttcttatgatttccttttttccttctttaattagttcacattttaatgtcctttctctctatagacaggtctgaagatggcttatgcttattcctgagctaagtcggttgctgctaagaaccttgccattttcaacacaatgcggacggaagtggacttggccatgaaggacatcgaggaagcccgtgttcagcttggggatattcggatggaacttggagaggtcaataagaaactccttgctgctgacaataaagtggtcgaactgacgaaggaggtgcatgacatgccatctaccgagcagcttgaagccgatattgcctctttatctaaggaagtgaccagccttcaagaggaaagagagggtctccggacccttttttcaggttggaggaagagaagaaagccatggaggaggagcttggggccgaagt

SEQ ID NO: 13393 - DNA, 972 bp, Cannabis sativa
cttatccaagaactcattggcaggggagagtgtggaaccggctatctattccaaaacatagaataattttctggttagtggtacttgacagattaaaatttaagactcgaatttaccgcttcaacatatgcttgggtgaaatttgtccaatgtgtgggttgaatagggaaacaaaggaccatgttttttctcaaatgtcacttgagtgcaaatgttttaacagggattcaatcttggcttaactagtatttggctagcaacactgttcagggactattgaagtggatttcaaaatccaaaatcaacaagtttcagaaacaggttttttcggcaactttggctgctggaatataccatgtttggaggtgtagaaatgaagctttttggaataacaaagtatatacaattgactccattgtaaagagagtaaagagtgatgtaaataatagaattaaagggataatgcctaagaatatagctaaaaaagatagagattggtttaaatgttgaattagagttacaagcctattataaatggttctgctagtttgtaaatgaagttttgtggaatacattttctaattcaccaaaaaaaaaaataataataataatagaaaaaagtggtggtgatagtcccttccgttatgattttttgttgcattgccctttttgaagtaccaactagattcgttaagtattatatagaataaacatatcaacatattattggaccatatattaaatacttatattattaattttaattttttcattaaaaatatttttaaaataaatttaatgagttaattaaaaaatgtaaaaaaaaaaattaattcaaaaactaaataacatgtttgttaatttaataaacaaaaacaaaaaccttaaaactaacacatattcaccacacacacacaaaaaaaaaattgagagagagatttcgtcgatctactctctctctctttctctatg

SEQ ID NO: 13394 - DNA, 534 bp, Cannabis sativa
ttactggccaagacttccaacgaaaattaatgtgcctatggaaagatatgttccactgataaaatatatgagttcaaaagtccatcattatcactttttttactatattttgaggatgagaaaaaaaaaaactttatttaagagaactaaggcaattcagtaaccaacataatcatgtcttattgttcaagaaggattcaatgtgcatcttcgtttgagtgcaaagaaacagaattcgttgagagccctggtgcaacaagtttcacaatgttattaaaattttgaaaaactttacagagaaaacatctgcataaaagattatttacactgctgatattctttttacccaaatacggcagttaataattctatcaataggccataatcaaggagtctggaattgctggtaagtcatctgagtgaactaggtcttgtggcaaatgggtcttctgtaattacattttcttaagggatttttctgtttccaaattcattgtttaaaaagggaaaaagaaaaatgcaacacaaaagaaa

SEQ ID NO: 13395 - DNA, 511 bp, Cannabis sativa
ggtagttccagccatatgtaataactaaaagagcataagtcaaaagctattcaatagctttattgacaaatgtggcaaataacaagttctaaatctcttgaaagttggaccatatatttgtaacttcaagataatttgacatttgagtcaaatccaacaatctccaccttggcgagaaaaccaaaccaaaactgatatctccacatgcgccctaggcactataagtctgagatgttaatcaagttcaagtagtgttgaaacttgattcctataaccacttttgtaagcatatctgcatggttatttgtagtcccgactttctgaagtataacatttccttcatcaataatttcacaaacaaaatgaaattagacatcgatctgcttagtgcgaccgtgatggacttggttgtttgccaaaaaaaatggcattctggctgtcgcagaaaacctccacgttcttctgaacaatacataactccttggtaaaccaaagaagccaaatagcttct

SEQ ID NO: 13396 - DNA, 523 bp, Cannabis sativa
gagagagagagagagaaaatgatttctgcaagtgtgcaagtttttatagaaaggaaaatatgggcattttttttttttcaatgttgtctactctagaaaaaaattaggaaaatgatatggttcactatttacttttaaaaataagtgtactaatgtactttttttttttttttaattttgtttttattttcaatgtcaagatatatagttttagttttaatttttgtatgtgaagggtaagggtatattcctattatatggcaaatttatatattattgtgttttataaattttttaaccagttaaaaatggtccttggaaattttgttatgttgtaaagtgtggtccttttattaagctttatcacatattataaaaaaaaattatgatatgactgtttatattattggttattcaacactacatgtataattaatttaaaattttgaaatttagttttatttaattttttccagttaataattgtttttagtttaatgtttttttttcaaaaaatacattt

SEQ ID NO: 13397 - DNA, 524 bp, Cannabis sativa
ccaaagattttgttccactactaaatcaaaatttataatatacaaaatttataatgtacagtaacctattcatcttatatatcacaatttatttttacacattagcaatatgagactaactctaagtagaaattagacgaattttaaaatcaaaataaataaataagaaacgtcgacaagagtaataacttttctaagtttgtttagtaatttaaaattatattattattattgtacgattgtcactatatatatgtaacaactatttatattttaattgatatctgtcgtaaagttcacaaacacgctacaaaatacgattttgtgaaattgaaatttcacctggaatatcaacaagttatataatgagagaaatcttagagtgaaatatgttaaattagaggatgtgaatgtaaaatatagttttttttttttttttgtgaaaaaatttattttaatagtgttccaaattataatataaatatctcacataacataaaataattcaaatttaaatcacatta

SEQ ID NO: 13398 - DNA, 539 bp, Cannabis sativa
  modified_base (189)..(193): a, c, t, g, unknown or other
attttcgttagtttcaaatcttaggtggcgtttgttcatcattataatgagaatgacatgtatgcactataaaaaattgttatttttagtaaatataaattttttgtaattaaatgtgatttttagttacaacaaaacgttatttgtgactaaaatatagtatctagttataagttgtcactaatttannnnnagtcacaacaaatattgtgattaacaacatattacaaattgtaatttgttgtgactaatacttttagccacagatcttttagtcacatcacaataatgataatttataattaggtacaaattttttatctttgatcacaaattttattgtgactaaaaataagattttttgtaatgatggtttacttttggaataataacgagaataattagtgtattagcaaaacatatttactttaaattctttttggaaagaaaaatggtataaaaagggagcataatgtcattttgtttggtgattatataaatgtaaagttgtaatggtgtttataatatagatgtattac

SEQ ID NO: 13399 - DNA, 710 bp, Cannabis sativa
tttttgaacaaatataaacttttgatttagaatctgtttacccaaattttaatgacgatgatgtgtcaagagtagcaacacgtggcacaaaaatatcgggactaaattaatgaagaatatgtaaagtcatgaccgttcggatgactgtcaatcatgaagggtggtcatgaccgttaatcatgaaaggtgatcatgaccgttagaatgaaatttagacggtcactcttacccctagcttgagtaaggtaagcatatccaagaaggaaaaacgatggactaacgccttcataagcaaaatgaacaatcgccacacacctacaggagtcaaaccagtctagggggtatatactattacccctacctcaactgcaatgatctatacatggtttagactaggggtatacctctaccccctacaccttcatcgtacaagtcatgcattttaccatagacataatgacattctcaaaggtatatggggacatccatattacaccataaccactgacaactgacaaggggtcacctaacgaggataattgtcaccccctcaagttgggtcttggggggtcacccaacgatgacgatggtcacccccttcaagttaggtctcagggggtcacccaacgatgacgactgtcaccccgttaagttgggtctcggtgggtcacccaacgacgacgatggttagtcccctcaagttgggtctc

SEQ ID NO: 13400 - DNA, 534 bp, Cannabis sativa
ataatgttcaaatattttgttggacgtgtaattacttttttcatatgtgtgtaaacactaaaatcaacacaaagatatatacaggttcaagttcgataaattgaagtgatctatggctctactcaccgccaaatcatttttattgattgagtaagaacatatacaatatagtcgaggaagattctctattagatactctaaaaagtgtttcaacttttacactcttacccaaaaatcttcttcatctacagaaaattctttatacaaaacacaaactcaatctctctatttcctctacacctctcttctacctctcaatctttttctctctcaaactcgtttcctcttaaaactcatcaaatctagcaaaatgataagtgctggtggtatatataagttcaagataatgatcctaataaggtcggtggctgtaaccaataagttgttaagttagttacgttagttacaacgtaacaaacttaacaaactcctcgtaatagattctccacaccagcacaagacaaggtgcttctg

SEQ ID NO: 13401 - DNA, 873 bp, Cannabis sativa
tgtgtataattaagaaaaagattaaaatacttcaattttggtattttaattattattattattattattattattaaatcaagtctttctttattacttttcatcatagataggtgagttttagtgataaaattaacacaagtggtggtgttggtggctacgaattccagatgggatcatcatgaggacagttgactgggatgaaagtgtgttttacttaggtctcccgtgaattcctaggtaagacagttgggagctcactgagtttgtcagatttggatatataattaagttaaaactcaacaaaacaaaagcatctattccattgccaatcctgcagttcagttgagattgattacatttacgtgagtaccaaacaaagtatatatgtataactatatcaaattatatcatacatcttattatattaagctattcacttgtttctactaatattcatttacaatcggcacaactggggacttttgtttacttatttatttattcattttgtatattgaaagaggggaatacaaacttaggatacttgctattcgccagaaaaaaacaatgttaggatgtattaattaaaataaggggattatttcacaaatacacaaaaacaacaaataaattacaaaaatacagttttacggaattttaaatatttttacgatttttttaattttatttacaaaaaaatacggtctttttatgttgtactcttattgttaattttttgttatttgtatgttattatttgttattgttttgatgttatatagatgctattttaatattacttttatgtagttttcttgttgtttttgtgttgtttctacgaaataccataaaaatgttggaaattatttt

SEQ ID NO: 13402 - DNA, 552 bp, Cannabis sativa
cgagccttcctaatttcacaaaaaaaggacatctccgaaaattagtgatcatcttcaccaaaatgcagaatctgactaagtggtgtcaacacatcacttaggcatcaaaacaatagtcttggacattttagcactcactcggcgtccaggttgacatcatgtcaacctggacgttgagtgtcaacctggttatagggtgttgaacaaccttcacttaaacgatcataactccctcaatattgacttgattgacgagattcaacttgtgtttcgaagctatttcaaagatttatcaagtcatgtctcacactcatatcgcaattttgaagatttcaagtccaaaattcgtcattaacatagttgcaatttttctagcaaattacccaaaaacaatctgacggacgggattcaaactctaaaaattgacaattttcatcaaaagtcaattttcaccatcaaatcatcattaatggccaagatcatttaatgttttatgttaccaaacactcttaattaaatagacaaccctataatataaaatctttatttgtt

SEQ ID NO: 13403 - DNA, 855 bp, Cannabis sativa
gtagtaaatcctttaataataatcacagaaattagaattatttaccgagatttttcgtaaatagcaaaaaaataataagaactgaagaataaataatcaaaagagaaagtacaaaataaggcaaatagtttttaacgtggttggagttaactagccttagtatacgagtcaatattattcgataagtcttttccttgtaagtgccttaggaaatgcacagaatgtatgttctcaagttttcctaagcaaagtttgcatgagagttcaatccttaatccataagatagtgggatatttatagtagtatgagaattatattagatttcttatttccctctactgaagagtttacagtaaacaatactcatgggctttctcgtgaagtccagccgtggagaatataatctgctgactagacaaataagatttggattgatctggccaacactgcgtacactaattgtggacaattaatctaaattaattgcacaatatttgttataggagatttcccctttgatcttgatacaatacattgttgtgattagataactggagtttccttatttgtgtgcaagaatataaaggaaactgaaaaggtcttccgggaacatgctctcttgtctctccggtctcgtgataacggccatgtcttctgtgcacggtttgctgaaggtgaaagactttgggagtgcagaaccataacatattcctggaaggtaacacccagatggccttggcccatttttcctttaatgagggtcccactgatgggtcttgaatgctgatctggagtccatgtgttcaatgccaaaaacgcggataacacagttgtgtagtagatctcgtgaaaac

SEQ ID NO: 13404 - DNA, 530 bp, Cannabis sativa
aaacatctatccttgaaattccaaacacgttaggagtaggtgtagtgcgaggtgaccagctgttggctcgcgaatgctatcgcgtagagcttcaaaataaaagagtcgaccatctattaatggtggtcataatagaagaaggttagaagaaagaagaggatctagatcctagagtccaagatgagaaaaacaagttaaatctaattgaagaactagaagaagttgttttaaattcaaacaatcccactagatgtgtgtttattgggaaaatctgaatgaaaaactactatagcagttaacagattttctataggcaaaccaggatcaattttctcagagccacttatatatggtagaaattgaccctaaagtgatttttccaccatttgaatatcgaccctaattactgagcaaaaagatagaaaatacgacccttggatttcgaatgacaaggggcccttaaagaagaagtagacaagttactaaccaatgatttcatacgcgacgccttctacccctcacagatatca

SEQ ID NO: 13405 - DNA, 1017 bp, Cannabis sativa
gagatcaccaataatacaccacggaaggtgagaagaagcagctaaagtttcaatgagttgccaagttctgaaccgaaaactttggtttggttccccataaataccggtcaggcaccaaggaatgcagttaggagcacgaacaactacatcaatgtggttacttgaacaacccagaaaatgaacatcatcagtgactctccaaagaagagcaagtcctcctttgtgaccgtgagcttccacacaataagctccttcaaaaccgagcttgtgtttaatccgaaccacaccatcagttttgcaaaaagtttcacacaagaaaacaaaattgggcttcttttgaccaacaatgttctcaggaattgacaagcccgtgggttcccaagcccacagcaattccaacttaatgtattcataatgactggtgggcctggaaaccagaacccaccgaatgcaagttttttgggtcaatatcaacctggcccatgatgttaatttggcccgtagtagtagcttgggcctctttagttaaagcactagaaaatctcttcctttttaattcagattgtgccaactcatcatcatcatcttcttgatttccacaaacaataacatccttatttttgttatgtgattgagaaaaattaggggaagataatcccatgaaattagcacgattggggttgacgctattattgcctgggccgcttgcgttcacactaggagagaagctgctgccagctttgcccgatcggaggtaaggtgattctgtgaagttctggtgtcgccgaggagctgctttcatgtgaaggctgtatgttttaacgattaggtggtcaggagtatcaaaatgtcgtgggcagaagcgttctgagtgccccatgagtccacaaagaaagcagaaggttggaacgttttcataccaaaaaatggcgtagaatgaactgccatcacgcttcttgaatttcattcgtcttttcaaaggacagtcaagagatagagtgacatggatccgcaaga

SEQ ID NO: 13406 - DNA, 581 bp, Cannabis sativa
  modified_base (193)..(194): a, c, t, g, unknown or other
ggagagatctaatctctttgtgaatgtttgtacatttatgtatcaatttcctagtttcttggtgtgtttgaataaaagattcatggctatgtttgacttcatattccaatttgctataatagttctcctataactatttagatattaattgatgtagttaagtacggattcggatatatatatatatatatanntatatatatttatatgtattttgaaaataaacgtagtaatgcattaaataaaacaacaaaattagacctcgcggtcattacaaagcaagttttctggcaaagaggaaatcggaatacagccatacatctagtgggtaaacgcctacttagccacattatgagcaacataattacaagatttattaacatttataaagttacaactaataaaagaaggagaggacctagtacaaaacgagacatagttctcaagtgcccagtgagactctttcccattgagaacattgatagctagtctcgagtcactctcgataataataaacttggaacctaactccatcgctaaaaaaatagctaaacaataggccgttgcgatgcaatttttac

SEQ ID NO: 13407 - DNA, 657 bp, Cannabis sativa
ctgtttggtgatgccaggtgtcgtacacaaccgtgttgataccgagaatgtatgagaatatggcgttggacaaaaatataatttttttggcgatgcgcgcactccctgagtctgacataggggatgaactcctggcatagtggggccctgtgtttggagaatgccacataagatgatatccagaggcttctagacgtctcttcaattgtatgtatccaaattttacccatgagggtattcgaattaatcctgattgacctttcgccaaaaggcgaaaccacatttcccctaccaaagtgatcaagccttgtcgcatatgtaagctggacttacacctagattcgaaatcgtaacttgactccgctcatgggatgatgtattaacttgattggcccaagaatggacctgctttgactgatattaggtattggtattgtacacgttatcaatatgaaaatgcagataacactatgtaagaaatttttacagaacactttcaatagtttttattttctagttagaaaagtaaaaaatatattctgtaaaaactatttttatttttatagaaaaattagaagtttgaaaacaaaaattaattatttataatttttaattataatcttcctcaaataaaaaaaaaattcttacaaaatatta

SEQ ID NO: 13408 - DNA, 907 bp, Cannabis sativa
ctacattaaattttgatctataattaaggacatgtatattatgttatatacacaaatatattaatattaaatatagtataatatataatacattccagtataatatttatttggtatgcaggactagactagattaaacagactaatttgtccactccagtgtttgggcatgctggaagtctggataactaatccagctaatctcatctgtctaggattatttttgggactttttaaataatatactatattatcaaattatttacaaaaataacgttatttaaatgactgaaacattctgccgtgtcatgtcatcctcatcacaacgtaactttcttattcaatgcctgaaactaacaaaagggaaacaatggcttaaccagcttgaaacccaagaataccgtgcatggtttacacactaaaacaattacatatatattggaaaccctttgctgaaactaataaaaactttattcatcaaaaattacacttaagaccttcgacaaactttattgcagagaaattccattgtcgaaaaagctccattgtcgagactttatcagaccttaaaccttcgacaaaatagcaattattaccacaattatacaaaaatgatacataaaaatacattaatgaagatccaacactaaggatgtagacacgaacggagcattccaaaattgaaaaaaataaaatttgaaaaaagaaatataaaaacagagttaaaaactagattaaggtctcgacaatataatgaatcaaaactagtagcaagatatcaccaaaaatgaaacaaactagtaacaaatagaagaacatgatgtgccctgccacttgaatttaacaattaccagtatgtatacagtaaggtattgagagaaattgatgaagaaatgcatcagtgagt

SEQ ID NO: 13409 - DNA, 613 bp, Cannabis sativa
aatttagagggaataaattttgaaagtttggagagagaatgtctccctcttgccaaataagtaatttagtctctccttctattactctctctccacccctctccatccatccatctccccctcctaccaaacatagtgtaaggtagttgggttgtgattattgtaatataactaaattagataataacatatattctttcatctaataataagtcaaggtttatttagtctcatgtaataaatacatccgatcacatttactacatttatgttctcgaatgtaagaacataacacttgcttgtggattagctacttagtgtaaatcaagtgcagtgacttaacttaggactttaaaaaaaatgtttaattatataatcataattaatttttattgtgatttatgttacaacaattatgttcgagatttaatagaattcaatattacatatataacataaaattagacacaatgtgatttaccaagtcaaaatgaatttatattttttttattgatgatgaaattattacaaagtattagagttttaattagcgaataaaactctaacactctctcatctttgaaaattaagtctctattttccattatctggc

SEQ ID NO: 13410 - DNA, 559 bp, Cannabis sativa
  modified_base (322)..(322): a, c, t, g, unknown or other
tagataaggcaaactcatctttattttagtttagtgtggttctttaaaagctattaattacaatagttaaaacacacacaaataaaaaagtttccttttagtgataactttatagtcacaatataaattttttttaactaaatgtaacttttagtcatcataaaaaattacatgtgactaaaacatattttttaaatacaagtgctccctaatttagttttagtcacaataaatattgtgattaaaaacacatttagtcacaactaattgtaattttcgtgactaatccttttagtttcggactttttagtcacaacatagnaatgatgattgataattagtcacaatttttttacttttaactacaagttttactgtgactaaaagtaagattttttataatgacagtaattaaaattcttagatcgatgaatgcttacacgctatttcagaattttacactaattattattttttttaatggaatacgagtttcttagatttagctaggatcattgtactttttattttggaataattaaataaggcactatttttt

SEQ ID NO: 13411 - DNA, 501 bp, Cannabis sativa
ttaacaaatattggaatatattcttatattgaatcaatgcaattcattttcaaccccccaaaatggtatacatgcctagctaaactcaagttatgcctaactttttagtgcagattttatgaaataattcatggtcaattattaagtgcacatgattgtacttactaaaataggaaagaaaaaaagacacttattcctaatatgtctcaaagatagtatgattgtagcacaaattgattagataagagataaatgattacttcataacaaattaatagtgtaagaatttgagttaactaattaaactatttttcaataatagctcaatcatcaaattaaatatttcataaacacttatttgttttcctacataaaaaatctttagaagggcatgcttatttcaaatcgattttgattaatttatgtttaaccttactaatatttaccatgcatgcccttaatttctaaccttatgtttatttttattttttagggtaaata

SEQ ID NO: 13412 - DNA, 621 bp, Cannabis sativa
  modified_base (547)..(560): a, c, t, g, unknown or other
attaattactagcaagattaatttgcaataaaggttatacagctttaaaatgatttcttccatttttttagatgataatattgatagatttaatgagattattgtaggattggctagcataaatgttgggctttgtgtcctaaataaaattttatttcaatgtaatcatttatcaataaagaaatatatttatttttattacttatttaatgtgttatttggttcatgtgatcatttatttatttgatttgatttataaattcatctaaatctttatcacattgatattcttgtttattgtgttgtcaacatagtgaaaagtaatcaagattgtgtgattaaacgtattcctatgatttatcagtacacaggatttaactgataggataatctacaatgtaatttacttgcaccttggataagtgatatattctttacaaggcattggttgaagtaaacttgggttggatgtatagagtatgcatcagaatgaaccgatattgaacttggataagatataataaacataccgtaatatttattcaannnnnnnnnnnnnngttgatcttagatcaaatgatctcgatcctaagattgctaggttttagttcaaatatatat

SEQ ID NO: 13413 - DNA, 506 bp, Cannabis sativa
gggaatggatcttggatggtggcaatcggctcccatgtagcttcaaaggctggtaggtgctgccatttaatgaggattcagagggagtagtagcagcagcagtagggaagcggacgtccaaaataggttcgggttgcactttaagctccaaatcagttgttaattgaggggggatagtatgtgcgaatggtgatgaccctatggctcgacgaagctgagagatgtggaagacgagatgaaggtgagcctggtctggaagctggagcttgtaagcaacaagaccaactcgctgaatgatagggaaaggtccatagtaccttgctgaaagtttttcatttgaacgttgggcaagagatcgctgacggtaaggtcttaacttgagatatacttgctccccaacatcaaactcatctggtcgacgctttaaatcagcttgtagcttcattctgtgctgagctcgaaggagatgcatgcggagatcgtcgaggatggcatcacgagattca

SEQ ID NO: 13414 - DNA, 531 bp, Cannabis sativa
ctctctctctctctctcctgtactcattcatagaatctaatggcccactctattcctaagtgttaaggttggcttggaagattgtggtgtgaaattttcaacaagttcttagattggatgttagactaatattacgaaaagaaagcgaggatcccctgataggctacaagaggtattatctctgtattcactagtctagattttatgttgagatccttgtgctgatggttcatatttgattaaattaattttagtcaaagccgcttatgcttttttttaactctattatggaccataaaaatcaacagagaatatattatgattatttaattatactcatccaaaagaatctaacaacgccctctattcttgattgttgatgctatcttggaagattgtggtgtgaaatcttcagaaagttcttaaattggatgttcgatgataatacgaaaagatagtgaggatcccttaataggctacaagagatattgtctctcttattattaatctagatttaatctatatacatta

SEQ ID NO: 13415 - DNA, 603 bp, Cannabis sativa
tcttttcacccttaccattcaaaccctagaggaatccaggaaggttgaaattttgtgcttcatctctgagatttaaacaaagatttgtgattgttcaagttgaggtatgaaccctaagctattctttttagttttctttcaagtttcttctagcttaagcatgcaaatgatgcgtttagctactgtgtaagttagggtttaagttgttatgttcgctgcagtgttattgggttattctaagcttgtttgtagaagttttagcaggtattggttgggttaagcaagttttgagttttgaactcaaacttggctcaacaattgtggattatgaaattttgtgctatacttggttttattgcttgaattcggtttatattgttgattctaggtgttttggagcatttggtggagtttgggttgattatgggtcgaaataaagaccttttgtttttctatagtaaaaaaggcataaatggtctatcattttttctggtgcagtacccagaaaaatatggcctgctatttttttagacaggttcctcattttagggttttttcttgagtttactcgatggttagagctccattatgctttttattgtt

SEQ ID NO: 13416 - DNA, 758 bp, Cannabis sativa
ggtgtttgctattgtgttgtcaactttgtttgaaattaagttcaaagctccaacttatgaagttgatccaattggttcaactgttccacaagctgattatctatggagaattgttttaatgactggtgctttacctgctgctataacattttattggaggttgaaaatgcccaaaactgctcgttacactgctcttgtgggctgcttctgatatgtcaaaggttctcaaggttgatattgaagctggacctgagagtgttgatgaggcaacaagtcagtatggtttttttctctaaagaattcctttttctacatgggcttcacttgcttggcaccacaagtacttggtttttgcttgacatagcgttttacagccaaaacttgttctatctttagcgtcattggatggattccgccagcaaagactatgaatgccttggagaaatgcacaaaatagcgcgagctcagacactcatcgcgatgtgtagtacagtccctagttactggtttaccgtcttattcatcgacagaataggacgttttgtaaatcagctgatgggtttctcattcatgacaattttcatgtttgcactcgctattccttacgattactaggctcaaaagaatcaccttttcgggtttgtagctctgtattcactgactttcttctttgcaaattttggacctaactcaacaacatttgttgtcccggctgagatcttcccaaccagatttcggtccacctgccacggcatctc

SEQ ID NO: 13417 - DNA, 500 bp, Cannabis sativa
tgctaacaaaattaacataaaaaggattaattttgatgttgatcattattttcaaaaatggcaaaaaaaatatatataattctcacatgttaaaatgttcaatttaaaaaatagatggtaagggtgtaatttataaacctaaatgaatatatatattgctgcagccattcaattaatcaaactttctcaatcgaaagatatatttgaaatatatatatttgaaatagattaaactacgtattatgaattatgatgcaattaattcataattttatatatatatttgaaatattttaaaaaaaaatctccccataaatttctcataaaccaaaatatatagacacactttataaaggacactctaaaatctctttaattagctttatttgttctcttcttaattctctctttccaattttttattaaagcataaatcaataaattagtattttgctaattattattaaaataactacatgtacttaattaacattatgatt

SEQ ID NO: 13418 - DNA, 643 bp, Cannabis sativa
ttgttacatagaatgcatatacttagttgtatgtttactttttaaagtattgtattttgatttttaaatgtcaccaaaaaaaaaagtaataataattttaaaaaataatatattatcaaaaaggtttaggaaatgtgacgtttggttaggatgaatgaaaatataggaataaaaatgagaatagaaataaaaataggaataaaatttaaaatgtataaaaaaaaattaataaaaaaattattaattttttttccatcatgcattaaaacgatctttctttctattttaaaattaaatagtcatttcaccaaaatagtagaaagatcattatattaaaaggaaaatttggtttattatgcttttttttttaaaagaaacgtcgcaatatatctaaataaaaggaattagacctcgcggtcattacaaaacagatagtcagggatggaggaaatctccaccatacctgaaatgttccgagcaaaggcccatttggctacattatgagccgcaaaattacaacatctagaaataaaagaaaaattacagcataggaattgtttagagagatgattacaaatggaaatataattatctaaacaccaaaaggaatccttcccggtaagtgcgttgataaccttttgcg

SEQ ID NO: 13419 - DNA, 527 bp, Cannabis sativa
aacaaagctccaaccatcaaccattggaatgcttgcaagcgagtacttcgatacataaagggcactatccatttgggactccactttaaaccagcccccatactgaatttagaggcatattcggatgcggattgggcgtctaatttagatgatcgaaagtctacaagtggcttttgcctctttctaggccaaaatctcattagctggggttcccgcaaacaacaagccgttgcccgatcaaccacaaaattcgaatatcgcgcccttgcttctgctgctactgaactcatttggctgcaatctttactcaaagaaattggcatcaaagttccacctatgattccggttctatggtgtgacaatcaaggagcacaatctcttgctcaaaatcctatttttcactctcggactaagcacatcgagatagatgttcactatgttcgagaccaagtcaccaacaaaaaactcgaagttcggtacattccttccgaagagcaaccagttgatctcttcaccaaaccgatcac

SEQ ID NO: 13420 - DNA, 542 bp, Cannabis sativa
cccgagagcgagctggattgtcacccgatccccgtttgagtgtcggggtcttcgttggttcggatgttgacttgaccttccttttagtgagttgtactgccacgtggcataggttctgtccatgtaagcatgccacatcatgagaacaaaaattgggataacatttaccgccaagtccctgtgcagacgtgtgtacagatatagactttacggatatagactttacgagcaagatagacattgttgggactgcagttagttttgagtagagtgcatgttgaagcattttgtcttgattatttggtcttgttataatagagaaataacttatttatgtgcctttttgaggagttggtgaagtaagtgagaaagaggggggcccacatgtacataagtaagttttggggggaaaccctttttttcactttcatttttcacttttactttctctcactagaatttggctcttgaaaaagctcctacttctctctaagtggctaaaactctaggcttcaatatccttgggatttttgcgttatttc

SEQ ID NO: 13421 - DNA, 724 bp, Cannabis sativa
ttgggtttaagaacatagacaacctcaaatacggaaatgtttcaaattagattttgtcccattctataattctattgaattgttgcttatgctcttagagagtactgcattaaaaatgtaggtagccacttgaagcgcgtatccccagaagctgaatggaagtgtcgagcaacacatcattgatctgactatgtccaacaaggtacgatttcttcttcctacaacaccattctgctgaggtgttccaagtgctgttagttgggataagatccatttatccagccagtagtctttaaattcaaaatccaaatactcgccaccatgatatgatcgaagtgtcttcaatgatttacataattgcttttcagccatggctttggtctttgaacttttcaaaagttctagacttcttagtcattaggtaagtatgactgtatctagaataatcatcaataaaagtaacaaaatattcgtaacctcctcgagtttgaatattaattggtctacacacattagtgtggattaactcaagttgttctttgattctatttcctttagcagaaaaaggtcttttaatcatcttggcttctagacaagattcacataccggaagagttctgacttttatttctctcaaaggaccatcatttgttaaccagttaattgtgtctagccaatgtggcctaaacgtagatgccacagatacgtttcatcaccatttgga

SEQ ID NO: 13422 - DNA, 814 bp, Cannabis sativa
agacacacaacacaatgcatgaaggcaataattaagtagcaaccaagaacatgagttactttatgaactatttattctttgtataacatgatatatagcctagggcatttaagagcagtcctaacagggtagctaaactagtcaaaattgtaaaatatttaagaagtggtcttaaaagagtagctaaactatttattgtttgccgcttcaaaatgtattttattaatgaataaatagtacttttgaactctgtattttataaaagttatcaattatactttttattttgttaaatgacaaaattgaccttgtattttttaaaattatacaaataggaccttgaattaactttttgtcaaaattaaacttaataataataatctaatttaaaaatattatgataaaattggttacattttctatatttgtttgtattaaaaattatcttaaagttagttatattaaaaagtaaaattattaaaaaattgagctcagtgtcctatttttactattttagaaaatataaggtttattttgtcatttaacatagggttcaattggtaacttttgtaaaatatagggtctaaaatggtatttaccctaatttttttacactaccaagtcgtgtccatcattgtgatcttaaagctgaaaatagacctctccaaaatgcaaaaaaacttctctctctagggttttttctctcttctctctctaagctaaggtttaatctctttttcttcccttttctcagcttgagacacaactacaggctttgttgtgcgtcaagtgctctctagccgaaagggaccgt

SEQ ID NO: 13423 - DNA, 521 bp, Cannabis sativa
ctgcaggccaaggtggatggaaagaatagggcccgacacccccctcgagcccccactactcgcacaaaaaacccaaggtaataaattctaggcgtcgtaataaccgtactcgcagggaacgaaggaccaacccgaaggtctagacctaaatcagccaacctcaagagagcaatctgccaggtatcctaatcaggagacgcagatcgatgaagaccccgaacgatgtaaccctcgcagcaggccttcacaagacaacgacgtagaatctgcctcctcatcctcgcatggtcgcacacctagcaggtatacgaggtccggttctgttgagatgcagtagggaggacgatatcaggttcataggggtgacctgcgtcatcaccttaacgctgttttcagagaacgctccgacgctcctcgtgacgaggaaacaccccgtgatccccaaatgggcgatcaaggtgtaaacactcgcacaaacccgcctaatgcactagcagcgactatcggggttaatgtcccag

SEQ ID NO: 13424 - DNA, 537 bp, Cannabis sativa
tgcggctgagagtgatttattaataaaaaaaaaacgtacatattactggacatgaatattgctttatattgtggtattttaacacgtaagtatatgtatcgttttaataaataatacttaaataagtgagatcgtttctacgaaaattatagttaagtaccaattaattaaattcttatttttatttcccaatgaaatagataaattttgaaactaaataaactaagtaaaaataaataaacaaacaaataagaggtttaacaataaatgtgatattagggatatgatttcaattgtatctatttattatggtctaacatgattcaattctattaccaaattctatgcaatagtaagtttactgaagtaatttatagtattctcagatatataaatctcaattatatgccaattttctactcccatgataaattaaacatgtaaaagacattacacagaaaccctatgagctatccaaaccatataagtactctcgtccaatatcaaaattggtttctattttacgtactatagcgt

SEQ ID NO: 13425 - DNA, 588 bp, Cannabis sativa
aggaagatgaatttataagtgttctaagtatgtctttgattgttactatcttccttcaatactaagtactttgtttggggagtcgtgtaactccaccaatctacacgacttcaaatttaattatattgaaattttttttgacctaaattgagttgaatatatcaatttgattatttttacaaaacacaaaattcaaaaaaaaaaaatttaaaaaatataaggatcaatttcgtattctcacaaaacataggggctaattagtatttttataaaaaaaattatatcgtttgataaaaaaaattgatggttgcgacaacaataagtgacaatataatttacaattaatatatcgagacaaaagaaggtgaggtcatgcgaatgcacatgatcccactcaaattttaataaattaatttattacataatttttttttatatatattttcatatatgtctccaaaaagtaatattttatttttcatttttatcattgtatatttatatttttgtccttgtaaatttatagttttcatttttatttatcaccaaaaaagtttatatataaacaccttccaccactttgaaggc

SEQ ID NO: 13426 - DNA, 555 bp, Cannabis sativa
ttttttctcaaacaagaattagtaaatagtgttaaatacactaaaaataatgttttttttagtactcatgaatcatgatcaattataacatggttaaaaataaatagaataacagttaaaatgcataaaaaaattatatttttttttctttcatcttgtcttaaaatagtattttcttccatttcaaaataaaatagttattatatcaaaataatagaaaaaacattatactaaaaaaaatatttcaatatttaaaatgtaactaaataaagaaacaagatttcttacctaaaataataataataaaaaaggaatttttttacttttacacttctaaataattttttttttttacatttttacagaattttatatagaaactcttatagcaattaacagagcaactaaaatcgcaaccaaaattcgtataacaactcatatagaaactattggagaaactacaagagaaactcaaatcataaatttaaaaaaaaaaattaaaaaataatatacgaggtaaatttgaaaagtttggattagttttttttttttttt

SEQ ID NO: 13427 - DNA, 507 bp, Cannabis sativa
  modified_base (195)..(197): a, c, t, g, unknown or other
aaagctaactactatgatataggcaaatacaataattattcaaataacaaatataaggtggtgtttgcttgggccgaccctgagcataggcgggctaggtacgcgcctaaggctcactcattttacgggtccaaatcaaaaaattacattttaaaaaatattcatatttttttattaatttttaaaaatactatnnntctttatagtaaaggcccaaaaaaatttttgtttgcctatagccaatttcagctcagggccggccctactgtttgttttgatgtaatataatgtaatgggaatggtaattttaatatgaatgataatgtaatggaataagaattgtattatgaatgatattatgatatttgatttaactctataatgaacattgtaatcaaataaaataagttgtatattgacaaaattactcttagttttattatttttaatatttaaaatttaaattaaaataaaaaaaaaagagcaaaagagatattttctaataat

SEQ ID NO: 13428 - DNA, 554 bp, Cannabis sativa
caacaaaaaaataacaaaaaatcaacttcgcgacaataaatcaactataaataaactatacgactaagaaaataacctcataaaaactataatacaactataaaacaaccaaacaaataatttattatttttattgaagatgtatttttgcaaataaaaagttcaaagcgtaaattttttttttttctatattgatgtatttttgtaattttgtttaaatttttggtctattatgtaaatttttcaaaaaattatacctttattttattattatttttaaatttaattttgattttttaatatttttataatttttaaatattaatattatatagtgacacacagttgcagtccacattgacacttgacaaaccaaaatgaacggaaaagtggagaccaaaactgagttgaagtttggagggtttccccgaaaattcagtcccaggaattaccgtagcaaaccttaaagttcagataatttaaccacaaattacctcactttatataaacataaatgtaaatgatgaaagaaaaagataaaaaattaagaaaaa

SEQ ID NO: 13429 - DNA, 579 bp, Cannabis sativa
agggatcgccgattcctcgcctcgttttcatggcggatgaatcgggttcggattcgggtttggaaattggggaagaattcttttgtagttataatgatttgattgaaagaggggatccgggttttgagtggatccgacccgaaagtgaatgggacccgatgatattaaattacacgtctggaacgacgtcgtctcctaaaggtgttgtgcatagtcatagaggaatatttattatgacaattgattcccacatcgattggggagttcctaaacagccagtttatttatggactcttgctatgttccatgctaacgggtggagctacccgtgggtcatggcggcggtcggcggcacgaatatttgcttgcgcaaattcgacgcggctgtaatttacgacaagattaaaaaacacagcgtcacgcacatgtgcggcgctcccgtcgttctcaacatgatttccaacgccccgggatctgaaccgcttgaaaaaccggttcaggtcatgaccgccggagcgccgccgcctgcggcggtgctgttccggattgagtctttggggtttgtggtcagccacggtt

SEQ ID NO: 13430 - DNA, 660 bp, Cannabis sativa
ttagtccaaatccacctgtctctctcctagccacaaggcctcccccctttcaggatattcgtaatcgtgccagagccaaacaaggacttgagtatggagatatcccagtccccatgattcgtgagcagatccgccaccttaaccaccctctcatggcacgaagaaataggtttgatacacttatatttagtatattaattttattctaatataggtatatacaatcaaacttctctactcataatcttactaataaatcaactctttcatcattcacgtgaaccacctttcacttttaccacatcaaaatagaaaaattattatttattattatcattttttaactagaaattgcaacttattatagtatcaaatttttttagttccaatttaaaattaaaattatcaagagtgattgttacagatgtaaaggtaaaaatttgaatcaattccaattacatataaagattttcaatgatcttaacataattacatataaattcgttatatactaattaatattttcttttttttgaaacaatactaattaatattcggatcttcacattttttttatggtaaggttgaaattgtttatgaaaccacttatctatgaacgcaactctatggtgaaagttcagctccaacacaccccatagc

SEQ ID NO: 13431 - DNA, 572 bp, Cannabis sativa
ttttcaccctataaaacacaataataactctttgtaaatataatagaaaggacaagagtattgtagggacaccaattttgtccttattgctaaagacatcaatatatttttgataatttaaaaaattatatataaattttttttaatatatgacaatctacattataattatagtaggcattctatttatttttgaaattttctatataatttacgatattaaaaacagagttcaaaaattcagttgcacgtacgtgtacttgcttcttttacatgtgtgcatccgaatgtttgaatcttctatttttttcacaaacacgtagattatatatttactacaaaacgtgtatacagtcaaataagaaaatttgagttataatctctcaaaacgtccctactagtaaaaacaaaagtaatatccctcaaataaaaaaattcataatataaagttaaatatcgcactagctactacttacaatgatacagattaatgtgacattttttattggtcgatcacgatagcctgcaaaaactgtacaattttacaatttttgcagcctactcataaccaa

SEQ ID NO: 13432 - DNA, 636 bp, Cannabis sativa
atcctgtcggtctagtttgtctctcgttgttttgagttgggggggtttgtcattggacttttgtttccttggtggtttttcctgtctgttcttgttttggaaggggtcaatggctttttgggttgttgggaggttgtttgttggtgggtttcatgggggtgttttaagtatttattactatggaagaggtagttggttcggctagtagtaagcagggtaggtgcctctctttaaatgaggtttccatttctcttgcccctagtgtggtaactacaaaagtgctttctaagcttttcctctttggaaaaattctctcctcaagagcctttgcaaagtaggttgagcaaacttgctcacacctgtggaaatcacgggttaaggtgcaaccaactgatggtgcccattctgggtccaacacgttccgttttttctttgataatggctcggctagtaaatgggttttggagcaaggtccttggtgcgtcaaaggtgatatgctagtcctcctaccgtggtcgtctgggttctgagtcaaggaactgtcctttaactcgatccgcttttgggtccatatccactttctgcctcaagattacgagcaagacttaatgctaatgctttgggagcctttgttgg

SEQ ID NO: 13433 - DNA, 1012 bp, Cannabis sativa
cactgtcaagagtagggataaagaattatataaagatgttcgaagaaaatctattttgaattagcaaattagtaattatttatttttataataaataaataattttttcaaattaactaaatagggagaaagataaaaattgttaagacaaaatttgtcagagcgagatttcccaagacaaaagttatcaggacaaaagacacaaaccttgtcctaaagacagtggtaggtacctagcattgttcctgtcccttggatttgtatttttgggttaatttactatttaattaattcagttaggtaaatatctaatttgaaatgtggttaaagatatttcaaggttgttgagatattctctcaagtagttgatagattccttcgtaagtatcagtaactgaattcggttatagatatttatttatttaaataattaaataatgatataattaaaggaatttaactactataaatagaagcctaatttgagaaataagaatatcactttaaactaaaattttgaaatctatagagagaaaaaggaaattgatttttctctcaattgttcttgctcatgtgttgagaactcaacaagaacaaggctatacactttatccttatagctcacactagtaagagtccaaattgcatattcctcatcaattagattaagggatacaacataggagaagttttgaggataacttgatagccttcacgtgctatactctaaactttctatttttattgttttgatttaatgtgcactcttatggagattaacacaccaacaacgtaaaaacattgtttgtctctttttaccttttctcttttaattattttatttcttcagttataattatttaattagttttcaaaaaatctcggtcaatattttggtgctttcattgagagctaaaggaagcaatgcgaccatttatagattacgttcaagtaatcatggccctcacccgaacaaactctagtcttcattttgctggtcttagcaccaaag

SEQ ID NO: 13434 - DNA, 543 bp, Cannabis sativa
cgaagaaggaagaaaagaaaaaaaattagttgctatggtggttcgttacggtcccgacccacacactctctgcctctcgctcttttccacgacttctgaaatctaggagtcgatctccatcatgttaaaatgagaataaagaggatcatttaaaccgaaagtttgaacgattcattcccacaattttagctattgtaaccatacgtataaaaaaaataataaaaataatatttgtattaactataccatataatatcattatataataatattttctattactataccaaaaataataataataacagatattattattctacagtattataaaattaacacataatatcattactattacacctatataacaataataatatttattgtaaatattaaacattatacatatgccaaaaaaaaataattattatatcatcataaaaaataaacttatacatatttaaacttatagatattacactattaccgccaatttttaaggttggagactattctgcatcaactctaagtttttgagga

SEQ ID NO: 13435 - DNA, 726 bp, Cannabis sativa
ggacaattttttctgttcttcaagtattcccacttaaagtataatttcgaattcccatccatgttgaatagtggaattcgaaatttaagtataaaaggagaagaggaaagatgatcttcttttcttatcattatcttttccttttcaacttaaaatttagatgactccttgtgtgatttcctttgatttgagatacttctgaaatgtgtcaacattggaatgtatgtcaacacttaattaatatgatgatctttttggttgttgtcttagcattgactttcttgtcacactgtatgtttatgtaaatatagatgtagtctttgtcttattttaggttctagccttgaagttctttagcattccctcagttgtgtttcagcgaaggtggtcttattcatctcctcaattcgataacagaggagaccttcgtcaactccttagctttaagcataggaggccttcaacattccctcggctttgtagcgaaggagaccttaatcatattctcatctttacagtggaagaagtcttcgtcatctcctcggcttcacagcagaggaggtcttcatcatctcctcagctttacagcagtcctcccgcacctttctccgggtcgacttcactcgcagataggaaaagacacgagatatccattttctagctaaacccttctcgagatcactaatatatcattactcctttgaaataatactctaggagtaatta

SEQ ID NO: 13436 - DNA, 516 bp, Cannabis sativa
aaataaccgacgtcataggtgcacgcgtgtcagataactgtgcacctatggcgttggctatttcctaataactgacgccatagattctatatattaccaattcgtcttcttcacttagagcgtcttcctcaaacacacataatagcacaaccatagcagaacccatacccacggaaaaaccatcgctaatcaccgtgaaaaacccatcattctctctcatttctttaccattttaccctgtttttgttttaaaatcttctattaaagtttggtttttcttcctccagcactataaccgaacctattaaaaaaaggtggtggtataactctggcaactgattttggtggaaaaaacattgaacctcaacatctattaaggtataaatatgatttctattcattttatcaatgtacattgctttatttttgtttttgtaaatttttttgagatttttctattttattaacattatgttgttgttttttgtgcatggcggtcggatttttgtcgcaatt

SEQ ID NO: 13437 - DNA, 720 bp, Cannabis sativa
gttttacataataatgaatctatataatgtctgtttgattccatgcaactacacctataattatatgtataattaagctcatgatgatgatgagactaatcggggcttaattattattatgagttgttcctccatgctgtactcctttgtgtccatcgtgtgattatataacataattaagttttattttgttttattagtttttagttgcatggtgttgcatggcttgacgctagcgcctagggcacaccaagcccaaagattttgcattacaacctcgaaattacattttcttttaaacaacacccaaaaatttgggagttttcaattctatacataaaatcaattttattttttataatacagggtgttgcatcaacaaatataccaaattcaaaataattcataacaaaaataggaaaatcttgaagctataattggctgtgttttcagtttttaattttttaaaattgtgttttcaaatgtgagaatagaaaacagttgtttgttattttagaaatttaatggtgtttgacacaagttttttaaaactattttttgattttttcttactaaaataattaatattctacaccataccatgacatgaacccatcctacctcggaccccacctgacccaggaccccggcctcggacccagacatcgagcactagacctggacccagacaccgaacgccgaacctagacccggacccag

SEQ ID NO: 13438 - DNA, 655 bp, Cannabis sativa
ttatgatctcacacattattttttaattatttagtaacaatatttttttaattttaattttttattaaaaaaataatgataaacatcaatgctattgtatagcattcacacatattcctagaataacattatttttcctctaatggtataacatctcaatattttgccacttcatctatccacctaagcaagcatcctttaattttttaccattggagatgctcttacaccacaactactattaatactattaattatagggtgttagggtgtttattatattatatgatttttactgcagtttactggtggtattttatcgattaaaattatataatatgataacatttttaggagtattgttaagttagttaaaaaacatatttttcaagtgagctttatcatacacattttttaactataattaatggtgtacaattatagttgtctttagagaattaattttattagaaaaacataattacatgtacgaaacttgtgtctttcatatttattttttgattacttctcattttaattacatgtttaatttttcaaaattattttcttcatattttcatcacaaacaagtttcttgttttatttttctagaactcactaagtgtccttttgagtgttattttcttccttgtag

SEQ ID NO: 13439 - DNA, 721 bp, Cannabis sativa
gctatagatgggaccacctgaaaataatattccaaagataaacagatgagagataatttaatgatgtttggtatcgaaaggtaatagttgctatgtaaaataatacaaccacttaagtagaattcatttccaaaagctagcctaagaaaagaaggtgcccaagtagttatatactattacctaatttcatacttggtcaataaatagatagcttcttctgcaacgtcggtcccacttcaggctactacttgttacaactacttaagtgacgattggtttgagataatgaaatgtaatggaatggaaatgagacaattttatatccattcctttgtttggttgattattaaagtattagaatgtcattctaaataaaatgacttttccatcattttggtggaatgactattccattttaaaataaaaggaataaccattctaatgcaaaataaaataaaaaaaaaattaatagccattttatccatttttttaaaacattttgaatttgattccatttcattccttgttatttccattctcattcctattcttatattttcatttcttccaaccaaacaccaccttaagtaaaactcactcttaaaaactagcctaaaaaagaaaggtgtccaaataattatatactattaaccaattccatgtttggtcaacatgtaagtcaacttgtgcttgttcacaaatctaatgagaatgatcagag

SEQ ID NO: 13440 - DNA, 572 bp, Cannabis sativa
tttactcttttcagttacaaccctagtcttgtattcatctttttgaggtctaatctagcattaattgtatctttggtcttattctccaacttaattattgtgcatactaagctattacacattttcaacatgcataacatctagattgtgacgtagcttcatgttggcctaatatgggagctcgaagaatatattctttttttgccaaccaatttgttcttttgtacgctttctatttttcctgccataaatttcatgtttaccaaaaagagattctagtattaaactcatttgtgtgaacatatcttccatacttagttcctctgggggtggtctcttttcaacagtgccacttgttttcttgtttcttttaaaacgatgtttaattggttaaaaatgtctatagccataataagtaatctttttgtgcaaacaaatagaaggtgttgccacattgcatgtaggataagcataatagcattgaccactccatccaaaaaaactattccttgttggatattcgtttatagttcacaacaaggtcgcccaaagattgaaggaactaccatcaa

SEQ ID NO: 13441 - DNA, 843 bp, Cannabis sativa
cttggccttcttattggtgagctgctctaccacgtggtgctaattttatcgacataagcatcccacttcaggttgacaaaaatcaggataacatttgccccaaattccttgtctaaacgtctgtatgaatagggactttaccaagtgtgttggtgcagttgggactgttgtaacctttgctgaataacagttgatgcatttttagccttttaaaatactttgtcttgactgtctgatctcattgttgtagaaaaattaattgccttagttgccttttttatatggtggtgaagtaagtaaagaaagggccccacatgcattacataagtgcttgttggaggaaaaacctttttcacttctcactttttacttttcactagaatttgcattagaaaaagctcttccttctctctagagggccgaacccacaagcatcatcttcttggaatttttacgccgtttcgacaatccaagcttcccaccttcttcttcaataatatcttgtaacgcgtaagctttctattcctgcttttttcacttgatttggttgatttttccattgctgcatgaacattattcttgatttgaaaatgctaagatacattagattgttttcctttcgatattctgatccacatgatagccttaggatacataatgtgtgatttctagacaaaaagatcttaaatctgaccttcgttgtgattcttggctctttgagtcacgaagaacaaaaaaaacatgtttgagttcttgaaaaaacatgagttctgatccatgcagatcttggccggccaagggaggttatcatggggtttcgccggccaaggtgttgtaccccct

SEQ ID NO: 13442 - DNA, 573 bp, Cannabis sativa
aagtgttaaacaaataaaacataaggtggtttggccgcaaatttctctccattttttattagaaaatagaaatcttaaaagtattccatgatgaattagtggttttcttaatatatatagaggcacccgatttaagctcgttgtgtactttggcagaatgagtcacgccttcaattttacataaatgagtgttgatttatgtgtcagctgacataagttttaaataaatttatactttttttggtagtttaataggctataggaggcaggtgctcatcataatataattttataatagataagtttacttgctatagccctttcaggtactggattatattttttggatttaaaaattagatttgaacaaggatagaagggtgtaataagtaatttcacaagtctaattgtacttgtatttttttagtggatatgtcccaaaattacagtaaaaacaggtaggggtcattgcaattccaaagccaagtgttatctacctggtgaatttcaatgtttccctatcgacaatagcgttgtgcttgtaataattcccaaccttcagctgtctttggg

SEQ ID NO: 13443 - DNA, 598 bp, Cannabis sativa
aattatgcaaaacaatcacatgccaataacatattggagagcttggaaagggaaaaagattgcaaacaaccttcttagaggttcacctaaattaagttttccaaatcttccagcttacttgtacatgggtcgaaagatgaacccaggcatgatcacacatttggaggtggatgaagaatctaaattcaaatatgtttttatagcatatgcgacatgcattaaaggatttcgttgtatgagaaagattattgtggtggatggaacttggttaaagagtaggtacaaaggagtaatactcattgcaatggcacaagatggtaattttcatcaatatcctattgcttggggtgtggttgattcagagaatgatgcttcgtcatcatggtttctcacaaagttacatcaccttataccggatgagagtgaatgggtcttaatttcagataggcatcaaagcatcatcaattggttgtcaaatatttataagaaatcacaacatgggcactgtaggtggcatttatctcaaaatattaaagcaaatgttagagttaaaggtgtcataaaattattcgatgaaactgctaatgcccataaagtt

SEQ ID NO: 13444 - DNA, 529 bp, Cannabis sativa
agcactacaaaagctaagtattgtgttatccgttttaggtttcttgtcttaatttggggaaaattatcattttgttgaacatttattttttaaaactcttttgttttattttataaagttctgtagctaaatttggcataatattggtcataatgtagaatttacatcaccataactgttatctatatttttggatggacgacacgtgtcattttcaaagtataattagtctccataagtttaggcccaagccttcccacattaaaaagcctagtctaaatcgaagatgggcccgagcccatctaaactccaaaagcctcgtcaacgaggacgaggcccctccactttcaaaagaccgtccgacatttcaagagacgaaacaaacgaagcctttcagataatcgatgagacacatccagagaggaagtccaagaggcgcctttgaaagcctcttgtaggttgacatggctgccttctaaagcctggtcccaccaaatcagatcatgtcctctcagaacatgatatggtg

SEQ ID NO: 13445 - DNA, 670 bp, Cannabis sativa
tatatatatatttgtgttttacaatatttttatgttaattttttcttagattggaaaaaataaatatttaatttattatttgaattgttttattccatattaactttttaacaaactatacaaaaatcttaaataaaagtaccaagttattacaatttgaagcaaaaacaaagcctcaaatttcacaactatgttatttttttcttttaaattaacacgttattttgtgcaaacatgttactttggcattaaaatgagaaaaaaaaaaattaatattctaggcaccaaattatattagaaagcagaataaaagcaaaaaaaaagttaattttgcattaaaatagtcaaaatatagcacaccttaccaaatttaagattccagttactagattactagagaaaataggctaaaatacaaaacaaaaataacagactacttttcaatttaaacatgttacattatgcattaaaaccaatcataatgtagcatgcccaaccattattcaatatttcaagtatcatgttactaagcaggatagattttaatatagataaaaatttcaattcaaacaagttaccttctctattagaaccattagtatactcaaccaaattcaatatcttatattctgagctactttaaaaagcattgggtttttttttttttttt

SEQ ID NO: 13446 - DNA, 661 bp, Cannabis sativa
atagagagacacacaaaatttatatagtagttccccatgtcgcaatggtaatggagttacgtctacttcgaatttttacttctcacgagaattacaagagaattgactaagtatggaagctctaaatttttagagagagaaattggagaaaaatgctctgaccttgtggacacttttctgaatgtgaaaaataagttagatgaactctccttttataagcaaggaggttctatcaaaataataattaaatattcaaagaaatgtctaaaaatacaataatattttttactattaataatgatctaatggtgaaattgactccggtgatcggtcgtcgtcaattctagagcttgaatcgcgtccgtaggactttttttcaggtagttgtagttgaaattcataattttgttgatgacaaaatttggacttgatatctttagagctgggattgaggtatgagacacgacttgatagatcattgaaatagtttcaaaacaaacgttcaattgcatcaatcgaatcattattgagtgagttatgatcactattttactaaaaactgctctgatatcagtacccaggttgacagcccagctctcaagttaacatataacataacttcgaccgagaatgtatgttttgatgctaagtgatattttga

SEQ ID NO: 13447 - DNA, 536 bp, Cannabis sativa
gaaagtagacaaataaatatcaaatctattatttatttattttcaaataaaaaaaccataaaaaatcccgtatttatttttctattctagtaataatattatattttgtatcatctatattagtacccaattaaattaacacactataaaataataagtgcatttttttaaaaaaataaacttaaaataaatattgaaaatcacttttaatattatatatatattttaaaaaatccatgttattttatattaattttaatatttattttgatttttaatttttttaaaatcatatataattatttttttaataaaatttcacataattatttattttaattttttagtatagtatttaaaatataatttagttttatttaatatgtaaattttttaaaagtatataaataagaagaaaaaaactaatataattttttttttgacaaaaactaatataattaaaaatatatattagaaataaaataaaaattattaaaattaatgcatttataaattttggagttaagtaaaactcc

SEQ ID NO: 13448 - DNA, 591 bp, Cannabis sativa
atgtaacaaaatttttagtttaaccgtatttataagagataaatccgctcaattggatatgcacaattcaccacgatatctcacttgaattttattagggaaatttacataatatattaacttttgctatttttttacaaaaataccgtcagacggtatttttttacttttttactgtattttttttataagtttcatattgcactatactgtgttaaatttttattgttgttctactagtttttttagttgttctactgttgttttgaattgttctgttttgtgttctacttgtgttttataagaacacagtatttttgaaaaaaattccgtgtgacagtatttttgtaaaaataaaccaaaattctagtatttttgtaagtttctcttttattatacatatcaaatatatatataatcggcacaccaatgtagccaaaaatagctaaaaagaaaaaaaattttaaagattaaaatctcaaattctatttcaaaagttttaaaaaatacagtatttaactaaaaaaattaaacatacatatattacacttaatattacttaattgaacctaattaaaataaaaaatttat

SEQ ID NO: 13449 - DNA, 770 bp, Cannabis sativa
gttacttagcttccaagtaacttatatagtaaagttctcttctttttctttcttttctttttttttttacagcccctaaaataacaaataaaggaataaaagaatatttatttaaattaccctcaaagcaaaatatctctaaaataacctaggggcattttggtaattttactaatctatgaaaccgacattctacaattctcaactagtccggaatattcccaaaataattcttccatcaatgtcgtgacatttctaactaaaatcgtcgggcccgatattttatttagaaaaaataatggtatcttcgatacccacatatctcattataatctccgtaattaataaattacgcttcatttgtcattagataaattcttggtagttaccctaagtaagatcataatctaatcttactttgttaccaaaacaattacatatttaataaaatatgtctatttaaatatcatttatttttccgggatattacagcgagcgaggcacgagcgaggcgcaggcgtggcatgggtgcgaatgctttccaagagataatttgatttgactgaaggagattcacaaacaaaggaggcaagggtcgctatttgtctttttttttttgtttgtatggaatatcttgtgctatttacctcttcgtttatttatagaaatattttacttcttttatttttgtggttaacacttgccctccagtccaaaagattacttttcagttatctttttgactgtaagtgaactgccttctctgcttt

SEQ ID NO: 13450 - DNA, 599 bp, Cannabis sativa
  modified_base (144)..(144): a, c, t, g, unknown or other
  modified_base (346)..(352): a, c, t, g, unknown or other
tgttttaggaaaaatagtcaaaagtactaataaagatgtggttggtcttcgtttcacttaagaggaaattgtggaatatataataccaaaccaaaatttgtaatttaatttagggtaaataatattttggaccttgtgttttgnaaaagttaccaattggaccatctggttcgttaaatgacaaaatggaccttatatttttaaaaatagtaaaaataggaccctaagcttaatttttgacaattttttttttaatataactaacttgaagacaatttctaatacgaacaaatatagaaaatataaacagttttgtcataacacttttagatcggattattattannnnnnnttttgacaaaaaatcagttcaggaacttatttgtattattttagaaaatatatggtccattttatcatttaacaaaacagacggtctaattaataacttttataaaatataaagtctaaaataatatttaacctttaatttcagattggtaatttgaagtaataaaatataatcacttgtgatgataatgctgtatttatatatatacatataatttccatttaatgttgaagtgccttggagtttg

SEQ ID NO: 13451 - DNA, 1041 bp, Cannabis sativa
ttttctagattgcactcacacatgtaatctggaggatattcagtatagtgggaatctatatacatggagcaacaagcaacaagggcgcgacaagatctttgcaaagctggatagagttcttgcaaatgagaagtgggttgatctatttcatcaagctgaagctttatttttgaatgaaggtctatttgaccatacaccagcaataattaaagtgtaccctgaagttccaagtggaaagaagccatttaagtatttcaatatgtgggctatgcatccggaatacaaggcagcagtcgaaaatgtgtggcaacaagaaatcaaaggctccaaaatgtttcagattgtctccaaacagaagctattgaaaggtgtctttaaaaagttaaacaaaaaaggcttcaatgaaattcaagcctcagatattaaagctcgagaagaactcaataacaggcaagaaattctgcagacagaccctctaaacgatgtactccagcaagaggaaaaagaggcaagagaacattatgttgtggttcataaagcatatatctccttcttacaacagaaagccaaaatctcttggataaaagagggagatcaaaactcagcattattccatagctgcctaaaagaaagaagaaggcaaaataagatcctatcaatagaagatggagatggacaacgggttgagaacccagctgctattacggaagccttcttgaagtattatcaaggactacttggaacgaagatgcaaggaaggttaccagtccacaaaaaagtgatgaagcaaggggttgtaattactaagacacatgaagacatccttaattcagattgcacaaaggaggaaatcaagcaaattgttttcaacatcccgaaagacaaagcccctggtccagatggatacagtagctcttttttacaggaaaattgggaaataatggaagaagatgtgaatctagctttcaatgaaatcttgcaaactggtcatcttctcaaagagctgaactcaacgatgcttaccctaatcccaaagactaa

SEQ ID NO: 13452 - DNA, 506 bp, Cannabis sativa
ctccccatcatactctagagccttggcataacgcttcaactcatttctcgcggtccctcctatgtgaggacctcttgagatcatagcgacccttccattcgtccagggaggttgtctaggcacctgctgatggggcatacccccaagaggtattcgtccttctggtgccattgctggcccacttgaggtacttagactccgatttgttcgggattcaagtgtggtagcctgtttttgatccattcatataaatggcctaatcgaattaagctctcgttttcatcctgtaagttcttgcattcgttagtggtgtgaccaatattgttgtggtaatcgcaccttttgttggggtctctccgggagctacctctctacaaaaggggaggcttccaatagtgagtgatttgctgggtttgagtatccacgagtttcgtatattgtgtatactggggggtgtaacctctcctttgtcttttatcctcaggtcgagtgttaccttttaagga

SEQ ID NO: 13453 - DNA, 519 bp, Cannabis sativa
gagagagagagagagagctatgtaccaacagaaaaagagagcaagggttgtagtggtggatgacgcaacagagaaagagaagggaaatgaacggtggtcggctgatgatcttttgaaacgagagcttttggtgcggctgtctgctggattttgagggggctagtgtggctctactgggttttagaatgggggctctgctagggtttgaaatggccagggaaaagagatgcgtgaaatgaaatcttcttttgtgaaaattggattttatacaacttaaacccttttgcttcggtggataaccgtggcaaatgtattaacctcatttttaaactgaagcaaaaacaactagcctcatttttccaccaaagcaaaatgtaatagacaatttttaaaattttcacctttttcctcgattcttcttttagcgtcggggaatgagctgacgctaattgatatgttttagcttcacttatactctgaagcataaaatcatcacctattttttgcctcggtcaacca

SEQ ID NO: 13454 - DNA, 511 bp, Cannabis sativa
aaattttatcgccttaaaagactccgtgtcattagctaaaagcgatgtcaacataaggttatgtgtgtaataattttaaattataaagagtgtggttacaaatatttcaataattaagtgcaaaaaaattaattgctgaaagatttttatttagtaataaattaaaaaaaactaattaataattattagtaattttattttaattaaaattttataaggaaataaaatatcaagttactatcaagttataagttaattatcatttatttatttttaaattttaaattaatcacaactattcaataataatttaatggctaaatataaatataatcatggtagttatatatttgaagtacccactaaagcttcctccatatataaagctaatatttgtatgttactaccgtctaccaataaactattttgtttgaaaaaataaaaagaatgtaactaaagaaaatatttgtaataaaatttatagttcggaaaaaaatttacaacaaaagaa

SEQ ID NO: 13455 - DNA, 748 bp, Cannabis sativa
aacattttatatatttttctttattatttttgtgttgatattgaaaatatattttatttttattttaaatatttattttgttggcatgtaagaaggaaggatttttttttttttaaaaaataaaattagtataaatttaaagatatattaatataaaataataaaatgttgtgtgtttttagagcagtttctaaagagactgcatttaccatatatgcagtgcatgtgccgtccaacgaaattgtatttttttgcagcattttaagattttatttacagtgcacgatatatatgtcgagtcactacataattttttttatataatttaattaatatttatattattatatttgtaaaattaagaattattttttgagaaattttataatgcatattttaaaaattaatataataataaaaagtattttttagtataatttttaatgttacagttgatgtggaaatatttattgactccaaatttaatgataatgtattcttattgcagtgtaaatcaaatttgcccccgagacacaataaagacaacatgatatgttgtataaatcccatgaaacgacgtatctctttcagccgtcgatcttcaaatacattaacctaaaccaacgggcttgtgcgtgccatgtcatcaatccggacttttattcaagctccaatcaaaagcgttcatcaattagtatatattcaaaaccaacttcttataaatctcatcagtttcaaattttctctc

SEQ ID NO: 13456 - DNA, 691 bp, Cannabis sativa
ttcaagtagacaacttatttttttatcaacaggaatattattcattatacattataatatcataaacataatagcttacaataaatgtatagagggaacaatccaaggttagggatataaacaagatgggaaggggtggggattgctctcccacccccttactcatttcctaaattcacctccatacccactccaatacccgtttaattaaagcagaagcaggacaattattacccagtgggagaaggattctcatcgagtactcattatatttatatatatttttttttaaaatgatgtctcaaatagattttttccttaaaaaatatcaaaattactaattaacaaaataaacatgagtagaatagtgtgtataataaatgaagttagtaaatataaaattgataatccaaaataagtagttaagtgtcattttttttaaagcagttaagtatgattattaatatgcatcaccgcaaacattttcatgaaaactgaaatgtctcattaatgtaatcaataaaaaacctaaagtatgaattttttttttgaatgaaaaatatgaatttattttaattgtaatagttaagattttaaaatttaaatatatacatatatcaaatcggagcaggttcgggacgggtatctattctcccgcccccgtctggaacccgacttgagtatgaacatt

SEQ ID NO: 13457 - DNA, 548 bp, Cannabis sativa
tttctctttcgattatttgttctttagtcctcatcatttatattctgttttcgaaaaactcagtaaatagtatttatagtgatataaattttagattatgctatcttatgttttaaatttagtataatttttataatgtatcaattttagcacaacttttaaaatattgttggagtatattttttgcaagataagctatacacgtcaccatttaataaatgatgtattattatcatgtgagtatcacactaatgagcatatgataattatattttgttttgaatatataaaatgagatttattatagtatttaagtacataacatgacattaaaattatgagtaatttgcgcataaccctcataagtgtctatttattgcaactaacctccaattctaaaaaattggtagtaaaacctcttaaattcaagttctgttagcacttagcctttttcatctatttttagatattaactgccatgtgggcatgtccatgtgtacatgaagtattgcctacatggacagaatgtacacatgacgctataatat

SEQ ID NO: 13458 - DNA, 587 bp, Cannabis sativa
  modified_base (129)..(131): a, c, t, g, unknown or other
taatatgattattttgctctattatcattttattttatataacaattttgttatctatataattttattatcttcttttatatttttgtagtgaattgaaaaacaaattactttttttttttaaaaaannntatatatataataataataataagactaattaaattgtataccctataaatagttaagcgatcaaaatttgatgagtaattttttattatattattagtccacacttaattatatagacttatccattagttaaaataatatttatacaatatgtcaaatatatctatttttttaggactaattagattacatatcctaagtggtgtcaaagtaaccataatttgacatgtgtaatgtctaattatgttattacttttttagctaacaagtttatagtttgtataaaaaaaattgaatatattgtcacacaattaattttatttatttatttaattatttttctcttatttatgattgtgtaattaaaattgaaacttatttggttatgtattttctgtattggcattactatgaatacagattggccgagtgactataaatgaatttaagtggga

SEQ ID NO: 13459 - DNA, 500 bp, Cannabis sativa
ttatttatagtgatgatctttatctgagttgaagccactaaggctagcttagtggtgagagagggataaaacaaagggagagattatgggttcgaacttagaaccttgaaattattaagctattaactgattgtaaaataccattatgctaccctaaaaaaaaaatcttcatcccaattcgaaaagagagaaaagaaagaaaaacattaattcgtaaatagtatatgcaatcaacgtataagtggtaaaacttagcatctctattataaaaatcaccagtactaactacaaatggttcaaatttcagaagcattattatgtttatgggcataagtatatagaaataaggtggggctgtcgtatatattttaactagttacaatatatatttataaataaaagtaatatttataaatataaaataaactttggtataattgaggtcatgagttttaattttaataaaagcatattttctttaatatttgcattttattttt

SEQ ID NO: 13460 - DNA, 649 bp, Cannabis sativa
acaaaaccacgtaaaaatatctgaaattattacatattttattatttattaatttatattaaatatttattactaaaaggctacttaattttagttaacgaaaatctacgttaacagttatctttatgtttatcagtttttttactagtgaaagttagtaatgcatctcttatatatatacgaattaactattatctagcataacacttggtttgttgaattatcagaggttatgaagatgtaaatattagatattaatattagtagtgtttgtcttcatctttaatgagcatatcaacttaggaacatctgtacttttttttttctaccctacaatatttgaggactatcaaactatagcaattcctattgtatttgttgacaaccctttcattagaaacacacttagacaaaaaagagaatattgctagcaagatctaaaagatgctattacagaattatgttcccatgaattcgaagccaagatctcattttcttaatttttgtttattttatatgtaattttcagctacaaacgtttgggaaagaatgctgaagaggcagatatagaggagatcatagacatggctagtaaagccctttgttcccatcaagagaagctagcccaagaaaatgttcattctcaaat

SEQ ID NO: 13461 - DNA, 859 bp, Cannabis sativa
  modified_base (184)..(190): a, c, t, g, unknown or other
ttgcctgttgtcagtaattatggtataatgtggatgccccatatacctttgagaatgtcattatgtctatggtaaaatgcatgacttgtaccatgagagtgtactaaccctctagagggtaaggggtgtacccctagactaacctcatagaaatcattgcatttgaggtaggggtagtagtatnnnnnnnctagattaacttggcatgtgggtacgtggtaattgttcattccacttacgaaggtgttagtccatcgtttttccttcttggagacgcccacctaactcaaactaggggtaagggtgaccgtctgatttccatcctaacggtcatgaccaccctttatgattaatggtcatgaccaacggtcatgactttacatattcttcattaatttagtcttagtatttttgtaccgcgtgttgctactcttgacatatcatcgtcgttaaaattcgagtaaatattataattaaatggtttaactgttaaaataaattataatagggatttaaatatataaaaaaaaattatttataatattaatttttagcaatagtttttttttaaatttaaatttaaataattaattatatttaatttaatttaaaaaaaaattacttaatgataatctgctatatgtaaaacaaatgtaagaacgtctaaaatatttataaagcgtacaaataaaagaaaaatacaaacaataatgattttttttgtttttgtttgaaagggacaataatgatcagttcttcaataataatatataagtcacagcaataattaaatgaaacaattgattcaacaatataagtacttgtatcctatggataaaagtataagaatgtcgacata

SEQ ID NO: 13462 - DNA, 540 bp, Cannabis sativa
gatgatgattcctctagcattcttcgctggaaccgggtaaattcctcttcccttttacttattaaatctttatttcaattataaatcttttaaaatatatatctcagatattgtatttcaccacaatttaaataagggaattttcaaaaatatatattaaaatgactgaatttgaaattataaaaggaaaatagaaataattataggataatgactttatgtgaagttatttttttttaatatgtgatattattttattttatatttattaaatattattttcttatttaatttttatacatatataattatttattaaaaacactatcattttctattttttttttatttaaaaaagaaaacatacattcacttatctttttttctctaaaaatttttaagagttgcttatcaaagaacctaaactataaccaaactaagagcaacgccaaatatctattaccattcatgatacatttccaaaaaaaactgacagactaaactttcatttccttggcagctgaaattgaaactttatag

SEQ ID NO: 13463 - DNA, 511 bp, Cannabis sativa
tctgttcaaaggcccataagaatcgaaccacatagtatactccattgcttcctttctatcttggtcaaccacttcctcttgcaccaaacttagattaagagagccttctataggcttcctggtttccaccaatttctccaccacatcaaccgaaaaataggtttcacttacttcaggataagttatagccttgagtacgtttaacaaaatttcatctccttatagtacttttagctttaactcacccttttccacatcaatcaaggcttggccggttgccaaaaagggtctcctaaggataatgggaactttgctatcttccttcatgtcaagcacaataaaatcatctgaaaaaataaacttgtccaccttgacaatgacatcttcaattatcccccttcgatgagccaaggaatgatcagctagttaaaatattgttggcttggcttcccctagttacaatctcttgaacactgacaaaggcatcaagttgatatactcgcccaaaatc

SEQ ID NO: 13464 - DNA, 873 bp, Cannabis sativa
gggacaaaacaagtgttcctactagaaattatatatctatatatataggatttatctaaccactcatttttacctcatgctatgggaaagttttgtggcccaattagaataaatttacttgatgctacatgttatgattgtgcatatgtatgcatgtgattttttatttttttttttaaataaaaatttatagctgttggcataagtgggctgttttttttttctttgttttcctttttattttatcatttgttttgctttggattattttttttttagagtttttaacaaaatactagataaaaatttacaattttactgtcacacagattttttttataaaacaaccgtaaaacaacaaaatataataattaaaaacaatagtagaacaactaaaaaataaccgtagaacaacagtgaaaacttaacacaatacacagtatgaaacttaaatagtatttttaaaaaaaattatgctaaaaaaaaaaaagttagatttttcagtgtaaaaactctttattttaaaaaaaaaaatgagaaatatatatccaaatatgtcataaaaattatatttttttccaataaaattagtttaataataaaatatctttatatattaaaagtgcctatctgacggcaattcttggtttaacgatcttgttttgtttcctccgttaactttaacagaatattcccaattaatttataattatttttttaacaaaaatttatattattttaaccaattcgtttaaaatgatggattgaattcttcaaatttaataactaacactaaaataaataatattaataataggagatatttaggattttaacaatataatcgccaactctctgtttgaaaaataaaaa

SEQ ID NO: 13465 - DNA, 546 bp, Cannabis sativa
ataataattcttagtattttttttcgttatcatactgctattagttaaattaagtatatagttattaattaaattaagtatcaaatcatataatttaatataggctaattaggatttttgtcccctgaactttgacatgtactaaatcatgtcctctaaacttttaaggtcgttaaaaatactctctgaattattgagattgttagattaaaggattttttctccaattttagaaaaaaaaaaaatctaacatggatgaaagtcttaagactatgatttagtacatgttaaagttcaaggggcatgatttagtagatattaaagtctggggagcatgatttaatatataaacaatcactaaaataataaaattgaattaaattagacaaaagtctttaaattcaacaatctcaatagttcaaagggcatttttaacgatcttaaaaattcaaggagcataatttaatacatatcaaaatttaaaagctaaaaattctaattaacctttagtataataatttaaaaaaatattagtaaatcattcac

SEQ ID NO: 13466 - DNA, 566 bp, Cannabis sativa
tcatatccttgcagtttgccatatcactactaaataactccaaattcttgtcggttttgcacagtcggccaaagaattcccgacagttcataaaaccgtcgcctatacgagcgtcgcggatactgggtagaattgacgatggtcaaaaactgtcgagaaaatagtatgggccacggtttaaaactgtcgcctatagtgaacactataggcgacagtttcaaactgtggcctataactgtggcctatactgttttagggacagtttaaaaccgtggtctatagtatcggccacagttttaaatcgtagcctgtactataggcccacggttttaaacccttcttttccatgtgaatgcgatcattccctaaaaaaatcagatccaatttgtcaagttttgagggcactatcccatttggattgtgacaattaatctataagtatgaagatataacaacaaagatttgaaataatatgtatgtatgtatgtatatgtaagagacattaacaaaattattcagtttaacttttttttgaggtatagatagaaaattggaataaattatgt

SEQ ID NO: 13467 - DNA, 521 bp, Cannabis sativa
ggtgccttattcatccttccttcggcttcgagcttcctctagcttgataaatccgccagctttatcgaggaactccttcatgttgttggtcaagatcctctggatatctttccagaagtaactcagtggaaggatgcccttgtatgttgtatatcgaccttcttctgtaaggcctttgaccttagtggcctcggccataaacctttggatataatcctttaggtttttcttatctttgtttgactttgacaaggtcttctagctatgatggtataagccttgaggatgagaactgtgtgtagaattcttaggaaaactcattccacgaattgaatcaatctggggccagcttgaaataccattgctgagctatttttgacaaagttgcaaggaatatgcggcaccgcctatcactagtttttttttttttttttctaattttcaagttgcatctcgaaatatttaatgtgtcttagtgggtcttcttgcttgttagacatcttctgtactggcatcttgat

SEQ ID NO: 13468 - DNA, 571 bp, Cannabis sativa
ttaaatgcaaaagtttgtgttagactcccaatagcattggaaaatcatattgcaagctaagtgaaaaccatattttcattggattttccttgacagccaaactaaagcccaccactttcacttagccaacattaaaatattaaaaatctaaccaaacacactaaactttcagattcccaatttccacttctcccaataccgcataccaaacaacccttaagagcctacggtttagaaggctacattctaagaataaagctttatcctccacagtttgtcgataaatactataggtggctccattcctggtgcatcatgacaagttaacctgggttatggcatgtagcatcatacgtaccaatggatatattaagttggttattaaactccatttaagaatcgatgtttggtcatgttgttagctaccaaatctctcatgaactctgggccattcctgaccgcctctacactacaagctccaaagctaggattcttcaactatgtttccagctacaatcgctcaaaaaatgaagtttgataaacatgattacattcacaaaataaaaaatat

SEQ ID NO: 13469 - DNA, 518 bp, Cannabis sativa
aaataagatacggtaattactgttgttaagaaagagttatgactctcttttaaaattgttgttaagtttcttacttatcggttacttaattaagcaacgatagtgacattggaaattcgttgataacgaggtttaaggatgctttataaagtatcgagtttggtttgtcttataagacaaatagttgattattagcatttgattatgctttgaataactgcctaaactatatgttgcaatgtatgttctgtgagacttaaaatgttgtgctatatgtgatgtttgtgttttacctgcttttcttgttgattctttgtgactcatgggtgctttgtggtgcaggtaagggaaaggcgaaactggaccagccatgagtcaggggtctcctggcaatgtacatatcaacccgccatgttttggttctcagtagacaagatatttcttttatattattttgagtatgtcataatatttcgtaacaagatgatttagtgatttttagtaaaagtttgtaacta

SEQ ID NO: 13470 - DNA, 511 bp, Cannabis sativa
tgtttttaacctttgtaatagaataaggattacactcctacaccacatgaataaggattacaatcactactaaataataaaaagacaattttaccttttctctttctttataaataataaataaggcaagggtatttttgtcaattcaattttgattacaatgttcattataaaataagtcaaacatagtaagagtattcctattactattaccattacattccattactattcctattactattacaattacattcccttaaaccaaacactacctatattcattacaaaaaacttgatttttaattactaaaggtaaaaaatgtgacaaaaaatttttgtcctaatctttatcgtgacgagattatgactaaaaaatctgttggtaaaagttttaatcacaataaaaataataatgtgtgaattgcaaatttagtttagcaaaattgtataattattaataaaattattatcccaattagataattattggcatgaattattatataga

SEQ ID NO: 13471 - DNA, 835 bp, Cannabis sativa
agcttagctaaaccgacttaagtaggtcttaagcgtctcgctcggctgtggctttatgttagtgagtgaggacgcctcgggtttccaatcccttgccgcctggaactgttttttgaagtccttagacaactgctcccaagaggtgattgaatgatgggtaaatttgttgaaccatttgctcactgctccaactagtgaagtggggattacaatatagcctagattattcgtaacattactggctcgcatgatggtattaaaattatttaaatgccaaatcggatctgtggtcctatcatatgacgagacgtgagggtttttgaatccctaggggaattcagtattcataatgtcttcatggaaaggctcgaggtcctcgtccgactcgtatccagactgctttccatattccctgacttgatacctcctgaatttgtcctccaattcatcaatttgcaattggataggatcctcttgcttttaactgagatgttttggcaaaggtcaagtttttttttttggttcaagtgattacgaagatccagttgctgctggttttagttactaacagacctcttcctactcatggacctcgtcctactcatggatctcgtccttgagtaactttcagttctacttgtgcctatactctctctatcagtattacgatgagttctttccccgccttgcgttgattgactatgggttgtcgtgcatcttgagttggtactcgcctcgtcacgttccggcgttctcccttaggtatgggtcgttgcatggcccctgttggggtttatacgtgctccttccgtattagttcgagaaggatgttggc

SEQ ID NO: 13472 - DNA, 574 bp, Cannabis sativa
attatatattctcaaagtcaaaagttaatttttcaataaaaacaatggtggagcctcatagacacgcgtcttccatcactcaataattctatccactaaccacttaagatgctccacgtggtgcttccttccatcacaagagaaaaggttcatgaatatataattaatgaagcatgtggatcatgttcatgagggtaatattaataactcattaagtaaagattaacctccctaagatactactgattaataattattaaccatctctatggtgaagtgtttttttttgaagaaaagcgtgcatatattgatcaaaaggagtttagacctcgcggtcattacaaaataaggagttgggcaaagaggaaatagggacagtgccaaacctctgatgggaaaatgcccacttagccacattatgggccataaagttataaagtctactaacatattgaaagttacaaccaatgaaagaggaggaaagtgatttacaaaatgagacatagttatctagctcccaacgggactccttcccattaatagcgttgattactaccctcgaatcactctccac

SEQ ID NO: 13473 - DNA, 539 bp, Cannabis sativa
atggtattagaaataaaagaattttttttaaggaaaaaagtatggaaaaaaagaatgattcactactacaaaaactagtttttacgtcggtcaatgctactgttcatatggttgaccgatgtgaatagtgtgtaaaaaatagaggtgtcgtttataaaatgacgttaaaaagatatttattgcatcgtttaaataaatgacactaaaagagaaactgacgaaaaaaaaacaaggaaaaattaaagttggagagagagtgacttgcatgtgctgatatgattggagtagcaccaggatgatcaatcaggtactgtttgtcatccctcaaatctgcattagcaacataaatttatattttaactcaaaattttggctaaatttaaatggttcctcctagctagtaccaatgtggtcaatatttttttttgaaagaaatatagattttgaccaaactggtcatttatcctctacacttgagttgcttgccaatatttgtaaacatttaccaaggcattcaatgaagaatcacgctacatctt

SEQ ID NO: 13474 - DNA, 649 bp, Cannabis sativa
aaaaaaaactaaaaaaaaattaaatcgtcaatctcaattgtaaaaaattttattatattgaaaaccctttattgttgacgagtatttttaaaatttattttatttttattttattatatataaataaaaaattacctaataatttctaaccaagaattacactttatatagaatagatatatattgataaatacataaaatatgtcatgatcgcatagataatgtttggaataaataaagcaaacagtaatttttcaaaaagtataaaaaggatactaaaatattcaatgattaaattttggaatcattcatggtttagaaaaaaaaaaagaaactaagaataatcaattattgaaaccaaatatatattttaagaaaaatcactatccatacaataagtcaccaacaagttacccatttattttatatttttaaaagaataaataatttactgtatttaatatttttattcattgtattatcgactagattaagatctaaatgttataaacaaattactatgagtagtgattaacgtgtctatcaaacaattttcgttggtttaacagaatatttaagaataaaagaatatttcgttaaatttaacaatactagtagtgtgacagtcagtagtcccgtgatttgtaag

SEQ ID NO: 13475 - DNA, 1262 bp, Cannabis sativa
actttaaatacgagaacatgccctgtatttgctacaaatgaggtgtggtgggtcatgaagagtttcgatgcaagcgtaaacggagaatgatcgctgacgactgtaatagaacggctccaatgtatggaccgtggattcgcctgggatctcgacaaaaaggctgcttctcgaactatgaactgtatgaacaagaccggctgaacagagagatcgttgatgcccagaatcaagccgaagcaaggcaaaatttgatccctggtgtggataattttgagccggctttaattggtacagagttacatatggaagctttagctgagccagctagaagggaggcagaagaggaccctctgcttgtgcttaatgaagaaggtgagacagttctaggaggaagtacggcggaggaagaatgcccgaaatcagaaaatacggtggcggagggacaggggcaaatctgtcataacattcccaacgtgcatggtaaggacgttgaggttggtggggaggtgttggcgcacgacagctctggggcggtctgtggtcccaccacactttcaaaaaacgtggatattagccttgatgctggtgaggtggattcatcgcacgtggagaaattagctatggtattcaaagcaacattgggctctaattcaaaatcagtccataaacactcaaggcccactagacccctcaaaaacaatttattctctctcatgggcttgggtcagaggactttactttgggtaataggaaaaagaggagattcaattcaatggaagtgggtcggggttcgaacatcaatctgaaggagcagcaggtccataatttgaaaaagaaagtgtgcccaggaaaggtatccaattcgaatatcaccccagatcacaatgggactgactttacccattcggattgtggagaatcaaaagatataggagtgagtcaagaattagaaagacaatctggaggctcttcgtctgtggggaggatttctattgaaaatgtatcacagtatgcagagaaggaaaaggcgaattttggtatggccgaggaggcgggccttcacatgccccccccatgcctcatgttagtctttgcctggaactgccgtgggcttggcaaacctgcggcagtcgatgctctccgaagattgattcggagtgccaatcccgacgtcatttttctgatggaaactaagaaaagtgcgttggacatggaggctatctggcttaggttgggttttaacaatggagtggctgtctcgg

SEQ ID NO: 13476 - DNA, 748 bp, Cannabis sativa
ttggtgtttatcttcaaatttgacaccaagatttatctattctgattgtattaaccttgtttctaaggtgaatggtaattggcatgactactcccctctatcttctcttgtccatcagatcagaaccttcctctccagattccctgaagctactttgctgcatgtctctcgccaacacaacaacaaagctcactcccttgcgaagttagccctcaggttgagagatgaagactaggcggtttttttagccccttttaggctatttgtgctctttgtttcctcttgtaatcagcctcttgttgctcaaaaaaaaaaagttgtacatactttaaaatataataaggctaaaattaaattcacataattgtacatctaattccagtgttggcttagaattattctagattaaatctctttatgtgaactttgtccataaaatttactttagtatgatgatgtctaaatttttcatcacactatatatttacacgttaacttaattaattaatattgtaattaaaacaaatctcagtacaatttattacgataggaactacattatccctacaaaaataatatgttctttatctacaaactaagtgttaaaatttgaggatgaatgaggttcaattttaaaatcaattggtaatgggggaagtagctcattcctcttatatattctattatctttccacacattagtaatgtgggatcccatgaatctaaaattcatattgaatgcttcttg

SEQ ID NO: 13477 - DNA, 520 bp, Cannabis sativa
aattaataataaatattaaaaaaaaaaacgctatataggaagaattaatattaaaaaaaaaataataaaaaagctatataggaagaattaatattaaaaaataataataaaaaagctatataggaaaggaaaattaataattaatacttaaaaaataataaaaaaaaaagtagaaaaaattgagagaattaaagagaaaaaagaaaaatgtctttagagagattttagactgccacatcatcgtctcacacttctcatttatatatggctaattagtaattttccccctcgaactttgacatgtactaaatcgtgtcccttgaacttttttgatttaacaatctcaattgttcggggggaatttttaacggcaaaaaaagttcagaggcacgatttagtacatgtcaaagttcggagggaaaaattactaattagcctttatatatatactaggtgaatgttacgtgccgagccacatattgttagttttatttatagttttgatttttttttaagattt

SEQ ID NO: 13478 - DNA, 619 bp, Cannabis sativa
tgtcttgtcttggccagagtggctagacgggcgatatgagggtcagcagaaaggttttctaaaaatctgcttagttcgtgccatcattttacgaatggacgaagttttatcagaagagtgccttgcaatagtcacaacaaattcaacaatagaattttctatagtagctaagattggacagccctcgggcaaagtgtcaactacgctcagatggaccctatacgtctagctggcagtaagatagcgtctccaaccattcttaagttcccagatgaaacgactgtatccttcgccacagatttggtcgagattacgaatgatgttgcacctcgggttttagggaagatgtgtgttcactgcttacttcccaatctttgaaactagaatttgaaagattgtcactagacgaagatggactagcacaaggttgatctccatacaaaatttggagcaagtcttggtcaatatgatgcttgcatccttagaaatcactagggttcatctacaaaaggtgggagacaagagaataagagttggtcaggataacgaatgaaaataaattgtatatgccaactaggcctgattaagaattaaaagaaaagatttcacctagaaatgg

SEQ ID NO: 13479 - DNA, 510 bp, Cannabis sativa
atatatagataaaaaagaaaaagataaaagagttctttaaattgtttgtcacataagtatacataaaaatacatatttagtgtatcatgaccttgaaaaaaatcaagaactttaagaaaatatttactttagggcttggacagaaactcgtgctcagaacgtattataaaataatatgaaataatataaaatagataagaagaaaacaaaaaaaaatgaagatgaaaaaagatattaaataaaaatttgtcagttgtttatacctatgtaaccctattcttacaaatatatcttacctaatatataaaatgcctatctaactgattttgttgtgcacttaacaaattgttgtgtatttaacagaatataccaaaaaaaaaaaagttaactttaacagccacccattcaattcacaattgaacccattctatttacaaagattatacataccaaacaacgattcagaagatacccattcccacattaacacaggtcataaatcataaatag

SEQ ID NO: 13480 - DNA, 606 bp, Cannabis sativa
gaaccaattgtagtagaaaaagaattaaatatagaatgctggcaagagaagtgcaactgaagaaaactatatgtaaagaagaaattatttaaaatccctcacaagctttggatccgcaaaaaaaattgattagtgtgggtaatcgggtttccaaactctctctactctttttagatgaatttattgtgtttcacataatgagtagtgagcctagggccaaatactctatatttatataggtgagacatttcatcaaagtatctacctcaattgattgtcaaaatattttgacaattaataaaaaaatataatttatgtaactaaatcaaatcaaattggtaacaaaataatattgatcatatttagaatattttggcaattaaactaaatattgactttaataaatccaactataattaatataattaataattgtaatataaaaagagtttatcagcaacaaccatttttatatattttccttttatttttttatttttttaagctgctaaaaagaggacacatacatttctacatatatagagagatatatggactttgtttattgaaacagataactatgaaaggaatgccagtattttacgg

SEQ ID NO: 13481 - DNA, 609 bp, Cannabis sativa
  modified_base (482)..(490): a, c, t, g, unknown or other
aaaaaaaaaaaaaaagtgggaaaattttgatggtgcggtatcaaaggtaatagttcaaattaacaagagaaaattatatttatagcatgtgaattatgtatatactttaatcaaacaaacaaaaaagatacttgcattatatttaaaaaaaatgtagtagagaaaatttatttttttttatttatttatattttacgtaataaattaaaaaaaaaaactataaaattaccttttatatataatatataccaaataactaaatttaattctctaaaaataacccaaatttaaagtagagttattaactattgagtaatttgcggcataacttctataagtgtttagtttattgcaactaacccttaatttaaaattttagtggtaaaaccctctaaatttgtgttctattagcagtttaacaattccatccatttttagttattaactttcatattgaaatgtctacgtatacacagtgtacnnnnnnnnnttttattggtccatataaataattattttaaaaaaattgaaattaggaaaataaataaattttgaaataaaaaaatataaaacataattaaataaaaaactgaagaaaaaaaatcctaa

SEQ ID NO: 13482 - DNA, 660 bp, Cannabis sativa
aaactacatgtggatgggtcggtatcatttgtccggtgcaggaatcgcccttgtcacgcctggagggcaacacctgcacgctgtagttaagtttggattcagggcatccaataacgaagtcaaatatgaagctttgatcgttggcctaaaactagcccgggagatgaaagccgaatacatcgaaatctgcagtgattcacaactggtggtaaatcatgtatccggagaatatgaggctcgggaagaaaagatgatagcatatctgagcaaaatacatgacttgcttgcacaattcaaaatctacggtcttagacaaattccaaaggaagaaaacacgactgcagacgtgttagcttgactggcaagcagtaatgtaagtgataaagcaaacttggtccctatccagttcctcgaagaacctagcataactggcacagaagagatcgaaatgattgattcttccccaaactggatgaggccaatagcagcctacctcaacactggggaactcccaaataatcgaaatgaagctcgaaagatgaggaggaaggctgcacggtatatcatagaagagggaattatgtttagaagagggttctccatgctgttgctcaaatgtgttactcaagaaaaaggtgcacgacttttatctgaagtgca

SEQ ID NO: 13483 - DNA, 901 bp, Cannabis sativa
tgtgttcgaacgtttcattaagctgcaaccttcaacgtttttgggaggtactgatattataaaggttgagctgtggatgagcactattacccgcatcctagataacataagggtgatgggaacataacgagttgattgtgctacattcatgttacaagatcatgcccgcatttggtgggatattgtgggtcagacccgagacgttcgtaccatgtcttgggaagagtttaaaaccttgtttgaagaaatttattataacattgctgtaagaacttcacatatggaagattttgtgaagttgacccaagggaagaagacagtggctgagtataccctagaatttgaccgtctatctaagttctctggtgatctggtaccaacggatgtcacccaaaaacaaaagtatgtaaggggactaaatgacactatcagttgagacttgaaaattacaactgatcatgacacgttatacaagaaaaaatttgagttagccttgattgttaaagaggtgggacaacatgtaattaaagagcaagctgcaaaggatgttgtcatggcatctaatcctagtgtgggtggtagtatcagtaaggggactgacagtggcaacccagctcacaaacagaaggttgaagctttcgaagcaccaggaagtaatagaaagttttcgggaaaaagtggtggctatcaatgtcgcgggtctacatccagatcatatctagagtgtcccaaatgcaaaaagcaccatcagggtgagtgccgggctaagacatgtttccagtacagtatggtggaccactttatccaagattgtccacaggctaaaaaagacgaaccaaagaagaacaacaactggaatccggggcgtttgttcacaatgactcaggctgacgctaatgct

SEQ ID NO: 13484 - DNA, 503 bp, Cannabis sativa
tatgtactgtatgtactacacacacggattaattatgcatatatagtcaaatgcacttgcattatccctgaaagtcaaatcatttatatattaatttcagatatatatttatagggatatgattttgtcctgttattgtacttttgcaatccgtgatgtacggcagtcgtcagatgaagaaattatttgatctggcggctgagattgatttagggataattagggttaaaaagtaaaaacgtacttgacacttatttaatgtaccatgagaccaatctaatgtaccacggtatacattctgtgagagtatattacgagacaaaatcatatcccaatatttatatagatggaacttaatagttactttatgtgaacatcaattatatgtttagtgtaatcctgctgattataatggccaaataattggacgtggaccccaaaaaaaaaaaagtaaaaaaaagagagataaaaggaaaatcgtatgttgagaaagtgtcagacaa

SEQ ID NO: 13485 - DNA, 558 bp, Cannabis sativa
ctcatttttcttccttctggccgaggctttccgatgaaaatacttcgtattcaagtcaacccatttgagccacaatgcccgacttctctgccgccaatatttctcatccttctcaagcacaacatttaattgcttctctaatgttttcatctccccccatgtacttgagtcttgtcgagatgataattccgagagtgcctttttcaactttttcgttttctcttgtagtgtcttcttcttatttttattccaaccatgtagagccacccccactttccttgtcttcagtttaaaccccccgtagaagtcactacttcctcagtattccacaccctctccactatctcctcacattcaggctcttcacaccatgcttcctcaaagtggaagcgacttttccgtttcaccttaccacaccgttccctttcagtctctatcggcatatccacaaccaacggtctatgatccgattcccaccaatccaacaccaggacatcagctccagtaaaattccacaaccattcctcattgcacaatcccctatctaacctctccata

SEQ ID NO: 13486 - DNA, 736 bp, Cannabis sativa
ttattttaatgttatataaatattacttttgtaaaattaatatattatttttataaatttttataagtcataaacactaaatatatcagttttcataaacactaaatttttataaatttcatataaacaaaagtttggatatatcagtttttaaataatttaaacaaaattactttataactaaaagcatctccaaataggagtaatgtcaaaaaacacatcattttaaaatattttttttatttaatttctttatcattcacggttaaaatttagaataagatgaataagtttccatctcaaaatcaattggaagtaggatgaatagttcattcatcttatatatgacaatttatttccacacataaacaatgtgggactaattctaatatctacatgatttaataatttttcatacagaaatcactttagttgacagctccaaaagttatctactgttgagaatcatgaggttccatctcaaaactaattggcaatgagtggagtagtccatgttcttggctcaattctctaccatttattttatgtgggataatgtccacaagttatctaccatgtaccacatactatactatttaaatgattgaattttattaaatactatagaataataccataaagtaatttttttttatataataaaaaaataaagtaatacaacgtggttgttgccaaatatagacaataatattgttgtgatatgaagcaagagaga

SEQ ID NO: 13487 - DNA, 511 bp, Cannabis sativa
tatatatatatataaagaaatgatgttaaaaaggggtttcataaataacacaaaatttcaactcatgaatattgtcactctgcattcttcaaatattattttaataatttttctctcttttataattctttttcatttaattttctcaaatttttttggtttttataataaaatatattaaaaaatataatatttttaatgatatatagaaaaaataaagaacctaatatatgatataatgtaaaatgtaaaatgtgaaaaaggtatttaatttgcatctatttatcaattatcatctactttactgatttcacaataaaattgaataaaatgtgatgaaatgactatattactgtagaagttatattttatgaggtattattaacaagttatatagtataagacacaacttgatagtataaaatatttagaaataaaaatattaattatttattaaaatatagagtaattttttttttattaaaactataatgtaattactaatttatag

SEQ ID NO: 13488 - DNA, 500 bp, Cannabis sativa
tctgtggtatgatttcgaacgatcaagccaaagcccatcctattcgtttgtatattttgggcagcgtcaacattaagcttaagctggcctggaggtggtggttgccaatgggatgaggaacttctagcatcttgaagcttgtgtggtgttttcgttacattatgttgttgatattggagcagataatcttccatccattggatggtcatagaggtgtcttgttctggcttgtgatgtaatacttcaatcctgcaatgccaaattttccagagtaaacagacaaagaacttccaccacttttcttagttagttgtagtggagggtgagggctcaatttggtggtgaatgtcataagcatgatggtagccagaatttatagtgtatgttccatgtggagtgtgggaccaatagagtcgatcttgggcaggtggcctaaggattgggatggtttgaatagcttggcacacattgctcgggaaaagatattgaagctggatata

SEQ ID NO: 13489 - DNA, 555 bp, Cannabis sativa
aaggggcccctcgaggaatccaatgatcttcattgattcttatttgattaccatttgtcacacaccaccttgaaccatttactataagctcacggccccaaatgattcctctccaaatatttgagcaataactcctaaggccagcgattaagaaaccagaatttgggtagtagagggctttcagcacttgagcgaccaaactatcggggtaggtaacaagtttccacccttgcttagcaagtaaggcttggttaaaatcctccaaatctctgaatcccatacccccaggccacttatgtttgcaaagtttatcccagctgccctaatgaatttggtgtttatcttttgttgatccccaccagaatcgagcgataagactctgaatctcacggatcagcccctttgttaatttaaaacaactcattagatagaccggaatagcttgtattattgatttgattaacacctagcgacccgcttgagagaagagacccatcttccaaccttgaagtttctcccataccttattccgaatctgaccaaacacttctcttt

SEQ ID NO: 13490 - DNA, 598 bp, Cannabis sativa
ctattattatttagttgatttggttaatatagaaacattcatatatatatatatccttaattattatttcattggttcacctgactatacataaagtattaaaaaggattaaaatggaaaattagttcagggaaaagaaaatgggaagtcattctcttcagttccgcccagaccatcttttccggtgaaggtgaatgttagtgtattttttttttattattttattttgattcattcttatttcaatttattcaaagtttactacatttatattacttatagatcatagaaatatccaccatgaatatcatcgcataaaatcattgcagaacacattaatttcttaaaaatatttcaagaaaacaaaaagaaattttaaaatccgaatttgaagaacctgaaaaaaaaattgaacaaaaactaaaagataagaaacataataaaacccaaatttttgagccgaaagattgagttccctacggagagtactcctcctcctcttcttcttcctcgtcgttgctctcttctacgtcaattttctccgagtcagaaatcaacgcggctgagctacttgtccaactcagtggcgactcgcata

SEQ ID NO: 13491 - DNA, 681 bp, Cannabis sativa
caggaatgaagacacaaggcagcctcaaactagggaacaggaaacccccttaataaaaagagaaatcctaggactcaacctaggacaagtgggctaccaccgagacaccctcaacgtccttcttgatccgagagggaaggtgtatacacgtacctaaatagaggacttgtatctaacctctttcgaaggagaaggccagtacaagacgaggcaagttctagcttgggacactcaaggtcttgagaacacaattgatcaggaaggcaaacacaagaaggaaataggcctcaacgttatgctgatcaagaaagcatgagcaatacacaaagttatcaatttgagagttactcaaagacaagatttgtgagcaattatgagcgaagacagcctaacctttgtgaacatttgaatcaaagacaacctgatcttcacgagcgactaaatcagaatgcacctaatttacgccatcaacttaatgccaaccaacagcaagtggatcccatccagttgcgaatcattgagttggaagataagtttagaaaatatcaagacggggaacatgggaaattacttggctatgacacggatgaggaaaccaagccatttcatcccgatattctaaattttgaattcccctaaggattcaaaaatccacaagtctcgcagtatgatgggactacg

SEQ ID NO: 13492 - DNA, 589 bp, Cannabis sativa
gtattgttattgaacacaagtggtctatagtagtttttaagcatgttattttgtgattatattaatatttaattagatcaatagcatattaatacataaaagagtgctagacactgatacttttaggattatacggtccaatattataaatgagcataaattaacacaagaaagaaaataaacttaacataacaaactcaaaacccaacatataaacacaaataaatgaactcaaacacataagggattaaaattattataatttaataataaaataatacacatatatatttaaaggactttttttatttttacactttaaaataattattttttatatttttacgaaattctatatagaaactcttattacaactagcgctgcaacataaattgcaacaaaaaatcgtatagaaactcctactgcaactagtgctgcaaccactatagaaacacaaaccataaatttaaataaaagattaaaaaaatagtatatggagtaattctcttatatttaatagtaaatatataaattctaattatatttttttatatgattatgtgaaaaatataattgaaaaattatata

SEQ ID NO: 13493 - DNA, 581 bp, Cannabis sativa
tagaaacatcttcgcgagatcataacgcctacttgggcacccactagtgtcaaccagggcactaacacaatttccaattctcaagttgaccaccattagtcttagtggataggcccagggttgtttccttcttgccacgtgtcaaaaatatcgtgcatatcaaatttccatgtaaacacccaataaaataaaggtattttccactagtgttacccaagttcaagagcataatactaatggtaaaattttttacaatgcacccctaaaaggggtctactaatgtactccttatctgtatcgtcatctgagagaattttttagtctattttttttacggtcgtctacgttgtagttatttaggacatcttaaaaaatttgagaaattcaaaaaaacttaacatgcaaaaaacagggttcaaacacacgcgttaaagaataaagagtcgcgtgcaatagactatttgaatcctatttttggcatgctaaattttttaaaatctcttaaaattttacaaaatatcttaaacaaccaacgaaaaaaaattcaactaaaaaatactttcaaatagccaaaaacccaa

SEQ ID NO: 13494 - DNA, 571 bp, Cannabis sativa
gtaggcaatttcatatccaggaggcttcaattttctctggattggcttcgatacctcaggcattgacaataaaaccaagaacttacctgagctgactccaaaggagcactttaagggattgagtttcatgttgtattttctgaggactttgaagcattcgtccaggtcatctatatgcccttagccttcctggatttgacgagcatgtcatcaacgtatacctccatattttgttcgatctgatctttgaacattttgtttaccaatctttggtaggtagctccagcgttctttagaccaaacgacatgaccttataatagtatggacccatatctgttcgaaaacttgtatgctcttggtctagtggatgcattttcatttgattataccccgaataggcatccataaagcttaggatctcatgctcggctgttgcatccacgagctgatctattattggaagtggaaagcagtctttggggcacgccttgttgaggtcggtgaaatcgatacatactcgccattttttgttggccttgggtactagtagagctgtaaattcgtgctggc

SEQ ID NO: 13495 - DNA, 520 bp, Cannabis sativa
aattagtaattatctctctatatttcattaaacaatattcattaagttaacatattatgtaaaataactaaagtttagcttatttgatggaaacttacttttgcagtttttttctttataatttaaagattaaattattttaactcatttattaagagtgctctaaatttaatgaacctaatttttttaaaaaaaaagcaaaagtctaatatacatatgtaaataagaattaaaagttatactatactatcgttaaaaataatattatccagtgttaagaaaacttcaacagaccgaatagtattttttgacaacacccaatgaaaatattgtgagcaacaaaattaaaacgatgacgagtcttacacaaattacaactcaactcaaaaacaagttagtatattccttacaatgagtgacatagttcttctaaaaaaaaaaaaaatgagtgacatagttaatgaacctaccttagttttactttattatgtactttaccaaaagagattcatattgtgaa

SEQ ID NO: 13496 - DNA, 534 bp, Cannabis sativa
tggataagaaattcaagtgtttgacaaaggtttttacactttgacaatattttttttttttttttttttttttgataaatcagaagacaaactgaatcaggtaactctttaattctagtacaagacaaatccaagtaccttaaatgttgtagattgccaattgattcaggaagctcattgatcaaagattcacttaaagaaagtactcttaagcaacatattgtacttgacaaagtttcttaagtagtatagttggaatggcaatgctacagttgtgcttcgggtagtaacaataattcttcaaactgtcccaaagtgaataaggctcgttccaaacagaaatttttttcccttcaattcttccttcaacctcctctgaatttcatttgagttatcaataccgcatttgttggaagtgactccctcaaagatcactttcgttatcttcgaaatatcaaactcgtctcatacagtactcgattatcatcataaacaagttgagcaagattcacccacacaacccatcccaacatg

SEQ ID NO: 13497 - DNA, 528 bp, Cannabis sativa
taaaatacaatcgaatattcataggttatataagtatatttgaaattgttggatagtagtagtataaagctggtgtttactgattttttcttttagattgagttatgatcttttttatttggtttaggtaacattctaattattgatacatgccgtatagacaatgaattttggggtcctctatactagtactctgttttcgagaaagacaagctcatactcttatcatggtcttgcgaagtgtcaagatggccacaagattggccaaaaccggcaaggattggggctatgtctataaggtgacggtgtattttttttattatctcattaattactcttgattcaaatgtctttgatttccaacttcaataataaacccttccataaattttaccttatttttttttcaatttcatttaggaatattattaattgtatgtaatactttatgaagacggaatttagaaaatgtataattagtacctaaattgggactaatttttattttttgtaacaaattaaaaatta

SEQ ID NO: 13498 - DNA, 821 bp, Cannabis sativa
aaaaaaaacatatgaattacaagcagccacacccaaatcgaaactcctaccgccatcaaaaagagatggatcaacattaaccttaatactattagcttgaggtaaagtccaatgctcattaacatcactagtctgaagaataggccatgacgaatccacaaaattttgagcacttttccattgatcaaggtagagaaacacgaacgcaacaatgccattaagaaggaaggcttttcttttccaaaccaagttattttgggctccttatacaacccaacaaacagctgctactttgcaattagttgttgcaggattgttgcagaagacattcgaacaccaattaaggaagcttgtaccctgaacttgcactgttctgatgcccactctgtcccagcatttcttagtctcacggtaggaaattagcacatggaaaatggactcgccctcctcattgcagatagggcatagcgaaccaacaaccacatgttttgtccgaagttaaaccatcattggtagacaatccatacacacacaccaaaccaaattttggatcttcgatggcagcttcaatctccacaacgtgggccaaaaagagttatcagatgcttcaaaccagtaaccttggttttctgcaacagggcatatgcacttttgacagaataaaaactggagttcttatttctccaaaccaaatgatcttccacttctgagacattaagaggaatattttcaataagctttctatctctgtcattaaaaaagatcattcaaaatctcattgtcccaagcaagctcacctcgtctcatcaagttgtttaccc

SEQ ID NO: 13499 - DNA, 679 bp, Cannabis sativa
ggtttgggtctttggaggtttgaaaatataagtcgtgtattgttgtctaaattggcttggagtcttgcggaaactgtgggtaagttatttgctaagtattgttattttgaaaacttctgggctgttaaaccaaaaaattgtgactctgctttgtggaaagggattttgggtgttcgagatattgtgtgcaaggggtccatatcgctagcggcttcaagagagtccattaatttctggcgacaaccatggatcccttggcttaatttccttgagtttaagggattaatggaggatttgagatcaaatagatataccattaaaagcatcgcggatatctccttaagtcatacctgagatgcaaatgtgattcatcaaatgttcggggagcagttgagggcaaggattgttaaatcccgagaatcccatacccacatccagatcagctggtttggaaagtgaagtcgaatggaatttttactgtaaaggaaggctatttagcggatcaggctcacaggtttggcgaaagaaaagatgtctgggattggatttggaaactgggtatccaccctagaatctctttgatgatgtggtgggttcttaacgatgctattcctaccctctcaaagcttcctttcgtgatagagaagagttgtgctttgtgtaatggtgagatggagac

SEQ ID NO: 13500 - DNA, 632 bp, Cannabis sativa
ttgtaaatatatcacatcatttttggttatctttctatgtaggtatgggactatataattaaagaggacttaaataaattgatcagtactgctatcttgttttctggtagcccatcacaaaagaactcacagtttcaaaatgggtaaccttttaggaaatttttctaagaagcgtacgagtgttattatgactatttttaggttaatattagtatatttttaatttaattttactcttgtttggagtaattttatgcgttttattttttatttttgcagatttaaaatagaaaaaaaaattatagcaaatgacactaaatcataagactatgttagtaaatatcatcatttcaaaacttgtagagaaatgaccattttaaactatttattatttatattgtcttttgtcacataaaaaaatcattattttttttttagaattagaagcaaattatttaaagattatagtatatatgtctacattagttttgttaaaatcttttttatttaaaagttatgtcgatttttttaatttttgatgagttattgtgggttgttggtatatagattttgttgtacggtatatttctattttgtagtaaggtatagttagaaatattttaccaggatct

SEQ ID NO: 13501 - DNA, 781 bp, Cannabis sativa
tttgggtacatctcctatacatttcaccatccaaaagagtttttagtttaaatcttattttttatattttttatggttaaatgtagttatttagaatcttttctaaaaatttaaaaaattatgaataatttacaatatttaaaataaaatttaaatattttatttttttatttagactaatttgtagtataaatatttaattttaacttatagttataaataaataaataaatttaatttttgacggcaattatatttctaaaacctcattgttaaatattaagtaaattgtcacatgacaatttttaattggtccaggtcataaatgtttatttttttaaaaaaataatttaaatatactaataaaaaaatgacacatgaataatgacttaacatttaacaataatgtacctaagtattattaatttaaaaattaatataaatataccaatataatttaaatattattaaccttaaaaaataaatttaaatatttatttaaataagaattaaacttaagtattttttccgtaaattactcttttacttattataatttttgtttaaaataagtgcaaattgatgagtgctatatactttttttcaataaaagaattacgcaatcaaattgacgagttataaaagagcatgattgtttgttaccatgttttgaagggcgattgcttaaagacgagtttatcaacattcaccatctctgctacatcaaagggtatagggctttaatagtaaatttataatagtgtctaatttaatataaatt

SEQ ID NO: 13502 - DNA, 512 bp, Cannabis sativa
agggtaactctagctaatacttgtcagtggtgttccaggaaattgcagtctaatagctctgcaggatgaaagattgaaccatgtagggtagaagtataagaatacacacaaaatcaattttagctggtattggttatttttgttgagaagtcttttgctactttaaaaagaaaattttgaaaattaaaatgaacttctgaatctacaggatgcttattaggtagatacagtcttaatgaccaacttttttctcttcgtgtaagttgctgtaataaataacttgtatatgcatcaatgtggtgataaatataaaggataactcatgtatatatcttgaagatgtaagtagcatgtgcatgccttttttttttttttttgaaaactgtgcatgagtgcatgactatcttgattgttgccttctgagctctttactgaagtttcttctttcctcccaggcttggatggcttattcgatttatcagtcactctgtcatatctggattcactactgc

SEQ ID NO: 13503 - DNA, 508 bp, Cannabis sativa
ccctactctttgcaaacccccctttttttctattttaaaatgaatgtctgtgattggtcagcaatatttaataaagagcattgctattaggcaccagtagtgcctaataccttctcgacatgtcacgttacggttggctagcgatactcactaaaagttattatattaaattatatgggactcgatatttagttagaccaatagcgatattaatacataggagggtgctagacaccactgatgccctttatcatttctctttaataaaagttatattaaaatgtataagactcgatatttaattgcattaataacgatattataggttgaaggggcgctagacattctcttttagtattcctctatatttaaatggagaaatgacaaaatgcaccagtagtatttaacaccctttgttattaatacaattaaatattaaatcttatataatttaatataataacttgagaagaattgctaacaaaaaagacatatttagaatgtggta

SEQ ID NO: 13504 - DNA, 735 bp, Cannabis sativa
tttttttcatgtccatcttctttttttcttaagtaactaggaaacaaaccgcgcttcgcgtgcgattgttttttatttagtaatagttaaggagagaacatatattactcattagagagattttagagtgccacatcaccgcctcatacttttcctttatatatatagattattataaagataattatgcctctatattttagttaaaattttttatatatagtattttttttcccttaataattatgagttttttatattaacataatgttattttataatattaaatttaaaaatgttagatgtaattttttattaaaaatggagtgctcatatacttcgtaatatgttattctaagctttaattaattcaaatcaaaccatttgagattggaataaataaattcggtgtgaatgatttggtcagactatttaaaattttctagtatatttaaaaaaaactcagccttttttttaaacatcaacctaaattcatttacctatttatttatcgtaaacttaatttttctttgctgtataaaatgtattggttacttatttaaaataaatttagattctagaaattttttaattatgaaatattataataattattatattagcccacaaaattagttggtatagttttgttcaaatttaaaatttagttacttcttccttaataattgataaaaataaaggaaaatattatttttatcttatttatttttttta

SEQ ID NO: 13505 - DNA, 560 bp, Cannabis sativa
gaaatcggcaaaccagttattggtgagcctcacttgacattgagagatgatattgaggtggccaagcttagagaagctgtaggcaaggtcactcaaataggacgagaagaaccacacactactggttgcgatgctttcgcctagtagagacgcaaattcaaaagaggacaaaaagaaccatgcgctgctggttgcgatgctttcacccagcagagacgtgaattcttaaattggaggatgaccaggagtacatcctctgagcctgcaaggcaaaattaaatcactgcaatagggaggctaatgacatgatggggtagttaaatgagagaactgatcctttgggagaaaggctgatagacctatcaggcaaggtctacaagcatgtagaccataggcaaacagtccaaccaagttcctcaaacacaaggacaaaacctttcctccttgacaatggtcaaatctttttggaaagaccgtatggcacaaacaaatagttcttggcactaggaggcatttgagaacgataaagcaaccttaaagagggtgtgctacattctggc

SEQ ID NO: 13506 - DNA, 564 bp, Cannabis sativa
tatttgatatttagtccacaatatccatatatatattcttcttatcattatcaatttataataataataattaataatacaatagtgacattatttatttcttagtccattaacttcaccatatatttcgttacatgattctccttcttttgcgtaaacacattttatattacaaaaatagttgtattgtaattaagatttttattttctaaattaattttaataattatccattaaaaaaactttaatatttattaaattatattctttgaattttttaatttgttaaaaaattttcataaaaacttcaactattaaaattgttagatttaaagatttctgtttaatttcattcaattttactaatgtgtcgattgtctatgtactaaatcatgttttccgaactttaatatctactaaatcatattccctgaactttaacatatactaaattatgccccttaaattttcatcaacgttgaactttctttaataaaattagacaaaagtccttaaatctaacaatctcaaagttcgaaaaattttcaacaatctaaaaaattt

SEQ ID NO: 13507 - DNA, 588 bp, Cannabis sativa
gagcaacacactgagagctcaccttgtttgtttctttagatcttttctcagggacgatgtcgtagatccgcaagaatgataatcggaaggtagtgacaatggtgagcttgcttccagcaacaaaatgagcttgcctcactcatacggagggctttcaaacagtagggttcactcattaatgttacatgagagagtcagttagtttctattagttagttttgtttagttaattttcaatgtaactaactattacttgtaactaatttactaatcatctggccaatttagcaagctgatgttgaccacttaattttcatcgttaacagttgcaatacaaataagatagattataaaatcaacaaaatttatgtgttaataaaaaaatataacaaatatgattattaatattataaaaaatattatttgaacaaacattagcaagttattttaatttcttttttaaaagttaattttattgttattattatataatataaaagtaaatactatcacacgagcatattatttatctgttcttttttttttggaaagaaaagacgttcattaacaactaaaattggacttcac

SEQ ID NO: 13508 - DNA, 676 bp, Cannabis sativa
tttatttggttgtctttcaatgtttctttcttgtattaaactaatagctactcataactcccactcaactgtaggtgtctggtctatgtatactgaagcatacatgagacctctccctactgataccaaaagacttcctttatatttagccattagaaaaatacttcaacatcttacaaaaataagttgcttgtactagagtaagtaaattaccaggtgtaccacatgccacaggtttagatgatctcaaacctatggtactataatcggggagttttgttaagtccattgaatagacttattatcaaaatttctcttcttctccttgtaaaaaaaaacttttggttgctccatatgaatgattttaacaatagttctattggctttacttcttagttccttattcttacaatccattacttgttgaaactaataatgaatttttttcataagtgtcttccaagtcataacagggtggtttccttgaaatcctcccactacaacaagataccatgactttctgtctaggaacattagtggtcttaacctcatcggctgtgtcaatacaatagaggtagtgggaccatcttatatagaataagatgataaaaaaactttgaaattgaataaaaaaatatcttctcttttttgctactttgttttcaagtttagtcat

SEQ ID NO: 13509 - DNA, 506 bp, Cannabis sativa
ttttttaaatattacccgttcatgcctaatacccattaagaatatacatacacttatatatggggtactcttcctttaaatttaatgagctacatttgtagtatgactagtttactcttattttaatattttattttatattatcttaaatactatatgatttaatgaataaaaaatcaatacgattgaatttttatttttattttaatattttagcatattaggaatatgctcccatacttagtcagaggtctagagttcgtctccccatatcctcaaaattatggtacattttctaaataaaaataaaagataaagataaattattaggggtattatttgttgaatatatagtaactttctttattaagggtcattaaattattcaaaataataataataataatataaagagaattaattaattattggtgttaaacatacagtgacacataataaaaaaaatgtcggtaagtacagacattttttatgactctacctaagca

SEQ ID NO: 13510 - DNA, 522 bp, Cannabis sativa
ataacaaagcagcacaacatatagctgctaactctattttttatgaaagaaccaagcacattgaaatagattgtcacttggttcgggaaaaggtgcattagggagttataaagacttgtcatgtttcatctgaagatcaattagctgatgtttttactaaagcactcttccctactcaatttaataatttcaaagacaagatgggattgatgagcattatctctccatcttgagggggaatatcaagagttagtttgtagttagggacatttgttttagttagttgtgctgactggtttagctcagctagttggtcagaccaataattgttttcaattactaattatgtacttgagcttgagctatataaggctcactcacttgtaattacaattcattcaatacaatcatttcattgctttcatttctggtttagtgtttattgttctattttgtaataaggacctccagtgaaggatcatgcatggacgaatcacaaaaaataagagaaggcttagaagt

SEQ ID NO: 13511 - DNA, 500 bp, Cannabis sativa
tagatcggaaaattagacctcacgtattaatgagtgacatagtagtaattaaaaaatgtggtatttattatggactaaaatttagtcgtcaccaattctagatgactatgtcgagtggagacaggaaaatggttaagacaagacagtctctttggatgttgtttgcttctcttttcttttgttactttagtttttttttcttttagccttctcttgttgttttgttagatggttgttctgtgcgttgagtgttttgtactggtcattttttaagtaatgaattttgggtgctttggcaccctcccctttatcaaaaaaaaaaaaaagaaaaaaatagtctgtactattttttaacacatatattttatattattattggagttaaattttaacataatattttaaaaatcacaatacactatattatatttatagttttctattaaagatgctcttattgtgctaaatttatagcacacatgtaaattaatgcaataatt

SEQ ID NO: 13512 - DNA, 687 bp, Cannabis sativa
ctcccctgcgtcccacgtaaagattggatctttgcaagcgtctagtccgagtaacggtcttgcttagccggttgtatgaactgaaggatcacttgctttctacataaaagagtgttctcatccaaataaaactaatcataaatctctttcaaaaatggattaagcagaacgaactatgactgaaccactataattttttctccctctctctgtatattcactatttttattttattactccttatgttgttttgagtattcgccactctaggtgaatactcacatgttgatcgtgggtattccagctttgcttgaatacttgcgatttttagtgttgtttaaattcttttgacaacacctgtattttttgaaatggtacaaaataatactatgaatttaattttcatcaaaataaaacttaattatacctaacttaaaactatatgacaaggttacattttttacatttgttcgtgctagaaactacttttcgattgattttgtttaaaaaaaaaaagacaaaaaataaagcttatgacaccactttagaaaatacaatgtccaagttttatttaataaagaagtatccaatcgataaattgtacaaaatataaaatccaaaatggtattcaacattttataatctaaaaaaatattctcgagggctgaattgcacagaataaaact

SEQ ID NO: 13513 - DNA, 524 bp, Cannabis sativa
tgtgtttggacctacttgttaaccgctaaggatgagtgcttggaatagtttagaaattggaaaactcaggtggaaaaccaaacagatcttaaaattaagaaccttaggacagataatggtttggagtttgttaactccaagtttgacaagttatgtcaagagagtggaatcactaggcataaaaccgtagtgaagatcctagagcaaaatggtgttgctaaaagaatgaaccgaaccctattgaacaaagttagatgtttactgttcagtttcagattagaaaaactattttgggaggaagccttagcaactgcaacctaccttataaacatgagcccgaatagagtgatagaactaaaaacaccttatgaaatgtggtacagcaaaactcacaatctaacacacttaataatatttgggtgtacatcatatatacaataatctattgacatgttagaacctagatctgtgaaggaaactttcttaggttattccttagccaagaggtataaaatatacatttt

SEQ ID NO: 13514 - DNA, 510 bp, Cannabis sativa
aataataataataattcaagttaaattattttcgaaaatcctccctttaaaatgaataaattaatgcacatttatctgttttagcacccaaaataatttttagtcaaattttttctcaaaattatgtacatccggtaaaattttaagaaattttgaaaagtttaatatactaaaaactactttcaaatagtatattgtacgcgtgactatttattttatacgcgtgtaaaataaactgtttgaacattgttttttatattataaattattcagaatttctcaaaattttataagttatcttaaatagctataacgtatatgaatatgaaaaaaaaaaattaaactaaattttttttctagatgttgaaacaaatcaagggtttatcagtacatattgtagaattttcttaaagtatttaccataacaaatatttttagtgagttttttattttgagggtatttaacaagagcatttagcaaatatattttttgaaaatggatagtttatt

SEQ ID NO: 13515 - DNA, 510 bp, Cannabis sativa
  modified_base (181)..(183): a, c, t, g, unknown or other
ttaagaataggtcaataatttattctagaaaaaaggtcaatagaaactgattttaaataagctttctgatatgcttattcatcatttggtactagtgtcatatatatatatgggacaattatataaagcactatttttcgtaaaatttttacatttttacatttaattttttttatatatnnntacggttttctatagaaataacacaaaaataacaagaaaactacataaaagtaacagaaaaataatatcaaatcagcaacaaaaaataacatatagataataaaaaaattaacaataaattaataagagtacaacataaagagaccatattttctgtaaataaaatcataaaaatcgtaaaaatgtttaaaattccgtacgatcgtatttttgtaattttttttgttgtttttgtgtatttgtgaaataatccctatatatatttaaattatttagttttaatgattggtcccattttaaaaataaaatttcatttttcacttaaag

SEQ ID NO: 13516 - DNA, 501 bp, Cannabis sativa
tttggtactagtgaaattgaatactgtaggtaagcattactatttgttatatttactcatgtactatttgttttgtttcaatgtcggtgaagctataattttgtgaagtgagcaaaaaacttttgatacgtgtcaattttaagaactaaaaacaaaactgttaaattgggtactcacggactaactaaaatctcgagtttggggactattactgcagtttttttgagattgaggacttcttacatcaaagtaaactttttggggacttatgctgtaatttaatattaacacgttgtattttttagagcaactaacaaatctgttaaaatgaggaccaactaacttacaagaatctcaagcttggggactattatcacaaattttcgaggttaaaaatttatctgcatcaaaataaattttttgggaacctacattgtaattttcccataagaaaataatttttactacgttaatgatggtaaatgtataagatcggaagag

SEQ ID NO: 13517 - DNA, 532 bp, Cannabis sativa
tggctggccaacatgtgcagacagcaccgtacaggctgcatgaattgccggatccacaacgacccttctagaattctcaagttgaactacaatttcgagacagatccaaccgcccatgaagatagagatattcgctctagatattaatcctatattctaaagattttacttatccttttttgtattttaaataaaagatagaaaagattgttaatatttttattttaaagttatatcttttcctatttgtattaggatatcttgttagtcttatagggcattagttattttcatgtgattatcttgttgttttcttgtgtttttatattaagaaaaaatgaacgtaaaaatataaaataaaaaaattgaacgtaaaaatataaaaattagtgttttatgtaattatgcctatgcctaagcctaatcaattacaagaatacccaatcaattaaactcaattcatttttgccatgcaattatatttctatataactacaaatcgaaatccacctaccaagaatataagacaagc

SEQ ID NO: 13518 - DNA, 538 bp, Cannabis sativa
aatataaatttaggcataacacggaatcagtaaggcaagccttatgcctagggcccacctacctaactcaggagcccaaaaataatttgtccccttttaaacttatacattttcttttactgattttgaaatatactatatttttctctaaataatagtccaaattataataatcataattatttttctatatgattgtacgtaattattattgaaaaaaaatatataaaaactataaaatacacatatttttattttaatttttactttcttttattattctttaatttatactcagatttataagttatattctcattatgtgagttagagactctaattttgataagttatgtgaaattatatttgatattttgattataaaaaaagagtatttatcaattaaaattattttacagttatattttattattgtgtaataaaaaaggatagttctcaacttatccttttcaggttttcaggttcgggttttagaatcttgggaccgaacccgcccatatgtagactgggttttttg

SEQ ID NO: 13519 - DNA, 578 bp, Cannabis sativa
aaacaagtttgttatggctgtgagtaaatagttcaactatatttctgttgtaacttttagatataagatcactgaccattcttacacataattaataatgtttattcttatttaaattagttgagcaattcattttccattattcattttcttttcaaattcctctctctctttatatatatattatggtcaagttaaaaactctaacttttgaagttcttgtatggtatcagagacagtctacatgacctaatctctgggtttcacaaatcctcattatccaaatcatgcatgcaaactcaacaaaatgatatatagtctctagcaagctcctcaagactggttttacacacttaaaatactctactgcaatggagattcagaaactcaaggtcagatactattcttttctacatacagaaacacaattctctattactattattagtgtacgttgacgatatcttcatcacatgtactgacacaacataaattcagaccattatcagtgcattacaatctcaatttgtactaaaacaacttggatcagtgaattattttcttagttttgaggtcat

SEQ ID NO: 13520 - DNA, 509 bp, Cannabis sativa
  modified_base (458)..(458): a, c, t, g, unknown or other
tttattacagtatactaatatagaattggaaaaaaaattgtataatttaatttaattataatatatattaaaattaatatgtagaaaatattcttttataatttttattaattcatttattatatataactattttattaatttcttttaaaacaatatttattaatttagttttcaaaaccattttgtttctcatttaaatgaatctggaaattttatttacaccacaaaattttttaaagacaccacattttaataataattattttatataaaatttatatatttaaatgtactaagtttttttaactttttttcttccaatttatatttttaaaaaataaacctattaaacaaaagtaaattatattttaaatattagataaaaaaaatgaaaataaaaaattatatgaaattttttagcaaaaaaaataatatatatatatacatgagttagnaaaaattatgaaaataaaatcaaataagttgaaattaacataaaataatgt

SEQ ID NO: 13521 - DNA, 533 bp, Cannabis sativa
aacttgcaatataccattcataatttcaacaatgcattcctacaccaaatcagataacaaatagaccaatataacatcaaatctttagttaatcatggtagcaaaatatgcctatttcagtactaattaatgcctaaaatagaggtaaaaattatgcatcagttagatgggttcaactaggtcttacttttccacgtaagatctagcgtactaaattttaaagttttccactaattaacattcaatcaacatttcatcacatctaattgaaaaaagacaagatttcttaatcatagcaaatcaaagcactagttcatacaagggttcataaccacccaaatctcaaagattttagttcataactgaaattaagaacttaaaaccagaaaataacaagttcattatgctaaggagaataacaagagtagaaaatgatagaaaacggaacaggagagcaagagaaatgagttgttaagctcaaatcttctctttagaggttgccttcttccccttcttcttaatcttcttcttct

SEQ ID NO: 13522 - DNA, 535 bp, Cannabis sativa
aaactagcgagattaaactattaacgaaaaatgttcatatcttgagaaataccaaatacaaaatgattaaaacaagacgatatatgtgaattaagctagggacaggtaactatgatagggggccatggctccagtatattatttttagaacatatataatgcacaactcaatatctctgcccctcttacttttagatataacatattcataagtaatatatacgaaaattattgagagtgaaaattaaaaaattttaatgagatttcatacgtatacaagtgaataatgagtgtgggtctcattaaatataaataaagaataaatatatataattagtatagcaatttaatatacaaaaggatctaataagaaatttaaagataaataataaaatataagttgatgaataaaaacatctcaataattttctctatactactatgaatgtgtgttttactaaagtaatgtaatttgttggtttatatgttctttctattaattataaaaaagtaaagtaatgtaatttgttggttt

SEQ ID NO: 13523 - DNA, 662 bp, Cannabis sativa
cacaataccaaaattttatgtttccacaacaattttaccattttgttttacccatgaataaacgttcaaaatatgtatatatttattgctaaaaaaaaaaatatgttgtatatagttatgtttcaactatattattagggtaaatactatttttattatttgttttataaaaattattaactgaaccttctactttgttaaataataaaatagactgtatatttttttaatattatataaataagaccttgaattaatttttttcaaaataaaatttaataataatgtgatttatagatgttatgacaaaactgattacattttttgtatctattcatgttagaaattatattaaagttagttatattaaaaaataaaatttttaaaaattaagctcatggacctatttttatttagaaaatacaaaatttattttatcatttaataaaatataaggtcaaattaataatttttacaaagaacatcattcaaaatggtattgactcgttttactataactattttacctgtagtaaatataaattattataactattttacctgtagtaaatataaattattataattattttcatgattatagtaattatgtattttgttaaaaaataattaataaaagcagtgtacacactgtacagatt

SEQ ID NO: 13524 - DNA, 536 bp, Cannabis sativa
gtaatcatataattataatcattttattcaatcatattttaccccaccaactttaatattcaaagtacaattttataagataacttgtaagaataaaaaagaaaattttttacacccagttttatttgggtaaatatgtagcatgaaaatggaatgagtaaattatagagaaattactttatatattatttttttaatttttttttttcaaaattaataatttggatttttaaagtggttgcagcgttagttgtaataagagtttttatacaactttttgttgcgatttaggttgcagcgctagttgcaataggagtttctatgcagaattccgtaaaaatgtaaaaagaaaaaactgttttaaattgtaaaaatgaaaaagcccctaacttattttcatggatgtataataatagtgaaaagacaatttataattagctaaaactacattgtgggtcccgaattccaacccaagccagtgtattataatttgaattagtattatgtggtccacttctcatctagacattgcaagt

SEQ ID NO: 13525 - DNA, 545 bp, Cannabis sativa
taccaaggtttgtgaaattgtttccaactatttagtatatattagctctataagttttattttacacatatttacctctttctggtttcagataaaaataaatttaagctgtttgtattgtgtgaagacaatgataatgttttattaattgttgtatgtctattagatttcagtagatgtacaaaatgaaaaggaaagatggattaactgtttagaatatagctctgtaagtttttggtttcagatacaaaaaatttagctgttttagaatgatgtgaaattaattctgtaaatgttaggatgaattgtgattattgtttgcttgtctggtatgatagcccatttgtttagccttatggcataattgtgttcccaaaaatgcatcctttgcacatcaaagatatgttttactctgttttagaaactttcactcaagataagataatgtttttaaagacattgattaaattaattaattgttgtatgtctattagatttcagtagctgtacaaaacttcgcggtagaagagtttatgaactttatg

SEQ ID NO: 13526 - DNA, 638 bp, Cannabis sativa
  modified_base (343)..(347): a, c, t, g, unknown or other
tacgagttcacttagaataattaatattttttgttttgacactatttcattttacccctttaaatataaaacttattaaaaaattttcttaaaatataacagttatactcctcttgttaaattctatttcttttacaattaaaaattaatattttacccctaaattttgaccaatacaaaatctttccctttaattttaaaaattataatattctatttttttaaaacaattataatattctattaattaaaaaaaattaataaaattattaaaaaatcggataaaaatattaattttacttaataaaacttaaattattttttaaaaaaaatattttcaaannnnnttttatttataaacacgtatcttcgaaaattaaactaaaattattgagaatctaataaataattaaaataaattaaatttttttaaaagaaaaaaatcaaacttatttatatttataaattcatatcttaataaataattaaaaattcaataaaaatataaaattattttaggaaaaaagttataaattaaactaaaaaaaattatgtttacttaaacaactctacattttttgataaaaacaaaatacactcaagtttgttcccgaaaaatttagtttttacaaaaatta

SEQ ID NO: 13527 - DNA, 509 bp, Cannabis sativa
tgagtaatacgattggatgagagaaaggatggactcagaatcttgaaaaacagttccatcctcagaagtgagggaatcaattcgattacttctcttcctgttagaagcaaacttatggaaaaaacgagtgttcttatcccccaaatggagccattgtattcgagatcgttgcctccaataagtttcctcttttagcaagagagagtcaaggtttgcttggagagccttttgtcgagaataggaatctgaagacgtgtcttcagccttcctagcctgttcaagggcttgttgagcttgcttaatccttttctgaaacccaaagaaggctttgtgtttccaatttgaaagaaaggtagaacaagtggattgctttcgcagaagagttgaggaagggtcatcactaggaaagttagaagaccaagcttctaaaatgacatcgttccaaacattttcgaaaagaaagcgtttatcttttttcctgggaaattgagaatgagggtttggattga

SEQ ID NO: 13528 - DNA, 572 bp, Cannabis sativa
tatactaacctattttataatttgtggtgtaatgttacaatgtaaaaaatttatgtcacgtttacaacacagtattaagaatcgaaataaaataatgaaaaaaatataacagaataaataaaaaataatcgaaatcaatatgtgtaatatgttatttactaaaaattcttggaaatagagtgatagtgatttatcttgtttactttattacaaaaagtaattagagtgcttaaattgattaaattacctttttgagttaaactatattatatggtagttattttgtaagacatattttaaaggataaaattttcattataaatttaatattgaaaaataaaataaaaataaataaaatctattactctcaatgacattttttagaaaattgttaagggaagttctcgctttcttttctctcttgttaaatcaagttattcttttcttaaatttaataaattaaataaacaaatgtaaggaaataactcttttaccattgattcccattgtttattaataaacatgccgtttctgaaaacattcacaacgaccctctctctcacacacatatg

SEQ ID NO: 13529 - DNA, 914 bp, Cannabis sativa
tgcagcttctgctcacaccagttggagactacaaagcatctgttcttcacctgcttattttcccttgagtgcttacagaaaatcaaagattggctgaattgggggggctcgaaccaatgagctaacatagctgttaaaatggattcacaaagcaaaaatcagcaagtttaagaagcaagttttggcagcagcaacaacaagcttagtctactcgatttggtttgctagaaatgaaaaattgtggaataatcaagtagaaaacattgatgtaactgtacagaaagttaaacatagtgttaaacatagaatagagttgttttggcctaaaaaggtaggacaacaagatagagattggtttcacatgttgtgaatcccctttactgttttcatgagatcttttgattaaaagatgctcagataattgtatttgattgtacatgattgtggaatatcaataaacttgctgatttatcaaaaaaaaaaattatgtaaggattccgaatatgaaaatcctcaccatcaaacaagctctaaaatgttatttgtttagtagtttgattttgtggaaccaaagttgcctcttatttaaatattatctatgtaattaagtcatcattgatgcctcgcagagtttttttttttttttttttctaaatactttgatataatagtagagtgatactcaaaattctagaaaagaaattgtttaaagtaaccaaatcaaaaaaagaaaaaaagagaattaaaatagtcacatatttttacacaaatgctaaagaaaattattcattcttaacagtaagatgatatatagtttaagcataagtatatttgttgaaatatacagccccaactaaaaaataaaagacataacaagagatacatgagatatgttaccaagagtaaatctataa

SEQ ID NO: 13530 - DNA, 562 bp, Cannabis sativa
acaaatatttcattcttgccaatctagcaagttggtgtggcttagaaatctctgtctaaattactgagtcaacattatttaataaatttttttattgaaaaatacttaacaaaaaaatacattttttttttatgttttctttacagtttaacaaattttaaaattatttaataattttttattgaaaatatatgagtggaccattaatatgccgacacgtgtcaacttagtctattttaatagaatttaacgaactggtaatgccaaaagtatcgtaacgtaattttaggtatttaatccgctaaaagaaaaaatatgtggtatataaatgcataaaatctaaaatatcaagtatttatgtgcaaatacccctatgttagaatagaatttaaaagaaaaataataacagaagtaacagaaatataatttaaagaattaaatccgttgaaaaaaaaaatgtcatatttaattgtataaaacttgtactaaaaaaaagtgtataaaactaaaaacttacgtatttatgccgcaaatattttaggataaatacatattttccaaa

SEQ ID NO: 13531 - DNA, 672 bp, Cannabis sativa
caaggcttagtcgcccatgactccccggttggttgatgtttctagtgtgttgaaaggaggtagatcacaccagttgttggagttaggtagacctagatacctgaagtgattagtctcacttctcaagttgttattttgggtgtttccacctatttacagtcctagctggttgaagattggcctttgggtggctcactcccctcaaggagggaatgcagtcccatggctagcctaaggtgcaccaataggtggttggccagccaaaggttggtcgatggggctgttattgagcctaagatccctggtcggccccctagattgctagttgctaagatatggctattctttccattagaccttcgtggcaaggcctgtcctcctttgggtagggaaaggtgtgtcctggttcctgaaaaacctggtaggtcagcatgctgataaaccctccccgatctgtcaactagtcttccttagagtggatctttgatgagattctagtctcttccagtcgttctttaattgaactgccttatcatatcatttgcttctccattacgatgattcagctccgctaggtgagatcagaggatgtcctcttggtcatccatctatcttaggaattcgcgtctctgttgagagaatacatcgtaatcagcaacacatggttcttca

SEQ ID NO: 13532 - DNA, 511 bp, Cannabis sativa
aatgaagctatgcttcaattacagaaggcacgcatctctctcactctcagttttggtttctctctttctttctcttaatctatctcagtagcacacattgagtttctggatgttgagctcgattagagaggatccctttcatagaacttggacaaagggagttgatgtcataactgtcataacaaaatgtttgttatgacagttatgacatgtccgagcttagtatttcgcaaggttcaattaatatggacaattcaaatgtgaggccaaaaaaataatataacaataagattttcagtgatacctaacaacatttagaggtatcgtcatgtaaacgattagtcatattttatataataattatcaaattactttatgtgggaatacttaattataataatttaatatgacacatataggttgtactatccaccatgagtgcctttaacattttttcttatagataatattgtatattatataataaaaaataaaattatatattaccatc

SEQ ID NO: 13533 - DNA, 618 bp, Cannabis sativa
ttttttctcaaaggttaggatgacacctcactaatgaagtgtctcaactttgatttagtatgcatgcatgcatgcaaccagctttccttcccaaatgaccaatttgtcccttaaagttactctcctttccttaataactattatttttttaattttaccttaacttttgatttatgcaaaaaaagatgccataattttatttatttttttttttgaataaaagcaaatttagattaaaactaaaaattagacctcatgatcattacataaaatgttatctggaatctcgataaagtcgaccatcccagttacattcctgggaaaagtccacttagccatattatgggccgtaaaattacattgtctagaaatagaaataaaattacagctaaccaaagagatttgagaattgttcacattgaaccacatagttatcgatgctccaataggagtaaattcccttcagcatattgataaccttcttggagtcactctcaatcatcacaaaatagcacttcttcgagacaactatttccacaactaacagacatgctatcgcttctccaattagagggtcagagaagttgagaactttggaagtcgcccagaaaactgtgt

SEQ ID NO: 13534 - DNA, 512 bp, Cannabis sativa
tatcaagatttcaataccatgtgtgttgctatattcaatatgggactaagtataagaacactcccattagtttttttttttagaaaaagcactcctattactttctatacttatttttaaataatttttctctttttttgccttacaaagaagaaatcgaaaaataaattaaataattatagtttctatttaactacccaataactcttaaatatatctaatatatatcaagattttaattacatgtgtgtggctatattcaatatgggactcagtataagagcactcccattagttttttttaggaaaagcactctcattactttctatacttttttttttaaaaaaaaaataattcttcaaaaccttattttttatattacctcacactcttacaaaataagaatttttacacaaaatttttttaaaatttttttttacattgatagtatatttttaacatttatactttctatattataatttgtttcgtttgtacttttttattattt

SEQ ID NO: 13535 - DNA, 798 bp, Cannabis sativa
  modified_base (204)..(208): a, c, t, g, unknown or other
  modified_base (323)..(325): a, c, t, g, unknown or other
ggtatatttcttctttgtaaaaagcatatatatttctatcttctgagggtatagttataattaattaaattattaagagagttatatttgcacctcataaaattatatgtacactttattattaaaaaaaattataaacttatctaatttttaattaatattttttttttattttttctatcacattattttatgttaatttcnnnnnttattttgattttatttttataattttttctaactcatgtatatatatttttttatttctttttaagaaaattttgtataattttttattttaatttttttatcataatatttannntataatttatttttgtttgatagatatattttttaagaatatgaattagaagaagaaagttaaaaaaaaaaaattagtataaataaagatataaattttatataaaataaaaattattaaaataaaatgtctttaaaattttttggagtgtgaataaaattctctaataattattattagccatatttgaggtaagattatagctaaaccctaatgtctaattttttttttttttcatattgtattacataaagttttaagaaattataattatgatttgaaattttattaatagactatagactagacatacattacatttcactaaattatattaaaccagctacaccacgatataaaacaaagtgtatttattaattaattaatattattattaaaaaaaaaagaaagaaaaaaaaactgacatcataaaaagaactccccataaaaagagatatggacaaacttagaat

SEQ ID NO: 13536 - DNA, 550 bp, Cannabis sativa
ccttatctttttccaattatttttaattcatagcaagatatgaactaaataatttttgtagcagaccccaaataatttgttatatattgaggatatataatacttttataaacaagacatttaaataaatataattctaataaatagaaaagatatatacctgacatatatcatggaaaattgttcactaccaacagatgtgaaatagtgcctaataaactattaagtattgtgtgctataatttagttgatagtaaaaagagatagatatctaggatatgcactatagttaatattttgttaggtgtatataatatttttataaaaaaaaaaaaattaaaaaataagaatatgcggtttgttagagagataggtgggtatgaagatttttttaatataaaataagaattgtttaatacttttaaatagatataactaaagacgatctcctttgtggcatattttgtaacttgacagagtttgaaaaaatatagaagaaactactccacttcatatgtgtgtgtggacacgtgtttgtaaagtcatttaa

SEQ ID NO: 13537 - DNA, 512 bp, Cannabis sativa
tacaaaaatacataatactatatttctattgtttttgaaatagcgttgttttaataaatctgcaggaaagcattatgatttttttttttttataactatacagagtattaattttccataattttaaaataatggtcttttgacattgggaaaataatatgaaagcaatatatatatatttttttaaaaaaaataaacaaaaactagtacaaaatagaattcgtaaaaaaagtaaataaaaaaagtttcatgaaaatataaaaatctttcaattttaaatgtattaggtaattttttttaaaaaaaaaattctcaaaaaataaagagattgggagacctcttagattgaggggtttggacaatggctccagctgtcctatcctaaagacggacctttgtagtctctttgaaatcccataatatgatgtacaactaagactctctcttttttttaaattgaaaaaatttagagatgattactgaggtggagagaaaaaatgatattttttttt

SEQ ID NO: 13538 - DNA, 756 bp, Cannabis sativa
tcgcgaccatggtcgcgactagagggtttaacaaaaccctgaattttgggttttcaagctagtcgcgaccagcccatgggctagtcgcgaccagctttcgaaaaactttataaaatccaaatttttcacccaaatgaaacctaaaacctaaccattcttctcagctgcaccaccactcttctcaaccgtaatcaaccccaaaaatctcccatttttcaattctttcatctttatatcaatttctcattcccaatccatcccatacctaaatttcactcatcaatcaccatttttcatcaaaaatcacaccctaaaaatatcaatttctccccaaatccaaaaatacaaatatcttcatcttcaacctcaagctttcaagaacattcaacaatggaggtggagtagtggcttcttcgggtttgtaagtatcactctctattatatttaagaaattgattgaatgatttaggaattttagcgaaaatattgaatatttggaaaaattttggtgatagtggaattattgagtttatattgtggatttgaactgttattgtgattatctgtactgttctggtgaaatttcaaaatttgggaaagcaaaaatttaagggaaagtgctgcccaattttttctagaattattttttgtgaatttttcttttgtcattgtgctaacatggatccgaaaaataacaagaaacaatgaagaagggggttcatgatcaatcccaccacctacgggttttgatcgaac

SEQ ID NO: 13539 - DNA, 526 bp, Cannabis sativa
ttttttgggaaaaacccccccccccccggcatgtaaactttatacttatgtgagcttgacttgatgacgtcaagtaagcccgtttctctctaaactatcagttgggcatcaattttggcaagcttaggcaattgtttttgttcttcaatgtcttctagtgagactaggaattttgaaaccctattccctttggaacaagggaattttaaatttaaaggtaaatagaaaggagagaaaagagaaaagatagttgattttctctctcttatctttttaaatttaaatttaaattcattgattcttggctgaggaatagatgagatcaataacttataaatagagaactcctctattctcttttcacactactccacacgcccaagactgagattgagagactgggaatcttatttcattaatctttcaagtgttctttagttcttcataagttttttgattttttttctgaatttttttttcttctcccccttttgtgaagctcatttcaaggattttgaatcttatt

SEQ ID NO: 13540 - DNA, 1110 bp, Cannabis sativa
ttaaagaataactgttatgactggctactttttgcagttaccaaaaaatatatttttattattaatttttttataaaaaaaaatagaaaaattgtataatatttctaaaaaaatgaaagtattataaaattaaaagtattactattttgttccaaaaaaaatattactatttaaataaaattataattaacaataaatttttaataatatatattttttacaaatatcacttaaattaaatattttttaataaaaaataatattgtttattgaataacataaaaaaaaaattaaccatacaattaaaaatatacaaaactaaatatacgtacattgcacataatattaacctagtatatatatatatatgtaacaaattgtgttgatatataaatttgagtttgaaaatcaaagttatattgtttatagttgtaatatttctcttaatatttagaggtagggtcggtcctgtgcataggtaggctaagtctgtgcctaaggcacacctagcttaggggtccaaatttttttttttatccttttttaaaatttcacatgtttttactgattttaaaaaataccataatttttttctaaataagattccaaatttattttatgacccactaaattttagagccgaccctaaaaagataaatttttagacaaagatattaaatcttgttcaacttttgtgaaccttattaattactatattactactctacacgtaaaacattatgtattaattaattatatttctaaaacaatataaaatttagggtttttttttaaaaaacaaatactttttctttttatattttataaaatataaattttttcagtgaagagtaaaagaaactaaaaaataactatatattaatctcacaataactataaataaactataaaacaattaaaaataatgagaaaactaattttatgacaattataaataaacaataaaataaccaaaaaagaatatcgaataatttattgaaatctatatttttataaataaaaaaattcaaactgtaaaaataataataaaaaaaaatccgtgttaacgtattttcttaattttttcaaaatttttagtgtactatgtaa

SEQ ID NO: 13541 - DNA, 689 bp, Cannabis sativa
taactccttaggatctcattcgaagatcatatattcataaatatggaaagaatgtaattaaaaaccaagcatttaatgtgtctttattctctgaagataagacacagtttttggcacatgtcaacatgatgtggcatccacatcaacatacatcgtgcgccccatgggtcgggcttcaccagataagcccatgtcaatatgttacttgtaatcaccccatcagtgggcaaaggctaatgagcaagaaccctaaacactatatgaagaacccttcatgcaaagggttagaaactcattcctcaattgctcaggcaaggtttagagtttagacattcttgtaaaacttaaggcttttctagctttaaagtaataatattgactcgtggactaatgcttgttaatgcctcaaccatgtaaaaatccacgatgttattttctttgtctttgatcaatttctttaactttcacatataataaatcaatttctaaaaatctcgataagtaatcactaaaagcaattgtggcctttaccacgaaatacttatacaatcccatcataacttcaaggcatattatttttaaaaaggttgaccccttcataagaccggctctgctgattcacatgaaacggagtgcggatgccatgttgaatgaaattggtatatgggagagagatggaaaaatgttgt

SEQ ID NO: 13542 - DNA, 514 bp, Cannabis sativa
tcacgaacagttatctagatacggccgaaaagaataattgtcataaaaaaactcctgtaaaaagggatagaatctaaaggaaaaggatcaatcatttttggaagtagagaccctgtgagattgagtgaatattaatatttattcctctgtaattaatgtactttcccaagaaatattcaaaaataagaatgactcgtgtagtataaagctttaactacaaaaccacgtaaaactctttgtgttctacatataattattaattataaatattaattctttatttaaaaagcttcattgattgctaaggaaaatttgagttaacaaaaacttattggcaataagaggagtaattgatacatcttattgatacagtgccacctgaagggtggggaagcaagggtcactgccccaggcctctaacccaaagaggcccaaatatttatatatttccattaaaaaatgtgaacatgtaagcccaagactttttttggttgaattattgcaacttagagtt

SEQ ID NO: 13543 - DNA, 662 bp, Cannabis sativa
acctttaataattttcagaaaacagattttaattttcttcaaatacatattgtaaagaataatttatagtataaatacttaaatttaactctcagatacaaataaatacttaagtttaatttttagcgataaaaatatctaaattttaattccagaacttttgtagctacctgattgttaagtgttaagtaaattgtcacgtgacaattcttgattggtttagttcattaaatttgtctaggttattaaatttttatttaaaaaaaaatagtttagatataccattaagaaaatgaaacgtggataatgacttgatatttggcagttagatacctacagaagtttcagaaatataagttagatatcataactgccaaaaattaaacttaagtatctatttacaattaagagtttaacttaagtatttacgatgtaaattactctattataaatcagaatattatactataagtaatttaaaatttataaataaaacaatacaaatatagttacaattaattataaaaattaaaacataatgataattaatttaaaaaataaaatagattgagactaaattataaatagaaaaaattaaatattaaaatttaagggtaaaactctatctaaaaaacatcaaggtaagtatatgccactagtaa

SEQ ID NO: 13544 - DNA, 768 bp, Cannabis sativa
  modified_base (179)..(185): a, c, t, g, unknown or other
atgtgccaaattttagcccacatatatgtcacctttttttaattaactatttgccactcattaatactattcattaataaaaaaatgtttttatatttataagttattgttgagaatcatggggttccatctcaaaaccaattggtgatgagtgggagtagcccatgttcttatatatnnnnnnntacttttacatttaatccatgtgagacaatgttctccaatatccctcctcaagatggtggctatttttactcaccaatcttgaatcaccttatcacaagccatgtcatttgctcgcttatttttgtttggatctcaagcgtctttgcaccatctggatctcgtgcgactggctaaccatctggataggtgtggatcaaaatcccgctaggaatatggctctgataccatgttgagaatcatggggttcatctcaaaactaattggtgatgagtagagtagcccatattcttatatatgactcaatacttttacatttaatccaattggcgagcgatatcgggatgcctccccactaagacacaacttaatactaaacatgtgaatgtggattttatgtgtccattctgcaatttggctagtgcatccattcaccatgttctgttacagtgtggctttgctcaatcgtgctagagagtttcaagtgtcaatatggatgttggtttgggagccgacttcagcaattggtttttcaagattgccgagactcaaagtcggatgttggtgtgtgaagctgccatggtt

SEQ ID NO: 13545 - DNA, 913 bp, Cannabis sativa
ctgcaccagaccaagttagaggcaacaactaatttagctgttgaacttaaagagctccgtgagttccgagatcagacctataaggaggctgccaaggccaagagggatgctcttctggctccaattacctaccagcattgcgaaaaacgtttcagtgactgggtgttcatgtgttggaaagttaacaatttcaaacctcgccttcccttctatcccaatcccgaggttgtcctagtttggttttaggagaagaataagaagctagatgcagtcctagctaagtgcaggggtccgcatcttcctcctcgaattgattgattaagtcttttccttttgtctttacgttcttttatttcgttcttccccccacttttaagacaattctatttttatattttcattttacgtaaaggtagactttttatggcccggccccaggccttttgctatttatattctagacaacttatataagtttacgtctattttgctttctctttttttttcttatattcgtcctatttttgcgtgtatgttatgccttaatacccccttaagtgacatgaaaagaatttttgggtcacttagctcaaagttgcatgggatatcgcatatatttgtacggcacaggttatttcaaagaatataaactaacattctcctaactattgatagtatttacagaggtgatcagcattccaggcccgaggtactgtggatccgtccatcctttttagcttgtaggtcccagagcctatttcatcttcaatttcgtatggtccttcctaatttggcccaagtacccccactcctggctcttgggtggccaggaagacccttcgtaggactaggtccctgatggtaaatttcatatctttaatcttggtattaaagtgctcgccacctttctttg

SEQ ID NO: 13546 - DNA, 653 bp, Cannabis sativa
tgggcatggatatgatcttctcatctggaaggatgccattgatggcatattctcggtcaagcttgattattggggatcacattaagccgagacttactgataaaggaggtcatttagagtagactttggaaagctccaatgcatgaaaggatcatgttgtttctgtgaaagattggaaggacatacttccttgtggaggaagatttcaggctctttacggaaatgaggtgaggggtgccttgtattatattgaagaggactcctttcctcatctgttctttcggtgtccgatagctcgtgattgctggtttagtggccaatggggcttgagaagtgagcttccgtactttaattcctctcttgagattattcagaggatgtttttcaccaaccaagaagttgactcgaatggtgggagcacaagcttgtttttccaatttgctgccttactttcttataatctgtggttggctcggaatagagtgtttcatgagggagtggtggaggccccaaatgttactcttcaaaaggtgaggaatggagttttagagtttcgtcatacgatgtctgctgagtcattgtaacagattgaggttggtggtagtagggtaagatgatctcccgcccctggctccagtgacttcaatgtgttt

SEQ ID NO: 13547 - DNA, 544 bp, Cannabis sativa
aaaatctaaaatatacaatattatttaaaataaaattaaaatatttactaattacttaagaaagcacataaagatatatgtattttaattaaagataataacaaataaataaaaataaatgggcccttattgggcactaaattttgttttttttacttttattcataattaaacttgtgactaaaagtaaaaaatttgtggctaattataaattaatattcatatattgtgactaaaatatccatgacaaacggtattagtcacaaaaatcacaatttacaaaaattattttcaaatattaaagtacttgatggatactgtctaacatcaaaaatttgataaataacgatgaattgaaagtaatgagtatgaaatcatataattgtcatgcattaatacaacttttgcttttaattgccattagatcagttttgcaaaaaaaaaaaatagataattaaattagatgcattacatgaaaatgtagtaaaatcattgtgcaaccttgataacttttatctgtcatctttgattttttgatatcatg

SEQ ID NO: 13548 - DNA, 509 bp, Cannabis sativa
taggcccaaagtagcataaaattcattcatgatatctttgagaatctgaattgattgaatatttcctttactaaacaagatcaaatcatcagcaaagcagagatttataattttgagacttttacataaggggtgatacctgaatctggtattactggctgtcatggagagtctccttgttagatactccattatcaacacaaagaggaagggagagaggggatccccttgtcttggactcttttgaccttggaagttgtcttgcactcttccatattcataagaatagaataagaagtgactctcaaacaagtcattatccagcttatgaatctggctggcaccctaaaagcattgagcaaagccttattagaaaatcccaattgtatcataggctttactaatgtcaactttgatgatgcacctttgggagatgtttttcttgttgttattcttcaaaagatcttgatacatgcatttttttttatatatgcgcatttaattatttt

SEQ ID NO: 13549 - DNA, 576 bp, Cannabis sativa
ttattatctcttattttcttaagcaataaatatatttggttttcaaaaatctcggtaaatattttagtgttttcattgagagcagaggaaagtctcgtaatcttcatcgcgtttcaaccatggtgtatactcgaaaaggctctggcaagaaagtcctcttggatatggttatggaggaagccgactctcatgcagccgacattcaggtggaaaatgatagagaaactcctattaagaaccaaggagggaatatcgagaatgttgcaaaagacctcggtgatagccaaaatccagaggatgaagaagaagagaagacgatgacgattactactacaaggatgggtattacaaagatggttgctactatgaacatgaccctagtctggtacgggtaactaaagaattggaagctagataggtagcgttagtaaagtaacaagagcttaccgctcatatgaaaggaatgatggagcgacttcaaagaaagttcaatgacttagctaggacgaatggggaatcatcggtggaagccatgagtgatgggcaaacccgtaaacaaactgaagctgaaacctc

SEQ ID NO: 13550 - DNA, 640 bp, Cannabis sativa
agatgatggtgaaggaaaatcatacccttggacttattttgttttgtttcaatattttgatcattgatggtgtctctaagacctatagcatctaaatagatttcagtatcaagaatccatgataaataatttcttccgaaaatatcaagtgccacaaagtcaagttttgcaaggtttgccataaaaaaaactatatcaatataaagtgtaaattattagacatatacataagctttggaaagaaaataaaagtacaacaaaatataacacatagacaataaaatactaaaatatggaataagaaagtaaaattaaacaataccatatgataaacaaatgaacacgcatatataatatataggcatctatataaatatatataagcatagatatatattgtataaatattaattcataacaaaataaataaataaaaaaatgactagttcgaatgtgtttcagtcacataggtatatatacatatatatatttaacatatcatgattttgaaacagttcaagattacatataacaaatattatattatacattggttagaggtccatgctgataatgtattatgtaatattataatttagaaaaagaaaattgagaagagatgagaattttcttaattttt

SEQ ID NO: 13551 - DNA, 561 bp, Cannabis sativa
ggtgatttttccagtgatttcttttttagacgatgaattttccggggacagtgactttttcggcgacagtgacttttccgataactttttcagcgaccctaacttttttggcaccagcaactttttcgacaccggtgactttcccagtaactttttcggcgaaccctattattacaagttttatcaaatttatttgtttttttccatatattttaaactttaattattttttaattttatattttttttgtattatttatttatgtcataaaaaaaataaattttattatatttttctatatttatgaataagacgaatactaatttggtgtaaataaaactatcatgataatcaattaatttttaacatcttagtctattaaatgtattttatatgtgcatttaagtctaataacaaacacatattgaaaggattttagtaattgaaaggatgttatatgtgtaattgagttcaataaaataaaaaataccgtcaacaatttgttaaaaaaaataagaacatttaaaacaaaaagttattgtaaagaagcaataaattga

SEQ ID NO: 13552 - DNA, 543 bp, Cannabis sativa
gaagcttcttttgagggttcaatcatcctccaaaataaaaaaatttacctaaaaaataagttcaaattttttgtcgacctatgccaatttgacctgtcatggttttcatatttttaaggtttgtcctatttgttttcagaataatgagactaccattcatgtactttggttatgttattcacttaagttaattcgttcaaaataggttgctaaagatcttgattctttagaagatgcttcttgcttttattctcttgttggattatcagatagtatattgctctttgttggcgtatttagcatatgtggttagttcttgggccattaattatctttggaggtcttaggatgctcgaagtggtggttcgtcaagcactggtaagccacctgcttgtttggggtttgagatctacttctgttaccgttggggagttgacattattgagtgaggtttatctatttgttgatgtcaggctttgtgtttaggatttgaagatgagaatgggtgtgattgctttagattctaacgaggtagtgttattt

SEQ ID NO: 13553 - DNA, 572 bp, Cannabis sativa
tcaacaactcgcaaattgtagttttccaagtcaacggagaatatcttgctagaggaggacgttttgctaaatatcattcttacacttgtcagctattacaaaaattcaaaaagataattgttagtagaatacctcgtgcttacaattctcatgcacatgctttcgcccgactgacctcaacgagagaagcaaaattagtcgacgtaattcctgttgatgtcttaatacatccaactattcatcgagatgagatgatggaggtcgatacaatcaaaaggataacctggatgaccccaatcattgactacttaaaaacaggagcactacctagcgatagaaatgaagccaaaaaactgcgatatcgagccacacgatatgtcatttatgacaacaagctctatcgcaaaagttttagtcagtcgttgcttaaatgcatcgatgggaatgaatgcaactacatactctgagaagtacatggtgaaatctacggtaaccataccagtggtaattcccttcaaaaattatgaggcaaggatattattggcaaacattgcgggcagatgcaactagct

SEQ ID NO: 13554 - DNA, 543 bp, Cannabis sativa
attattataatattatttttattttcattactatttttattataatccactactattagaccatctctaataaaagatgtaaaaattaaatttgacacaaaaatagttttgtaatatttttacattaatttttattattatactacactacataattataaatcttaatagttaatacaaaatttaatatgtcattgttcacttaatatttttttaaaaaatataaaataataataattcaaaagtaaatagaaaaattaataataacaataatgcaagtcatttaatgcaaaagaacatgttaattaaaatttaataataaaattttaaaaaattacataatagtaaatataaaagtatagtatttattgtcatgtaaattttccattatgatatattatgatctaaatttgaataattttttattatgtgacatatttacattataatttgaagttagagtaaaattttaacataataaattatattttacatttacatttattatgcttttatagcattaccattttcaatctagtataa

SEQ ID NO: 13555 - DNA, 661 bp, Cannabis sativa
acatgtttagttagcgattaatctgacaagtgcaaacatgatacttggcaagtgcagaagagatgcccatattagaattctttgactgctcaagggtcttcaacgaaaaggctcacaagcttgccaagctgtgtcttttaaggacaggcgcttttatcaagtttttctgaagtatttttctttcttttttatttcttttttttttttttttttgtagttattatttaaagtttgctcttaacttttttattatggccggaaggtttcggtttcttattttaaagattactttcttcaaaaaaaaaaaaaatagcaatataattactcaaaatttcaaatttaaagtagcataaactaaatgatttttataacaacataaatacctaattttgtaaaactgtaatttttttaaaaaatttatcagtacaaattacgttttgaatttattaaaagaaaatccaaaaataactaatgctacatatttccatccaaacccaaaaatatagaaacaggattttacaagttctttatttaagacaattatagtctaaactgacgaaactgaaagaaaattacagttttacaaataatagacatttctcgttacgaaaaattcttacattaacaattatacaaataagaaaattagctagggagtgca

SEQ ID NO: 13556 - DNA, 765 bp, Cannabis sativa
tcaaaggcttattttgctatgtgctatgtgaaatttcgacatattgtgtggtaataatttcaagaaggaaattaaatataaaataataattatagagacaaagcatcttatatattttttgaatcaagatgcaaatattatcttgtcaataaaatatgaaagtgtgggggtgtatattctaatatgacagtttagacatgtctggtgtctaaaactaacgtatatttgagacatgattggtgtcttaaataaagtgtaaatttgacatgtttggtgtctaaggttaagtgtgtaatttagacatgtttggtgtctaaattagtgtttaatttttatatgcttggtatcaaaattattgagaatttgagtttggtgaaaattaatcttttatgattgaattttcaaagcttaagtactgaaggagaatagtgttcaccttaaatgtggacactatatttggctagcatgattcgtttggaatcaaaagtgtgaggttaacaaattgcttatttttcacacaagattaaaacatgaatttcgagggatgggacctagactctcttagtattttactcattgatggtaacctatcttaacacttgtaaaaatcaagtcttaagtttaataggtaataacaagtccatagagtgaatgcggtcctcaattgttccatctataggtgagcacatgtagtgaaaattggagggttaaaaccaaatagtttttttaatggagctagagcttaagaaaactcacttaagatta

SEQ ID NO: 13557 - DNA, 579 bp, Cannabis sativa
gttcttctccaagattcccttccactagctagttctacttgtatttctgtttttacaaataatggagaccattggcataaacgtcttggtcatccctctatgtacatctctaacaatttcaataaagatcatggttttgattcacatatctctaagaaccatttttgtcacatttgccatcttgcaaaacaaaaacggcttccttttatatcaaacaacaacttttttgaaaatacatttgatcttatccacatggatatttggggccctttcaacattataagtattgaaggttataaatacttccttacaattgttgacgacaagtctagattcacatggacttatatgttaaaaactaaagccgaagtacaaaccatcatccccatgttctataatatggcatgtacacaatattctaagcctatcaaggtcattagatccgataatgctaaagagttcaatatgcaatctttttatgcatctaaaggcattcaccattaccattcatgtgttgaaagaccacaacaaaattccgtcgtggaaagaaaacaccaacacatcttaaacattgcaaga

SEQ ID NO: 13558 - DNA, 615 bp, Cannabis sativa
ctaaaatatgggagtagagaaagattaggagtaaattaatgaacaaggaaaacaaattgtaatggcggaagaccaaatacacaatatggatgatgaaagatagaagtggcgtttggtgacacttttgttttgaaattttttaatcacaaaaataaaatataaaaaattttgttttaaaattttgtttttgaaaaacaaaaatgttctataaccacttttgttttttaattttaaaaacaaaaaacagaagcactacaagaattgtaacttttacgagcacagtcgctactgcgttggtaaaagaaagtaacttttaccagcacatttcgcaaattgcgctggtaaaaaggtcaaaatattaccagcgtacatttggagtgcttaaaatctaacttttaccagtgcatttacgcgctgggaaaagtaatttttgccagcacttttcattttgtgctggcaaaagttctaataccaacgttgatttgccaacacatcagaagtaaattttatattaccagcgcaatactaaacttttgtcagcataaaaatgtgctggcaaaagtgacatttcttgtagtgaagtgtgttcagtaaatttcattttttgattttatt

SEQ ID NO: 13559 - DNA, 715 bp, Cannabis sativa
ttgtaagtcttgatgttaaagccatcattttcatgtcattaatgactttagtcttagcagccagatccatcatgtgttggatgaacttcttcaagctttctccttgttgttgcttgaccctggtcatggagctagcttccaaatcatagtcctcggctgatataaattgttttctgaacattgcctataggtctctccagttgtggatcgatccagaagacaacttcttccaccagccctctgcggacttacttaatgtcaatgaaaaacctaaacatttttcattatcactagccttggcaacattcatgatgcggttgtatttggacaaatggtccctggggtccgtttgtatttcatacagttccatcaggggcatcctgaaacactccggcaatggtgcctcaatagttctcctcacacaaggctctatgtcctcttcttcagagtcggatacgacaccactttattttctagaaatcttttctgtgatattcatcaactcctcaattttacgttccaagcattgagtcttgtcactttaggattctttctacgaacacgatcgtcgatgtaatttctcaaatcattttcgtggggtcttgctttttcagatttggctcttttcttcttggcaattaatcttctttggagatcattagtggaaaggcttctgccactgtcatctgtcatctgacaatggatgcacttcttc

SEQ ID NO: 13560 - DNA, 510 bp, Cannabis sativa
caacgcttaattactgctccagtataaattaactcttccttctgataaggaaaaatttgtcatttattgtgatgcctcaagacaaggtctaggttgtgtacttatgaaaactggaaaggtaatagcttatgcttcttggcaattaaaagaatgcaaactaaggtaccctattcacgatctaaagctcacatcaatagtatttgcgctaaatatttggagacattacttatatggcgagaaatgtgagatttacaccgatcacagaagtttgaaacttttcacccagaaagacttgaacatgagacaaagacattggcttgagcttgtaaatgattatgactatgaaatcttttatgatcctgggaaggccaatgttgtagttgatgccttaagtagaaagggtcaaaactagatgaatacaatgaaagagatctccaagaatctagcagatgaaatgacccgagctaatattaagtttattgtggcacaattagctaacattactttgca

SEQ ID NO: 13561 - DNA, 561 bp, Cannabis sativa
ttttatatagattatttgagtctatatccacttgttttcatttgaagatttcatgcaatggcaaaaacataacataatagattaatcaaacaagtaatcaatttttataaacaaaaataaaatatttagtatttttgctctccatttatttattaataaaattctcagtgaatatttagagtttcttctcaaaaaataaaataagatagaacgagacattatctggtgtggctcatctctttgagtttaaggatactcataagagctctaaccctaaccttgctcacaaatattcaccaaaactttttaaggcgggctggctccacctatgatggggtacacgttacatgaataaccttgaaataaatgtcaagagtggttagactaatatattttgtcctcacatttaagaatcatttaagagattcaaacttaagaccttgagtttagaaaattacttagggagttagcactttgatattagactattcactgagtaagtttgttcccaaactttaaacactactacattatatatcttaaagctcgtttggtaggtca

SEQ ID NO: 13562 - DNA, 670 bp, Cannabis sativa
tcttttcataaatgggtattttcaaaaatgcacagtggcagtgacgcgactgaatacaaatcggtaggtacgaaggaggagattattatctgtatataggtattgccagttatgttacttaaatataaagttatcaatttatttcctctttcctcgcattttctttacctcttcttcatcaaccatatgaagtcaaagatacggtatgatctacgtatcaactctatttattggagatgtacaatatgttctacaggattttatatttacaaaattttaacttactaaaaattactacatccattatttgttttacaattgttgccatctatgcagttgaagtattatttttatcacgattggatgtttgaaatatccgtacttttttctattctgcgctaaaaatgggtttaaggttctatgtatcatggggttataataggatggttggccatagctattagctaggtcctatacaactttgttttaccacaatattttctgggcatggggaatttggagcaaagaagcattgtaaggcaattgtttcctaatatggttttatgatttaaagagtcacttaaaatttagagtagtttccggcataaatacctaagttttatgcagagtagctgataaatacctaagtcgtatttttggcggtaaaaat

SEQ ID NO: 13563 - DNA, 649 bp, Cannabis sativa
cggatctcgatccaagatccagtcacggtcaaagcctgggtccgagtcttagtttgggtccgagttcgagtccaggttcggggtccgggtctcggtttgggtcccaagtcttgggtctgggctcgggtccgggtttgggtctcgtgtctgggtttgggttcgagtccaagtctagatcttgtgttccgtccgagtctcgggtccaagtttgggttcgggtcccgtccgagtctcggtttgggtttgggtcctaggtcgaggttcgagttcaggatctgagttctggtctgggtcccagtcctaggtctgggtccgggtcttggtcccaagtctgggtttaggttcgaattctaggtttgggtcccagttcacgtcttggtccgcgtctcggttcaggtctcaggtcagggtcccaggtcttgggtctcgggtttggatatgggtctgggtccaggtttttgtcttgtgttccggttcaggtccgggttcaagttcgggtctcgggtctcatctgagtcccaagttcaggttcgagtctgagtttcgggtcgaggtctcgagtctcgatttgggtcctgatttgggtctcgctccgggtcttaggtcacaggtcaaggtcacgggtcccgagtctcgggtgtgggtcttg

SEQ ID NO: 13564 - DNA, 507 bp, Cannabis sativa
taatataaacttaagtgcatgtatgtatcattttataaaagcaatcaactaagattgaagaaaatttcaaaaagcaaaattttcaattttattttattgtaagcaaaagtttaatcatttgtattctcctggacctacactatcactatttatttagtacttattgtcaatttgttattttaatccctacattcgaatatatatatatatatcactttttttaattatttttttcctaataatattcattatagttgtgatattaagtttataaattttaaaaaattatgaataatttataatactgacaacataatttttaatattgtacttaatcataggtgttttaaaattttttaaaaatttataaaaatgatattgtaattataacaactatcgttataaaaaaaaatattttcatttatatttttggatacaaaaattaattaaaaagtaatatgaaattgtaattatcactctaatttcttaatatagatataactttgt

SEQ ID NO: 13565 - DNA, 518 bp, Cannabis sativa
tatggccgttcatattagataaaaaatttgttttatcaaatttctacttccgctttgataactctgatatggatcaaaaaaaatcaacacgggtccagggtctgtccgggtatggagtcgagtacgatgttcgagtcggggtccagctctggggtttgggtctggggttcgggtcaggggtctagggtctaaggtctaggtctaggttagggttggggtttgggtctggggttggggtctgggttaaggtcagagttagggttctgattccaaggtctaggttggggttggagtccaaaatattgattaaaaaaaactgtttaaaaaattttgaaagtgaattttttttttattttcaaaattttttaaaattttgattctccattaaaaaattaaaaagtaaaaacagttttatagaacataatttttgaaaatattttcactttattaattttaaaaacaaaaaattgattaaagcaatgttataaaatgtacccatagtttttttcttttttaga

SEQ ID NO: 13566 - DNA, 542 bp, Cannabis sativa
attacaattttttttctcaacttctatcataaaaatatatctcgatttgttatagttacaacattatacttataataaattttttaaaattttgaataagccaaaaatacgtttaattttttttgaacatagtaaactaaaatattataaattcgaattttttttaaaaaaattaataggtttttttaaaaagaaaaaattaacaaatttagtcattaatttggcattataataacaaatacaccatacaaaattaaaatatatatatatatatatatatattttataaggttaattaatttttgccccctaaactttaacatgtaataaattatgtcccttaaatttttctggtcattaaaaatttctcctgaactattgagatgattaaatttaaagatttttgtccaatttcatttaatttactatttcaatattaattttaaatttaatacatgttaaagtttgggggcaaaaattctaataattaatcattctataatgtatttccaaacactaaatctaaaattgatattgaaata

SEQ ID NO: 13567 - DNA, 718 bp, Cannabis sativa
aaaatcttgggattcatagtgttgaccgataattttttgaaatcaatatttatagaattttagagctaaagaaataattaaatgaaataaagataagagatttttaacatggtttatatgttaatgaaccctagcccttgaatcgacagtattaagtgattataacaattttgtttacacttttgagcatagtttatgctttataaatcataggttttgaacccgctttaatggtgaagataaagccttatttacaagttcccatgcatgggtcgacttgacccaaaaccaaatgggaaatatctacaattggcccataaacggggcggttacataagctataacaatgagagattgggcctaaagctgaaggcccaatgccaaagaataaattatattgtatattcactttgctttacttgttttaatttttacctcaattttcatattctttaagatatacctacttttataaatgatgcccacattagaccccttaagttaatgttaattatatgctagacttaagtatagagtgagggtatattgggcaactcactcataaaagttggtatattttaattaaatataatatgaggatatttttaattaatagatacaaaaaacaggtattcctcaacttattccaataccaaaagtagttggtgagaaacactatatagtgtaccattgacagtggctagtcgtgcatcagcca

SEQ ID NO: 13568 - DNA, 510 bp, Cannabis sativa
caaccaaaagtccttagacttgtatagtcaagctttatctcaaacaacatttcaatgggtgaaagctgcccaaggacaggtgttggtaacctgttgtgtaaataaacaggagacctaaaagcctcgtaccaatattctaagggcatggaagcatgtgcaagaaggctgagaccatgctacaaaatatgtttgtgttttctttcaaacaacccattatgctcatgtgtagtaggacaaggatgtctgtgtatgacgccaatttatttaagaggttcagtgaaagatctaaactctcctctccaatcagtatgtagcactttgatctttttcccaatttgcaattctagctgtctcagttttgaaattcagaaaagttcttaaggcctcagatttattcttaagcaagtaaacccaagtgaacctggtacaagcatctacaaaactcatgtaatatttgtatccattatgagaaacagtgaatgtagatccgcaaagatcagagacataagc

SEQ ID NO: 13569 - DNA, 799 bp, Cannabis sativa
aaggactttacactttcaataaaaattgaataatgataacctacttactcaaactagaataaaaaggaataaaccaaccatgttaaggaagaacttaataaaagatcaatctataaaatgtggggttaataacaatctcgaaatctcccaaaacttgagcattgagtagaggaactttgctcaaaataaagactactactcccactgatacagtggaatggtgtggaacaatcatcattgaaagcataaaacgactactgaaaattaaaacaaagaaataaaagcacacaagaaaactaatgcgagaaccaagcaccaacacttaaaactctaggacgcaacaaccactactaccaccaagtcaagaagcaccccagacccatagaacattgccatggcgaacgagagaccagccaaatatgaacttgaacccccaccagatcgccaccgtgtagcccaaccccaacaaatctctaacatccatttgagaacatctctaccgaaccgcccattgggaatgaaaacaattcccacaaagaacgcaaaccaaacacaatgaccaggtggaaattagtagacaattaaattaatgctaagataggagacaaggatgattgaagggacacaaaatttaaatttccaacttatcttactaaaaaaataataattagtatttttgctttgtaaactaataacactgtataagttcaatggccaaaattacttattaaaggaaaaaatcattcagattacaatttgaacgaaaatgtgatcactaattcaatttagggaagaaaaa

SEQ ID NO: 13570 - DNA, 587 bp, Cannabis sativa
tggttaatggactagccatttctcaatagcagcaatattccagtgaattgttcttctaaatttcaactatccttcacttttcaaattgtgaatcttatcccaagagacaagacctgtgccatcataattagccacccctttccataagaaagcataacacaccgcattcactttgtgaagtactttcttggacagaactatattatttgagcctaatatgcatgaatggtgattagaaccgagttgattaatgttagtcttctagcataggagagatgtcaagtactccagaccctaattctttgccctatcttctctgttataatctcactttcagaaactggtaacaacttggaactaatgggaattcctaagtacctaaatggtaaggcactttgtatgaaacctaaagaatctatcaatctttaaacttcttcatccttcatgccacaacaataagtggtcgatttagctgtgcttggaaataaacctgaggtttaagaaaagggtttgagctgcccttgtagcataagaaacagtgatttataatcaccataactaataataacacattgtctggaaatcaa

SEQ ID NO: 13571 - DNA, 557 bp, Cannabis sativa
tctatggcaagtatggtcattcagatgcttattgctataatagatacgatgagagttgtataggtcaacaaatagtaaccagaccgaaaacccaaataatgtagttgcttacacagcctctcctgacactcttgaccatgacgcttggtttgctgatagtggtgctagtaaccatatcacaactgaacttaacaagatgaatctgaaaaaaaaaagactacagtggtaatgagagtactcatagtaggtaacgataataagctttctattcatcatattggacttggttttctacaaactttgtctgtatctcattagttttgaaggaaattttacatgttctacaaattaccaaaaacctacttagtatttccaaacttacctctgataataatgtttatgttgaattcttttcttatgtgtgtcttgtgaagaacaaggtaacaaaacaagtggcacacaagggtcggcttaaaaatgaactctaccagtttaacatcccgcattccacacacctcaactcaaaataggcgagctgaacgtaagcatagacacat

SEQ ID NO: 13572 - DNA, 569 bp, Cannabis sativa
tttaaactctaaaaaaatacaaatttgtaaaaatattgttgaccttatttttagtcaatgacacagagttaataaaacgatgatataagtgtttaaacaataacaaagattataaaaaaatgtaaaggacatatgaaatttatagaggttcagccctttcaacagtaatatcctactctggtgtttgttgtattgcttttacgaaagtatatcaagatcacagggtctggccaggtgagtttctcaatatccctcaaaaatgttacaaattattgatgctgaaaaatggtcaacactaattcgctagattgacgagataaataatgaatttaagtaaataatttagagacacaaatttatagtagttcatttcccatgtcgtgatgataatgaagctacgtttacgtctactttgagtttttatttctcacgaaaattacaagaaactggttaagtgtggggctcaaatttctagagagaaaaagtatagagagatgatatgaccttatgaggactgttgatgctaaaacatggccaacatcagctcactagattaacgagatgattaa

SEQ ID NO: 13573 - DNA, 626 bp, Cannabis sativa
ttttttctttattgattaaaaaaatatttatgttgggcatcaatagtgtctaatacatttttaaagtggtattttacaattagttagcgatatttcttaaaaattattttttttaaaattatacgaaacctgatatttaattatactaatagcgatataataccaaagaggatgctaaacactaataatactttttaatatttttcaacacacacaaaaaagaaaaaaaagaaagatgggaaccacaaaaaaggggttcctcccataaaacacttttggctggctagggattctgatgacttttgctagtctattaacagcgaactcattaagtgaataattaatgaacataattattgggcatcagtggtactcagtacctgtataggtgatacatcatgattagttaataatatttcttaaaaattattttctgaagttatatgagacttaatacttaattacactaatagtggtatgagaccgagaacagtgctactgtactatacaccaatagtactttttaaccattctcaataactaatatagaaaaaaattacaactagaactagagtaaaggtgttgataagttctaaaacacaaaacaaaatatgccaaagtttcca

SEQ ID NO: 13574 - DNA, 566 bp, Cannabis sativa
gtctctacacacactagcaatcaatccataacaatcaatatatatacgattatatgaagaacattaaacccttaattatatttgtatttgaaataaagtgttctatgagattaagtgtttattgttcagagaggggattgactcaagaagattcacgttactcaaataatacaacgattgtggttcacagtgaaggagaagcaaatgtggggagagagaaataattaaaaaaagttttgttttttctttataatattaaagatttaattttaattattttaatttaattaaataattagaccaattagaaattagcgtgtggcattttaagagcaattataacatctgttaaaaaggcacctacagatttagcaaaaattaagtttgtcgcaattatcagaatttgagtatttattagcaacaaatcaaactaaataggtatttttgtaacaaatttctctatatttttcaaattgttcaaaataatattctgaacctaattttcaataatttttttttaatataactaacttaaacaccataaatactcatacataaggatcacg

SEQ ID NO: 13575 - DNA, 534 bp, Cannabis sativa
cgtaactgcgcgaaccccgagtgtcatgggtgtctgcgcacgcacgtgggtgatccccactcctatttttttttaaattttcataaaatcataactaattcaaataaaattacaatttagttctgtaaataagagaatttcttaattttttctatactatccaaataaaataattccagatcgttaatcgaattcttttacgtaaaaatttcgtaaacatcaagcaatcatcaaataaacacatagatcaacatgaatcatatcataatcacacataattttaaatccatatttcttgaaagtaaatcattaccattgctctgatactagttgttagaatatattttaccaggatctagatttattaacaagtatatttattaacatcctaaatatgaatttttaaaacaataaaatttaaacacatatcaagttaagagaccttacattgattgtagcagaatatatgtctactcccactcagatctctaatccttcttcctttcttttgtagagtactatcaagatatcaac

SEQ ID NO: 13576 - DNA, 693 bp, Cannabis sativa
attattattattattttaaataattgaaaaaaataatatgtgtgtacatgtatgtatagtgaattattttaaagtttttttttttttatatgacaataattaaataatatctgaccatggtacaaaactgttaaatattaattataaaaaaacaaaaaaaaaaaaaaacccataaatattatggtgaagatcgacattacatgataattacctactaaaaaaagggtattggcatcattctcggatgctacgggataattatcaaagggcataatttgtaaatcttcgtacaaactatccaatataaattggatctaaaaaaaaactaatacagtaacaaaacaaaagagaaaaaagggggagagaactaagcctctcgatgctctccatgaatatgcgagaatattcttcaagtcatcagcaacacgatcacctctccatttctcggagaggacaagtctgctacgccatgtcgaggcatcagtttggaaaagattcaccagagagcataagtactctatagtttggctcccgccagttcttcagatatttttacaatcttgatgtgaagctcctctagattcttcttatcagcatcatgtgaaggacaagaatgaatctttattaagggaattgtggcaagtgtattatcagctatgattttcttttttgaactcatagaaggagacatat

SEQ ID NO: 13577 - DNA, 545 bp, Cannabis sativa
cattgtgcaacatcaggttgggccgattcttcatttacatgtccttcctcatcctttgtctcttctgcatcctcatcagccattatttagagatagatttatttgttagtataaaagtatacaaataaatatttatttgatcatttatatataatttggaatgtaattgtagaattttttttaaaaaaaaaatatttaaacatggaatgaaaaaattacccttgaagaattatgattttttactaaataaaaaatataacaattaaaaatttataatctgcataaatgatttcctaatttgaaagatatatattacaaaatacaataaatagtaaatgtatttattttatttcataattgtttaaattttattgtatgatttcattacttttttcgtgaaagacaataaatataataatgatttcattacatacttgatttctttacttttttttttaaagatttttattaatatttgatttcatgacttttttccgtcaacggtatttttttaatatttgatttcattgcttttttttaaaaaa

SEQ ID NO: 13578 - DNA, 513 bp, Cannabis sativa
taaatgttactgttgaaggaagcttggttaacatatctactggaattgttaacgctaccatttctggtaccgtttatgaggataatcagcttgctatttacaaggtcgataaggtgttacttccacttggaattttcggtccgaaaccgaagacaaaacacttggctccttctcccacaccattgaagccttcgaaagatactaattcgtcttcttcttcatcatcttcatcatcttcttcctcttctgaggaatccattagcccggatgcggcggggaaggggacaagtcgtcaaagtctaagggtgttgttcttatgaataatggtgttgtaaacattgggattgttatggttgttgtaatctctatgtggggtgcttatatttagtttttatcttcattggttgaagttattgtgccgatgtttgagccatagcttggaggctcttaacaattgcaattcttggtatttttgttttattattaatgaagatttcattactttaaaaaaaa

SEQ ID NO: 13579 - DNA, 534 bp, Cannabis sativa
tattattatagcattgaaaaaatggacaatgctcatgatatttgtactttattttggtctttttcttcaaaacactcctacatttcataagctaatatgcataaagatgattgacgttttgtttgaagaggattgtgattgcttagtatgacgtatcacttagtaattaattagcgaaatattttaaaatttattatttaaaattatatgagactcgatattcaatatttttctgtagagtatacttaatatttaattacactaatattattattgacacgtaagataatatttgacactgttgatatgttttagcatttctcaaattttaaagagcattgctattaggcatcagtagagtctaacaccttctcgacatgtcgtgttgcgattgactagcgatacttcctaaaatattatattaaattatatgatacccgatacttagttaaaccaataacaatattaacacataaaaatgtgctaggggctagtgtgcgcattttttttattttaaatatcattccaatctta

SEQ ID NO: 13580 - DNA, 568 bp, Cannabis sativa
tttttttttttgagagagaattatctattataatattaaacaataatatttataaattataattaatatatattatcctaacatacctatatttattaggtagcgtttggttgagaggaatgaaaacataaaaatatggaaatgagaatgggaataaaattaaaatacagaaaaaaattaatgaaaaaattattaattttttttcccatcatgcattggaatggtctttccttccatttcaaaatagaattgtcattccaccaaaatagtagaaaggtcattccattggaatgacattccaacactttaatatgcaaccaatttaatatgcaaccaaataaaggaatagaatgaaaattgtttccattactttcttttccattctatttcattacctccaaccaaacgccagtgtatattattatttacttttgaaattatgacgaattttaatgtatgttttttctttttcttgtattttttcttaaaaaaaatgtatatcataattaaaattaaaaaaaatcaaaaatcaaataatattaaacacattaacttatctagtatacac

SEQ ID NO: 13581 - DNA, 642 bp, Cannabis sativa
ctggaaaagtgggggtggaacctgttaattgggagtcaatctctttactgttggatattggaagctaagtacctgaaaggaaaagattaccttacctacaagtacaaagactcttattcgcggttttagaagaatgtggtgaaagccaaagctattttgagaaaaggggcgtgtaaaatgatcgcagatggaaaggatacgagagtttgggaggatccttggatctcccatggcacagagttctatcctaagtcgaatggtgctagagttttggggtataacagagtggttgatctccttatggattatggggattgggatattcggaaattgaattatctttttgacaaagaatttgtttcggccatcctgaaagggggtagaccctctggtcagggtatggataggtggatttggacaaaggagagtaatgggcgtttctcgtgtaaatcaacttatctcatccaagctttagaaagggctcctcattctgatgttgcttcgttcctctggaataaactgtggaatagtaacatattggaatgccataagataatgtggtggtgtatcctctctaaggccctcctagtttgcgctattatttctaagtgattctatttagaggatgtggcctgcccttta

SEQ ID NO: 13582 - DNA, 546 bp, Cannabis sativa
aagaactattataatgatgatgataatgttagaatctaatttattataatcacgaatatgtaaaaatttattttatataatattttattttctatatatttttttatttttttaaaatataaatttatatgcatttgataaaaataatttatagtatttttatattatgatttatcaaatgtaaagaaaaagtcaatgaattataataactagtgatatttcagtaaataaaaaaaagtagcattttttgtaagctaaatttaacacaatactaaatcgtaagcccaagttgacacaactattactatgtgtcaaatttagcagactttttagaatactattagaatattaatttttcttatgctaaaatacagcaatagaccacatttttagcactctattagagttctcttaaaattgtaaataaaacataaaaaatggtatttttaaaaattctcataaagaaaaatctattatttggtgacaaaaccaactaccaaaacaaaagtaaatagaatctctatttttgcagacaattataatgtt

SEQ ID NO: 13583 - DNA, 660 bp, Cannabis sativa
tttctacttctagaactacttccatagctgtatagaatttcttcaaccaataactggttccttagctgcttcacaagctgctatatattcagcttccatggttgaatttgcaatactggtttgcttaatgcttctctagactacaactccttcaccaagagtaaatactgacccagatgtcgacttttgactatatatctttgtttgataaaaaattagaatcagtatattcggtaggatttaactctccaccagaatatacaagcatgagatctctcgttctccgaagatacttgagaatgtgctttactgcaatccagtggtccaaacttggataagattggtaatgactaacaatccctacatcgtagcatatgttaagccttgtacacaatattgcatagattgagctcctaattgtttatgcgtaagggtactttttcatgtcctcttcttcttgaggagtttttagacattgatccttgcatagagtaatcccatgtctagacagtgattgtcctttttgggaattctccgtcgagaatctttctagcgccttatctacataagttgcttgagaaagtactaatgttctcctctttctatctctatagattttgatcttgagagcatagcttgcttctctcaaatccttcattt

SEQ ID NO: 13584 - DNA, 558 bp, Cannabis sativa
aaaaaaccaattacctatggaaacctccctcgccttgtctctggaacaaatcaatttacattggcagacatgattttggtgatcaatattagaactgaagtgaagagagagaaggcagttttttttttttttttgaaaagggaagagacccacatatcgaggggtctctccgatatttattaataagcctcacttatggcggaggaaaaccatggttacagtaaacatcaactttattagtgcagaaaatgtacaattggttgtgtccaatatggacgagtttatactagttttttgttaggcttccaagtttgaaattgcaaaaacctttgcgaatggattctcaaaacattcaccttgaggacaaggtgaaagtttgggtgaattgtcaagtccttggtggctgagatgattgtttaatagttatttaatacttagattgctattagttggctagttagggttctttgttagtctagcctataaattcagagattaagtcttatgagaataggggttctgtgttattgtttagagtagggagtttttccaattcct

SEQ ID NO: 13585 - DNA, 779 bp, Cannabis sativa
caaatagcaagatattcgagcaaggtcactgatggacacccgaccagctcgatcgtgtgatcaactcgcatgcactggccagaagatgtgagttggcaatttcataagtgatcgatgtcatctccaagtttgcatgtcacaaaccaatcctttttttgtgggattaatttgtaccttcagagaataaaggcaatcagtctagatttcccaatttcttcattgttattatggaaacatgatagttttcaattttatttcttatagattaagggaaaccattactatgtaattagcccttataaatagtggtctcatctcactattcatggagatgaatttattcagagaaaaaacactcaagagagacatttcgttccaagagtgaatactcagagatctttgtaagagcttttgagagagaatacttcattctttatctcacaagttcataaaacgaaaatagaagtagattattaccattatcacgggtcaaacctctataaattctggtatttctttaactttttattatttgatttttattatttatttattcttatcgctttaattaagactcactgtatttggctaaaagggaggttaatattttggtgctttcattgagagcaaataaacaagttttttgtcttaagtcttttacaagacacatgatgtttgtcttcattcccaagtaaagggtgagtcctatgtgtcactcgaaggggggttcaaaatgatacagtcatcccaatggtgacagatttgagcatgcaaacact

SEQ ID NO: 13586 - DNA, 630 bp, Cannabis sativa
ttgaaaggcaaaggctacaacctacctagttcggcatacaggacaaagagcactaagaggtattttatgcccttcagcgtgatttgagttggacaaaacttaaagaagttagctatgtcccttaagtatagatgcaaaggaagaactgcccattgcttagtgtcataggctcacctttttcaggcagcggaacgcctgagtggcatcttgacttctttaagcgaaggtcagccttctaactatccgagtaacaatggagtaattttttatgcaaccatgtgtctcatgcatacttccgtctctcaaaaaactcccatcgagtcatgctcacaagcatccatgactgcatctatgcatcgaggctctctcgtccagatactcggactgtctctcatcggcatctactatctctcatcggcatatgctctctgaaccatttggcttacagtgtcccatacaaccctagtgttccaataaacacaaagcacgcccatgacatgctgcaaactagctcagtcttaatctcagccaatgcccatgcataatatctatttgcagcttgcagttataacagaaatctttacactgaacaagccatctatcaattagtgtttccctctagattcaaag

SEQ ID NO: 13587 - DNA, 533 bp, Cannabis sativa
gatcaaaacactcatacaatgatagatttgcttagactcaataaattatttgaaattgttcgaaaatttataaaatgtttagaagttgatgtttataatattaagttgtgtcttaggaggatatgaatgttaagaagttaggtgttcactcttctttttttttttggaaatatttatatatctctaaaaattatgctaattataagaattatagatggaaactcagtcgggagtgctgtccatattcacatctcctatatttcacaaaaacaagcacaaaatataaaaggggcaataataatatataataatacaattaaagacagtcaatatataaatttataaagaaaaattaaaaaaaaaaattacaaaattatatgtaaggggtcaaggcagctcccatatcacctatttaaaaacaaataaaattatgaatataaaagataaattatataataagtaaaaaattatatatgtttttaaattaagacatacaatattataaaacttaatgataatatttaagagaatta

SEQ ID NO: 13588 - DNA, 563 bp, Cannabis sativa
tcttgcaagcttctgtacgcactcttcacagagtaatgtcctgttttttcaaatctcaagtaccaagaatcattctcaccattagataaaggaatggaaagaattagattaacatcacgctcattgaaaatatcatgtagtagctcaagatccctttgaaattggtctaaaaccatgaggcttgatactgtaacatcaatcaaggattcactgactgtatggatataaggatggacctcaatatgaagccaaggatcacgtagcacctaaactgtatttccaagcccaatctaaagcgttgcacctttcttgatgagatgttgggactcaaaaatgcttttccatatgaagcttggattacctccaagctcggtagacaagaaataatcatgtggataatacttggctttgtacactctactgaccaaagcatcaagtttcgtcattaatctccacccttgcttaccaagaatagctacgttgaagtcatgcatattacgaaaccccataccacctttttgttttggatgacatagctttcccagctcatccagtggataatt

SEQ ID NO: 13589 - DNA, 956 bp, Cannabis sativa
tacctcgagttttgattcagatgtgttggttgacttgaatggacaaagatcaacaatcctgcaccttatgtcacaacaacaaaaagaacgattaatcacttgccctaactcattctaggtccttaattcatcaccgtaagtttccttatcgatcactagagtatcaataccctaaatatcgagaaaacatgaaaaatgggggttctaaataatactgaaaatggtaagctgtttggaaaatggcaagccatttttggggtttcttagcagggaaatagtagaccgtaattccaaacaatctgccattttctacaggaaacggaaaacccagagtttcaacttctaactagttataaaagctatagtttctatatctataattaacactcccactcacagcactaccatgttcctaagatgtaagtattgggctgatccaaatggtcaactctaacgaacaagtcaaagaacacatgtaatacatttaagtcaaaacataatcattttaggattaagatctataattaacgctcccactcaactgcattaccgtgtttctaagatgtaagtattgggccgatccaaatggtcaactctaacgaacaagtcaaagacacacatgtaatacatttaagccaaaacctaatcatttcaggattaagatcttttgatctaagatcaactaagtgacattgacttaaaaaaaatactacggtaagtttatgatatcttttccactgtcaatatcagtctagtttgatgtatagccaatacatctgacactagtatactttgctaatatcctagaaaagacattccacatatcactgtgtaattaaactttatcattgattatcacgtcagtgtaaatacaatacactgataaattataagactaaatggtttgaaacatatggtcatgattattttcaactgtgtagacaacattataatca

SEQ ID NO: 13590 - DNA, 592 bp, Cannabis sativa
atatcgctcaacagttgttgttcttgatgtgaagaatggtgtggtagtagttgttgtggtgttgttgtgtgtgttgacgcataatgggtatgtggtaaaatttgtttctttgatctttagctgcaagtaaaagaatagactgatatcattcaattttttaattggtagtattctatctttggcttagtactgtatttgtaggattgttgttgtgggttcgcatcccaacaataccagtagcatttacaccaattgttcatacttacaatctgtgggtatgaattctccattcgcttcataatcaacataactcttttcttcttcctagtctcgttgctctttatgagaactggtatagatttcatgccctataacaatttcttaatacagtaacaattcaatgacacaattcaaacaaaaacaataatagaactactacaaaacaatcatatatagtgttatttttttaaaaatcaccccatgtttctctagaatgcctcattgtcattgttgttatgtgtttatcgtgaaaatctgtttattaaccccgaacaacactagaacaacgttgatcttaagaaattttaataga

SEQ ID NO: 13591 - DNA, 593 bp, Cannabis sativa
ataataatataataatattaataaaattttgattattaataattaccttatttttttttagccattaaaaaattttttaattttaaggtatttgatcaacttcgaatatctcaaaataccctgatatttataaaattaacttatctcaagtgagcttatctcaaagtaagaggagcgccaaatcctaaagccagagcgagcctttgaaaaaaataaagaaggggtacagacccctatacaaagccgcttactgaaagccgcctctgatgtacaaaggggtaaaaacaaaggagactcaagcaagaggtgtgaatatcatggcgacgtgaggcacaccacgaatgaatgtgattatctgagagacgagataaaaaatatgatctttccaaattgaatctttagtggaaggtcagttcctactgaatttatgtctattcttttagacgatttgtcttcttaatgaagtcctactgaatttatgtctattcttttggacgatttgtcttcttaatgaagttctatttctattcaaaaaaaaaaaaaattggggtacctaacccctctggccccatagctcggtcattgacttctct

SEQ ID NO: 13592 - DNA, 634 bp, Cannabis sativa
ctctctcccacacgtcacttgcatcatacatgacactaagtctatttctcatctcactcgattgagatcttcctagcattgttctcgctattgtagaatttatagagagcccctctagaaattataaggtaaagcttataatttgagtggtattatctctcgaatcaatacatctaaaaggagagtaagtcattacccgctaaataagagggtcgagcctctataaaatctgtgtctcttttatcatttattgtacttatttacgcgtggtgattgtctatcatgaataaggctccgttgctagttgaccaaattctaagtcaataatattgatggttattaaatattttattgagaatatacacaaattatattttattatttaaataatggtaatatagtaaataaaaaatgtaaagttagttaaaattaatgaatcataatattagtgatactatagtaaataaaaaaaaaatagcatttattgtgggctaaatttagtacactacttttagcatgtgctaaatgtaacacattttttagaacattatagagtaatagtttttatcaagtgtgttaaaatataaaaatacaccattattttgacattctattaaagatgctcttaggtact

SEQ ID NO: 13593 - DNA, 739 bp, Cannabis sativa
acagctccatcagcgacttcctcaacatccgcaatctctgcctccttggggaaaatatttcctccgcacccctgggtctgagtaggcgacatagcacgaaaagcttctgccatctcagccgcctctgctccaaggatagagaagtcaaaatctggcaccttggataaagtcgtataatatagtcaaaaatagcttggtcatactgcttcttcccattttcctcctcggtcttgaagtcgcgagataattcctcgaccttcgactgagagagcttggcttgaagttccacctgctctttggacttctggaggttctcgagatctttatccttagaattcgcgtcctgctttagcttcttgtttctctcctgaagctgggtgatctacttttccaaaaggttaacttccttggagccagcgagaaacgccttcgagaacatggtgatgaactgcgaagccaattccgcagaacgtgacattaattcctcaaaaggagttccttcaacctttgacacaaattcctcgcccacaaacttctctttaagagctaggacgtcgcgggctcggacagctgaatcaatcatgaccttctctcctttgtcctaagaaggcttaacatgcttcattgacgagtcagcaataggagtcgcgacaacgtcactcttcctcttctgaggaacgataagagaagttgtcgccgttccagttttgggcttgcgattgagcactggagcctgctt

SEQ ID NO: 13594 - DNA, 558 bp, Cannabis sativa
tgcttagggttctaagctgagagtaatgttcttgaagggggtcaagaacaacgggtgtactcgggttggtagagagaaaactgtgactgttttctctggtgtgtttcgagtaccacagggttgtgattgctctgaatcttgtaattgtattgatactctcttattccacatattaatgaagaattggtgacgtttctcagctggagtatggccagggatcatgttgatctctaggaccggaaccaggataaattcttgtgttgctatttatttaatttcttgttttgattcattgtgttgttaattggtttatgttcattattgctgtccaagttgtgagtttattgcaggttttatgattgaattcttgatgttattgttgctggaattacaacaagttgcaataagtaaaataatatcaaccccttaatatgtttttgtattacaaatttttttacttagttttgacaacctgatttatctttctgtactattacattatttttttttcatggaatctgttgttacgatttcattctttcaacttttttttttctc

SEQ ID NO: 13595 - DNA, 612 bp, Cannabis sativa
ggtgagaagaactgagttgattaaaactgctcgaccgacaaaggaaatgtgcctggtgctccaagttctaattctgtgagtcatcttgtcaactaggataccacactctctttaagagagtcttttagggctgatagggatacccaggtaggtgaaagggactacacctctctggaaacacgatgcatcaattatacgttgtacttcagattctgacattccattacaatagatagctaacttgtttggattaggttgcaatcccgatgtttgggaaaacagtttgagcccgtgtaggagataatagatacttttatagtctccattgcagaaaagaagaacatcatctgcaaaaataaggtgattcagcttcatatccttgcatctatcatgaaagaggaaatttgataagatattccatgtcgagtacaaacagtaatggagacatggggtcaccttgtctcagtcctctccttgcattaaagtagccatgaagagaaccattaagcataagtgaaaaaatctgggcgatcaaatgcataccatgattagctgaatgaatgttttcaggaagttcaatcaatgtagcatttcttcaataaagtcccattc

SEQ ID NO: 13596 - DNA, 577 bp, Cannabis sativa
tgcaatgggaattgaaatcaaagctcttgaggacaaccacacctggataattgtcaccttacccgatggccatcatgccatcgacaacaaatgggtttataaaataaaatataacccagatggcagtgtagaacgatgcaaggcacgtctcgttgctaaagggtatacacaacagccaggtattgattacttcgatacctatgctcctgttgcaaaattcaataccctcaaaatccttttttctcttgctgccatcaataattggcatttacatcacatggacattaacaatgctttcctccatggtgatctacatgaggatgtttatatgaaactacctcaaggatacactcccaaaggagtgattccaccaaatgcagtttgcaaattacaaaaaagcttgtatggtttaaaacaagcatcaagacaatggtatgcaaaactcagcagtcatcttattcagcaaggattccaccattccaaatctgaccattctctatttttgagacatacaccaggtgttttctttgccttactcatttatgttgacgatattgttgttgctactaacaatctt

SEQ ID NO: 13597 - DNA, 596 bp, Cannabis sativa
acacatgccctacaatattatcttgtattttgaattttttccaaattattcatattttaaaaaattattgaattttaaaatataatttttctagaaattacaatcttattttaagtaagatttatttataatttcataaaaaacaaaaatttttgtatttaaactttagggtaagtctaaagtgcattctctaaagaaatatttcagtagacctctatctgttttgacatctaagaatgttttttagtctatttttttttttcataattgcataccttgtagctatttaggaccacctataaatttttagaaaattttgagtagtttacaatatcgaaaataagatttacatattttcttgcacatgcgactatttttattatatgcgtgataataacagtttaaaccttatttttgacactataattatttaaaaatttcttaaaatttacaagtggttttaaatatttaccaaaacaaataaaatctaccaaaacaacaatctaaggatctgactacaaaaatttcctcaactttaatctaattgcccaccaatgttttgtactaaacaatagtgcagtgctatacttttgtct

SEQ ID NO: 13598 - DNA, 619 bp, Cannabis sativa
tgagatggaaccccattcactttagtcacaaattctaacacggtatcaaagccacttgtgatccattgtgagcccgaatttccaattgtccaaaaagccgtttgtaattcgttgtgagccaaagtgccgcctgtccaaacagatactttcgctgtctcccctttaacctccatttgggacctttcggccaatgtgatatataagatgaatgggctactcctcttattgacaattagttttgagatggaacctcattcaccttattcacaaattttaacagttttctcaaatggtagattttgagttttcttatagatttttatttttagattttctgatagattttcttttctctttttgatgtatttcttaatatgtatatatatgtacggaagcacctccatcatttttggtgtaacattgagaatgaacaaattttcatagaaagaaaagtaaggatttgggaaaaattattatagtggttttgattttgaagagatcaaattaagactgtttatgcaaagaaatctttctgttttgttttgtccttttcgatatgaatgtgcaccccttcacagttacttataagtaatatatgtcaagacagattagtattatg

SEQ ID NO: 13599 - DNA, 501 bp, Cannabis sativa
gatttagtacttgaatcttaatttgatacttttcagatagcatataaagagggatttttagaggtataattgtaaatgccagatcttgaggaataaaagttttggtctggaatcttgtcataattgtaaattacattaatcatctccaataaaaataataaataaataaataaatattgtaatcatagcattagaatggaatcaaaataatcattgaaaaaaataaaccggtttaaaatataaaataatcaaaaaaaaatattttattatgttttttattaagttacccggaaaagaaatcaaaatcattttattttgtttgtataactaaaaaaagtaatcaaaatgctttaatttgattaaattgtcattgttaaattatgtaattattttatttataaatttttgaaggacatatttatttttttttatttttaattaataaatataaaattaatataagtaagttaaaggaagggggaaaatattccttatgaaaat

SEQ ID NO: 13600 - DNA, 613 bp, Cannabis sativa
tattttatattaattttaataactattttaattgttttcatctatattttttctaataagatttcatataattttgtgtttttcttttgacaaaaaaaattgtaactttattagatggacaatcttctaaaataattgtttaaaaagtactagggagaagctagccctcaatcataactacaacctgcattaaaacaagcaacagtcgctaaacaattagcggccttgttcgcaaatcgtttaacaaagacacaagaaatattgttgatcactgaaactagagtaggacaatctgaaataattaaacctaaaggggataacatttgagttgagctatgaagagcatcaataacactcttacaatctgactcaaccacaacttgagagtatccttatcgtttgatccaatttaacgcttccttaaatccaatcaccccagccaagatcggttgaacacgaacaggcatctgtttcaaagagtgaaagagggtagtaccgtggtagtcacgggcaagccatctaatcccataaaagtccactccaggattgatagaggcatttacattgattataatcttattaacactcggaatcaaccaatgctctacactaa

SEQ ID NO: 13601 - DNA, 504 bp, Cannabis sativa
caattgggttttttgtagttatatagaaactccaatcaacattctagtaattaaacatcatttttttttttaaatgaagaagcagcagtttggcctaagtttaaacttttctgtgtccttctcttgcccatgtatccaatatgtgttttcaaccatatctgctaaaaattcatttaatggtacatcacttattaacctgctgttttacttaaagtttagacaatgtactaggataatttatgtttttatattaatctagcataagtttatgtgtctctcgaaagccagtatgcttataccctgcatttgttttctattattgttgggttctttaacatgtttctgtgctgactcttttctctcaatgctcagtccttgtcaaccagcatcgaaggaggaaccaaatggttggttaataaaattaaaggttagttcgcttccatttttctgtttttactttttgttatattgcatgaaaattgaaatttttgtgtgctaatttat

SEQ ID NO: 13602 - DNA, 811 bp, Cannabis sativa
  modified_base (95)..(102): a, c, t, g, unknown or other
aaattgagcaatttacataaatagtagaataaacatatatgaacttaaataaatttccacaatatgcattttataaataataataaaatctcatnnnnnnnncctaattatttaataattcaaagtgttaatcttaagcggtctttataattatccccccgttaaaaggattttgtccctgaaatctaacctgaacaactctggatgctgagtcctcatatcagacaccaattcccaagtggcttcctccactttactattcctctagagcaccttaaccaatgctatagttttacttcgaaggaccttttccttcctatccagaatttgcactggccgttcatcataagacaggtctggttgtaattctaatgggtcataacttaggacatgcattggatcagacacgcacttcctcaacatggaaacatggaatacattatgcacagctgacaatgatggaggtaagactaaccggtaagcaacatgttcaaccttttcaagtatttcaaaaggtcctataaatctaggacttagcttgcctttctttccaaagtgcctgacccctttcattggtgacactcgtagaaagacatggtctccaggttggaatgtaacatctctgtgcttggggtctgcataacttttctgcctactttgagaagcaagcattcgagttttaatcgtgtctattgcctcgtttgtcttctgaaccagctcaggacctaagtatttttgttctcctgttttatcccaatagattcggaaacgacatttcctgccatagagaagtgttggaatttattttacc

SEQ ID NO: 13603 - DNA, 512 bp, Cannabis sativa
caattaaaattaaaaattaaagttcgtagaacctaacttttagagcatttttattggagatgcaaatacgttatacaaatgtaaaacaattcaatttgttaaaagtctattccaatagtatgttaaattaaaatgcaaatatctcacgtaagagcatctctaatatgcagataagtgatactaatgcaaaatataatttattttattaaaattttattctaatagtatgctaaattataatggaaaaatctcacataatcaaaagtgatctaaatttacacctagaacgaattcttttttaaaaaatactatgttttttcagtacttttttttattgtgtactatattaagttttttttgttgtttttaattgttctgttttgtgttttacggttgttttataaaaatacagtaattttgtaaaagttaatttaaattacagtatttttatggtaaagtgaaagcaattacaaaataattaagagtgttaataactaataactaatttgatt

SEQ ID NO: 13604 - DNA, 513 bp, Cannabis sativa
ttaatagctcttggtcatatatatctggtcaatgctattaggcaccttaagggcatctccaatgggattgtctattagagtgatacttttaccatatatgcatattctagtttaatttttaagactaattttatgtgaagtgttgttcaatatagataataattacatgtcattttttttttaattatttttattagaaaaaaagttattttttacttaaaaagtcagtaatttaatttgatgtgagacatagtatacaacttttagagttgtcaactattgaatatttttctaagagaatatgataaatcttatgtgaatgagagaaaaaaaataaaagaaacaatattttaggataatgtgtgtattttggcaactataagagcatttctaatgggattgtccatctagttatttttgctacatatgcaatatggttattattttcagtgcaattttatttattattattgtttatatttaacaacggccatgtgatattactttaccttt

SEQ ID NO: 13605 - DNA, 509 bp, Cannabis sativa
aaagaaagaattgttgatttattaattacaagagaaagagtttatgtacaagatggttacaatcaatcaataacagaatattatagagtaactaactaacttgcatcactaactaactaaagtctagagactaacatagttaactatgtcttccaacacgatttgataactattatttgtagaaataaattatttatttttttgcaaaacatcaattttcatgtgacatattcccttacataccaatgaccattagaaaaatatatatgacttggacaaaattattaaaacttattgatcaagtgctcattacatgctgatctttatgatgtgcaagcagggctactacacagagctaaaataaataaataaataaataaataaataaaataaaaggtccaatatttttttttctttttcgataatgccttttagtttttctttattatttttattttatttttatgaaccaacttgtcattggtcacttcattctctattactgtttt

SEQ ID NO: 13606 - DNA, 709 bp, Cannabis sativa
ttacaaaaatactgacttttagctaaatctttacaaaaatattgctacacggcaaaaattacttttatactgtcttgactaattttcttttcatactgtaaacacaaaaaaaaaatgaggcatccatcttccacacccacggacagaaccaccataagaacactagaacaatcggaaaacaactaataattccggtgagattgagaaaaaatatagtgaaattgacgtcaaataaataatcatggcaaagcagctgtaaaacaatactaaaacaaatcaaacaaaagaaaggaaaacatgattaaaaaaaaactaaaaaatgttctgcacagcctcaatacccaatgcaataaaagttatatttgcaagcacaatcttaaaaaattagaacaaaaactactaaaataacaaaaaaataaatgtaaaacaataagaagatataaccacttagaaaaacataaaagaaccacaatcattaattccagcaagatggagcaagaacagtgaaatcgacgttaaaaaaataaattatggaaaacaaccgtaaaacaagactaaaataaataaataaaaaaaactaaagaataaacacagtatactgcagtataaaacttataaaaatacacagtaaaaaagtaaaaaataccgcctggtagtatttttttaaaaaaatagcaaatgtcaatatactatataaattttccattta

SEQ ID NO: 13607 - DNA, 540 bp, Cannabis sativa
tgaatcggatcagttacttcattaacatccaaagaagaagaagtgaaaagattgttaaaataatcaaccataagattagccaaattattttcccaatcaatccaagtgccaacatcattcttcagtctttgtattgagttattcctctttctagcagtggccatggcatggaaatacttggaattctgatctccctcctttaaccacaactgtttcgatctttggcgccaaaacacctccttttgaaccaacacttcttgaagccgagcctcagcctttttgtaatgatcaactgagcttgcatccttacttcttttccaacgtctcatctcagtcttgcaagcttggattcggtctttgaaatttcccgagtaatcttttccccaaaccgaaagcttctccccataatagtgtattttatccatcacagaagaccccaaaagaatctcccaagtatccttcaccaactgcaaacaggcgggttcacgaagccacatattttcgaaccgaaaaagtttcgttccacccattctcttcata

SEQ ID NO: 13608 - DNA, 782 bp, Cannabis sativa
acatttcttaagttatttgcaatgattttgtgtgtttagagtataattttttttaagtcgaaactgctgatattcaattctttactaatgaattgagagcatttatttcattacgtttcttaagttatttgcaatgtttttgtgcgtgtatttagagtataattttttaatgttgaaactgctgatattcaattcatcaccagtaaatagttttaactttctacttttgtatttccacttcagatgcctactatttgggtggttggttctttgttgccaattgttggtggagtggcattggcatcagttactgaggcctcttttaattggtaagtaattgtcatattgtcatttttaatttttccagatcatgtactttttggtatataattcgataagttttacttaccgtatataatgtagaaggttcttgtctgactgatgttatttgtttattattcacttgtttaaagggctggattttggagtgcaatggcttccaatttgaccaatcaatctcgtaatgttcttagcaagaaggtcatgattaagaaagaggtaatgtaaacttccagattcatatattaaacaatttttttattttatttcatgcttttaacaatatttttattgaacaggactccatggacaacattactctcttctcaataataactgtgatgtccttcttcttgctggcccctgcgactattttcatggagggtgtcaaattttcaccagcatacctacaagctgctgtaagtattttgctgtagcttaaa

SEQ ID NO: 13609 - DNA, 599 bp, Cannabis sativa
aaaaaaaaaaaaaaagctattaaagaacgaataatgaatatttttactttttacactattatattataacgtaattcttctatcatattatattcaattttatcatgaatcgagtgatgtgatggatgatagttgataaataaatataaattaaatatttttcaccattttactttaattattaaaaaactaaaaataacaatataaattattataaaaaagaaaaaatattttattctattattcgttaacataaaaagataagagatattatatttcaaaaagaaaaaggtaaaagatatttaatttacatttatttatcagttattatttaccacttcactcatttcacgataaaattaaataaaatgtgacagaagaattacatgaatgtaaaagttatatttcaaaaagtattattaacaagtcatatattgtggacttaacttagtagtgtaaaaagttcaagatgcaaaaaaaaaaaaaaaacactaattattcttaaaacaaatacccatgtaccaagatgtatcatttttagtattttatgaaaatttgtaaaaaaaaaagaccactataactatattatataatattta

SEQ ID NO: 13610 - DNA, 593 bp, Cannabis sativa
tttttttttttttagaaatttttaatattattctaaatcaatagtcatttacaataatagagaaaataggataacgaatttctcctatccatgatacattttcatccaactctagagcgtactttgccaagctatgggcaactttattagcctgcctacgagcatgagtaatagtaactctagggaaagaggataaaagacaacgtacatcatcgattagatcattaaaatatgacaagtcattatgattagaattcaaagcagaggaaactcttagtgcatctgtttccacaatagcgattgacaattggtattgtgaagcccaatttagactatgaaagagcgcctttgcttccatttcatcacttcgaaagcatccctgaacttttttagagagtgcagcaatgacttctcctttgtagttgcgcaccaccgctccaattcctaatgtctgattcttgaaatttgtttcagcatcgacattcattttaagcatgttcatagccaggaggcttccaaatgatatcatccaggggccgttgaagttgaacattgtcatctgtagctgagatgatcggttggtgcctcattct

SEQ ID NO: 13611 - DNA, 568 bp, Cannabis sativa
aatgtaatattcctcagtgattcggcggctgcaatcgacgcaattcggattgctcgctcagattgcaacaacttacactacaatttgagagagctgattccaagctttctcactgcaactgattcgttatgcaactgggagactcattggatttcccggaggcataatggtgtggcccatgctttggccaaatgggcaaatcaaactaatacctttggtacttttgatctgtccgattttgatggttccctgcaatcttggattgcagatggctgtgtagtagacatgcggatgtagtttttgtttccttttcttttctgtttcctagtttttcctagtctttctcagttagttttccttcccagttcctgttttgctggggtctgttttagttgtttttttgccttcgttggttgttcttggtttgtcctgcttctttggctgttgccagcaatcagaaaaaaaaaaaaaaacttaatcctaggaaaaaataatgtgtatctacaaactaaccatttactaaatggctgcttaacactaaaaacttacataaactatctcgtgggta

SEQ ID NO: 13612 - DNA, 644 bp, Cannabis sativa
  modified_base (524)..(527): a, c, t, g, unknown or other
ccatgaggcccttaaaaaagatgtcctgatttatttaacatttatgagtcttggtcaaagtcacaaggttgacttttttcgatttttcgaaaattgggtagaacacttatataagggaatttaacataactatacactatttacaaagtatttataaaaaagacgtataaaacataatatgacacaaacacatacaatatttatcaatataccttatttttaattgcattccataattactcctataataactaacaacattcttagaatttatatttattattattattgttttgtttggatatatatgatattactacatatctaataaattagtatttaacatgaaaattagtataattttatttttacctagtattttattgcctaatagtatcttttgattttttttttatttatgtttgactatctaatagtatctattacttgttagtatatataaaattttaaacatatatgaattagtatatacaatttcaaaatatataccggatagtatcttnnnnttgttaatattttacaattttaaatttataccaattaatatataattttaaagtatttataatatattagaatttgttcagttttaaatatagaccaattagtattttcgatttcaa

SEQ ID NO: 13613 - DNA, 555 bp, Cannabis sativa
aattgaggttagggacatctgtgtgattagcggctttgaaaataggtatttgtgactttttttttttaggagaaataccatattatcataaaacaaaagataattggttaataaattggtggtggaatattatccaactaaaaacaagttccatccaatcctaaaccatatctaagtatttgtgacttaattagtagtggactataattcaaaataaatagtattttgttttccttactttttttatttttagtgattttgcagccaaaaagaaaataggagtttttataaaaaatattagattttgagtaaaaatttgtaattttactatcatcatatggaattttttataaaatactgtctttttatagaatagtcataaaacaacaaaacagaataattaaaacaactgtggaataactataaaataatcatgaaaatttaacacagtacacaataaaaacttatacagtatttttgaaaaaaaaattgcatgaaaaagaaaaaagaaatttcaagtgtaaaaaccacaaaaaaaaatattaattatgactt

SEQ ID NO: 13614 - DNA, 515 bp, Cannabis sativa
caatccgcaaagtgcagatattcgtacttttgccgattagattagattggaaaattcaaaatccgcacttatgcggattgaatgttgattgacatgtaaaagtaactgatcaagctcaatccacacatctttataaaaaaaaattgaaaaaattatatatacaaataatattttcttgtaaagaaaataataatttaaaagtttaatacatatcatacaattatatttcaaaacttaatagatcaaatatatattctattcttatatataatttttttacacagtttaaaatagtaaacattttttatacatacaatttttttttcttcctttgaatttgttatttgttatttattttaatgtgatattttttttggaaaattagcaagtgtattgaatccaaacaacaatttatacaacctaagagcatcctctaattagaggaccttcaaactctataatctttactagatttaaaccaattctcctcgctacttgttacaatttttggccat

SEQ ID NO: 13615 - DNA, 522 bp, Cannabis sativa
aaaaaaaaaaaaaattaactaaacccacactacaacaaatcttacttttagtcacaacaaaatttgtgactaaaagtaaaaaaatgtgactaattatacaatatcattcttatggtgtgactaaaaagtctatggctaaaggtattagtaacaaaaattacaatttgttgtaagtaattgtgttattagtcacaatacttgttgtaactaaaactaattaaattagtcacaacttgtaactaaatgttatattttaatcacaagtaacattttgttgtgactaaaagttacatttagttacaaaaaatttatttataattgtaactaaaaaattgtcttaaaaaataattatttttttgtagtgccaataaatcactgatgaataattgttataattctttgaacgcactcttacaaaatgaacgtgttgtgcatttttttctattcagatgattataattttaccttataaataaagttcaaataatatgttgcatgtatttatgaaataaattatttaca

SEQ ID NO: 13616 - DNA, 671 bp, Cannabis sativa
attagcgataacaaaattaacaaagtcgtatctcaaaaatcgaagataaaatagagtagaacagattaatgaaaataaaaaaaaataataaaaacaacaaccgtaattgtactggttcaagtcctataaattgatgtgatttatgattttacttcaattttgaaattccaccgaatagtctttattgattgagaaagaacaggagtacaatacgattgagaacgattctttgttaggattctatgaaagtgtttatctctcacactcttacccaagaaacttttttcatacaaacaccaaaatccaattttttttttctctatacctctatatttcttaatctcactctcaaaattatcttctgtattttatttcttctaaagattaagatggtgatatttgtagatttaagatatgactcccaaagtcaatggctgcaacaactaagttgttaagtgaattatgacataataggtttaacaaactcattgtaataaaatcaatcatcagctttggataggtctctccaaatgtgaagcatccttcctggacagaaatcttaaaaagatgaagcatgtccttaaaaggatgttctagacagatacaaaatcaattagagcaaactattcgaaatttcttttaggaggaaagaactagccttccagaactct

SEQ ID NO: 13617 - DNA, 516 bp, Cannabis sativa
ttggcgtgaagagctgatggggaattcttctttctttttggaatccccgaacactgttgaaccgcaattctcatcatcaattcagaaggctaatcctatagaatcaggccaactatatgaggtgccgattatttatgagagcaattttactaaatctggtctgggtgatgggaagactaaaagaaggaagataactccgaaacgtctcaagaaagatggaagtttgaaaacaggcttggttaattcagtccttggaatggaagatggcagcagtgactcaaggaacatttcgagtttcacagatttgaaccttgatactactttggaagcggcgaacccaaatgttttgggtttctgatcgcaatgaatgccctattttggaatgtccaagggcttgggaacccttggacattatcaactctcaaatcccatgtcaaggagattcatcccgggatgatcttcttgtcagaaactagactttcaagtgcagcaatggaatttattcgagtgcaactt

SEQ ID NO: 13618 - DNA, 501 bp, Cannabis sativa
aaactttacgtacgtatttgttttaataaaagtaaaagattattttccaaaaaacaaatttgtaagatttttttttttttttgagaataagaatcaaatgttaaaaaacaattttctcaaaaaaaaaaaaaaagttaaaaaacaaaaataaattattttcaacggaattttaaagtttttttaaataaatattttttaatttttgtattttaaaaaatgtaaaaataaaatttttatatcctttatactattatcatattttttttaaagacatataaaatttgtattttataaaatacgaatttgagtaaaactagaattgagtaatgcacgtgtagccttttttttttagaaagtatctctatagtctttttactttgaagtttaaaattaaaattttatatcctttattatttttctatcatatcttttttttttaaaaaaaatatatatacattttcttttttgacgtggaatatatatacatttatatttgatgaa

SEQ ID NO: 13619 - DNA, 686 bp, Cannabis sativa
ctaaattcgacagtgtaaattattcattatttttaaaaactttcttgagatttactctaatgaacatcatcataaaaatagtaatttacgactaaactcctctccttgaactttgaagtttagtgcggtcaaatccttagactgaaaaaattatgactaaactccccaatttccacaatcgttttggttagcactcattccgttagtttttggttgttaagtgctaaatagacctgtcattgtgtacacaagtgtacatgtggtgaaatattattgagccccttaatattaaattaataattaaaaataaattaaaatatttaaaaaaatttaataattagaaaaaaaaaattaaattttaaaattaaaaaaaattaaaaaaattaaatattttttctcttttttcttttttttctttcttttcttttttctcatttttcatttttctttttcttcgttctgcttcttcttcttcacactacccagaaaaccatccccaaaaaacccaccgcccaccaacccctaccctaaaacccagcaccactccgaaaaaattgagaaaacatcaccacctcaagcccccaccgaaaccaccacctcaacctatatttcatatctaaatcatacaaaaataaaaaaaaaaaaccacataaaaaaataaaccatataaaaaactaaatcaagga

SEQ ID NO: 13620 - DNA, 500 bp, Cannabis sativa
aaagagaaacaatactttcatgctccaaatggaagtattttttgcacataactcatcagtaaattgattcaattgcagttattcctagggtgttttattactcacaattacattggatcaaaattacctggaaaagacttaattgtcggctttgatctttacacaaagaagaagggttcgcgtattcttcctagtgaacttggttacaaacaacattttacaccacgggaagccatatcatataatttcttaatgccccatgacccatttcatcaaatcatgaaagagctcatcaaagtctcatgtgccaataatcatgccaagttcctaaagaaacgttaccatcttttatagaaaaatcaatagttcttcataagccttccttttaagcttaatgaagatgtaaaccctagaaaggctagtcacctaggcatgaatccaaaacatcaacaaatggcatccacaaagagtcacaacagtatggtttaatagagtcaact

SEQ ID NO: 13621 - DNA, 587 bp, Cannabis sativa
  modified_base (159)..(167): a, c, t, g, unknown or other
aactcattcaaaatacttgacacaaaatttgtctcttagcgactatacaaaatacaaccagctgtcccaaagattgtacgctccaagtctaaccaccctgacatgtaaagttttcatccgctcgctctcacggctgctcagccttagccttgcccttannnnnnnnngcaaacaatatctgtgagtcgacaaactcaataagaaaagcataatcataatcataaatataacctgaattataattaggcactcatacactcaactataatcttatccccacatccaatatggtactgagtctagaatgttcgtacgacaatactactgaccataatattagcctatacttggtactctagtcatacttcaggcgtaccgatgtgatagcatcgatcagtatttgagccaaacatacatctatcggtatccaatacaacttacatgtattgataccgctatcgatgtaatctaataggcttaataaacatgtacactaaacatgtaaacacatatgcatatcattatactagtcatacctgatttctgagttcaggtgtgccgagaacctgagtggaacagctgctcga

SEQ ID NO: 13622 - DNA, 543 bp, Cannabis sativa
aaagttgttcatcagagcacaaaaacaaataaaccgattacaggtccaagtatggcgaaaaattgaagacaaagggaaagaatcagcgatgaatcggtggtaatacagagtagagattcccggaaagagttgggaatgggaatcggggaatgggaatggagttgaaatttgaagttgaaaactgaaagtgaagaaaaggcttatatatgaagagagagtaaggacacgtgtaatcttcttaggacaaagaagctttgggagaagagaagacttttgggtcaaactctagtctttccttcttcccctcaattctataatatcacttatccaaattgggtagactctataattagggaagtaattagtctatgctaattataattacattatatttttaaaatagtgaattgcttaaaaaaaaatattattagtgtctatcaagtttaatataatttaataaaatagtttttaaaaaatattgttaactaattgtggagtgtcacttatcaaaagtgttaactaatataaattgtgtttggatat

SEQ ID NO: 13623 - DNA, 606 bp, Cannabis sativa
tgcacctgcaatggctgtacttgcagtggagtcaagaagctccaagatcactaccatatggagtatattatatcattcttaatgggactttcagattcttactctcaagtccgaggaagtatcttgcttatggatcctttgcctgaagttaatagagcattccatcttgtgactcaagaggaacatcaaagaggtgctaattccaccctcaatccaaataacacaaatcaagccatggcttttgccttccaaggagacaagaaaggaaaccagaaaagtgaaaatcaagcaccaagaaacaatcaacagaagaggaataagcctttttgcactcattgcaatattcttggacatacaatcgagaaatgctacaagattcacgggtatccctctggttttaaccggcaaaataaatccaaagatgctaatgctaatcaagtgcaaactggaagtgaaggagacaccagcacacaagaatctcatgccattcttccccagctgtccactgtccagtaccaacaattactgaatttgttggcttctcaacaaaccagtaatcatactaatgagcctagtacttcaaccaacaacacaggtattatctta

SEQ ID NO: 13624 - DNA, 607 bp, Cannabis sativa
ttattgtacataatataatcattagaaatcattgattttttgttttagtaagtcatcttaaggatgaactaacaaactctcttaaagagcaaatggttcaacatgtatattgtctagcaattagcaagtaattactaataatatgactggttagaattttatcaatgacttatggatctttaatgattaacatggaaaacaaccattaaacttaagggttgttgtgaatcacaatcaatccaatacttgaggtgaaagtttgagaaaatatgaatgatctttgttagaaatatgtaacccttagaccttatagttttttttgatgaaatactcatttatggtatttgggcccggatattttcttttacaattgtactctaattgtatatatacacgtatatctaaaatgtgtacatgtcataaagtcagtttccaactttatcacaactcaaaatatgtttgagaaataactttatatttaaaaactaccgttgaacagtatcaaccgacaaagatttaggaaaatttggagtttactaggctccaccctatgtccaataattttcagtttcttaaacctctcacacaccattatctgagtgtgcca

SEQ ID NO: 13625 - DNA, 645 bp, Cannabis sativa
cataatgttttttctttagggaaattttttgttggaaagtgatgtttggtttatcctaatgtaatcctaatggtaattggtaatctattataatgtaatgcttattacattgagtgtaatgatgattacataccaaaatcaatgtaattcccaatacaattccactctattacaaagaaaaaaaaaataatattttaataaaaatatagtaagaaaagccaaaatctatattacccttctttttttatatatattataattttataataaaagttattttagtcaatacatattttatttcattacattcttataccaaaccaaacataataattctaattacaatgtttattccaactataaaccaaacattataatcaattctaattagattaaaaaatattatacttatattaaaaaatatttatacctatattataatcactcttattagatttatttaattttgtgggggtttttctactattttaatttataattatcaaatttaaaaaattacatttaattttttaacaggtaatatttttgttacattaatataagtgagtccgtcactattagctttattattaccattacattacatcaaacccaacacagctaacttcaaattgtaaagaacct

SEQ ID NO: 13626 - DNA, 672 bp, Cannabis sativa
tggattggattcgagttactatgcagattagattggatccaaagtataaaatccacacttaatgctgattaaatgcattatatatgagtaaaataatgcggatttaattagattaacaccataacattgccttagtactataaggccatctctaatagaatatgtaaaaattgtgttatatttggcacaaaaagtaatttgatggtagatttatgtcaaattttagcattgtgctcgaatgcacaattgtaaaattttgatgtaaaatttaatatctaattaatatttttatttaaaaaataaaactaattacactttatcatcaattatattattattttaatatgtaagacaataaaataattatataaattcttcataatttaatgctatagttaattatactaataaaataatataaatgctataaatgtaaataaaaaaatagtgcacttattgtgatgtaaattttatatcataacaaatattgtattaaatttgcacaaaatttattatgtggcaaatttacctaactttttgacacactattcaagtgtactttttgttaaataaactatatttaactttacaacacttatttacattttcattagagatattttaagccttattagttataacaccgttcgagtcaaataatatgataccttt

SEQ ID NO: 13627 - DNA, 552 bp, Cannabis sativa
tttttaattagcaagtaaaagtttataataaatttatatgtaattataaaattaatataatttttaaattaggagttcttgataatataaaattataatttgaatattttaataattttttgttattttttaattatttttaaaatatgtaattatttataaaaagaaagtaaattttcaaaataaatttatgtaaatattaaattaacataatttatataaataattattatttaattaataaaataattaacaaaatttagaatgtttagaaaaaacttttctattaaaaataaaaaaaatacaattttaacaaacttaaatttaattatttataatcaattaattatattttttagttatatttatttaattattaaattatttttgtaaatatatttatgtaattattaaattaatatgtttatttatttataaatttagtaaattattattttttaattataatattaataaaaatattttcttgtccttatcattgtaatgaattaaaaaataaattgaatgtatataattaattattaaaatgag

SEQ ID NO: 13628 - DNA, 574 bp, Cannabis sativa
agtacgtaccagaggagtggcatcgactttgacctcggtcaaaaagacaaaatcaagagagggtgatctgtcagggacttcaactcacgaactgtagaggtttgccctaaccctctacagttccaagcaacgcctctcatggctcctgtggaggagatttgacattggaagaactcttatttcagtaataatattagttttatacccaaaattccactatgtgccaaaagctgacagtgtcctatagaaggaatgtgaatcaactctaataataaaataatgatgaatcattaaatgcaatttaaataactcgtcccaattaaatataagtttgatagataatgttcaaactcgttagctgtttagtcttatgcgagacaagaataataactattaaactggtattgacgagacatatatttgcctcaggataaattcatttacatacataagaagaagatactctcctacacgagcagattaaatgtagcaacacacaaccaactcgcgttacacataacaagaagatcacctcgcattgctaataccaataaagggatatgacgagatgaat

SEQ ID NO: 13629 - DNA, 1063 bp, Cannabis sativa
ttatcttatccatttttttaaatcttaatttaatattaacctatttcagccactaaaacacaaataaaacaacaccaaacaactatcacccaaaatgaccattttaccctccttaacaaaacttaatctattaaaaacctagggtaatttagtaattttaactaattggccaaaccgacaacttaaaattctagactaatttggcataattccaaataatccatcctatatcgtcgtgacatctttgaccactttgtcgagtttctacggccgccgaacccgaaaatattttattttggaaatggtatccacgatacccctgtagtccgataaaatctccgtaattaataaattatgctttatttattcctttaattgtatttcactaattaacccgtaactagcttaagtaagattataatcttactcttatagccacttaatcgcatatttaataaaatatgcccagttaaatatcattataattttcgggatatatattacataaaaagtaatcagataaaaaaaataattgaatgaatatatgtataagtatgaaggtataataggcttataggttatcatatcacatagtaatatttgaacattccttatttttttttttaatttttttttcttcattttttgaatttttaaaatataatatcactatttttataattttatttgtctatctaaatgtttttgttattattttaattttttataaatttattttcagttttttaaatagtcaaaataggaaaatgaattaagtattttttgtactttagagatcaattttttgtattttcatataataaatttatgacaaaaatataaaaatataaaattataaataaaattgataaatcctaccaaactaaccattattccttactactttaaaattaatacaaaagtaaaatatattttttataaaataataaaaagatatttgccgtataatttaatatagtaagcataagttataaaataaaaattcaaaaaatatttattaattagtataataatcacatgattatattacctaatattaatt

SEQ ID NO: 13630 - DNA, 802 bp, Cannabis sativa
ttttttttttttttgaggaaactgatttataacattaatgaagaaaagttaggttacaaaatcagatgaaggagcaattgaaactattacaattccaaactaaatctctatccgttcctagagcctttttagcaagagtgtgtgcaattacattgttttcttgtggaatgtaacaaatcttagcactaggaaaagaagataaagattcattgattttcccaatcatgtctgataataaagatctatccttccagtgattctttattttatttactaaagccaagcagtctgtatgtatggaatgcaaaggaagtttaacagcattgcaccattggagagcttgaagaagagcatgagcctcggctagaaatggagaaagagcacatatttttgaggaacatatagcagctgtagtctgacccttccaatcttgaacaacagccccaaatcccattgttgaattcgacatagaaagggttgcatcagtgtagagagtataactgcctaatggtggtgaagaagtctgctgatctgatgaaggggaagcagggcatgaaattgaataatgttgctgacattttgagtattcctacaagaaatcaaccacataactttctacttcttctgctggaaagttcttagattgaaacagtgacaggttgtgcctgttccagataacccacaaaatagtgaaacataaacacatatgatcttttgtcaagccatcaaaacctgtaagaagaaagtcttttatatcctgaaattgataagtattataaaagttagatagactggttttcct

SEQ ID NO: 13631 - DNA, 692 bp, Cannabis sativa
ggctaatttttggtgtctagcagatcccgctgtgagttacccggaacatattttcgtaacccccttggggtggattttgatgacgatagcttcagaaattttgattggagtgtgagacatgatttgatagggcgcttaaatagcttctaatgcaagttcaatcacatcaatcgaataacaattgagtgagttatgaccattatactgaaggcggttcaggtcccagcacctaggttgacatccaacacccaggttgacatttcggcacccagcctgacatccgacgtcaacctggacgttgtaaaattgtagaaacgtccaagggaagtcttttgagatttctaagtgatggtttgacaccccttagtccttttataggttcaggtgaagctggtcacacattctcgaagatgttgctattttgtaaaaacagaagactcggaacttccagattccgaatgagtcaaaattgaagttgtgaattttattgatctgacttcatggatcattgcatttgtgaaaaacttgacagacggttgtaacggcatcagattcggataagcagaacccaaggaaccaggccatttgttgacctgggggcaagggcctttaaactgagcattcaggattctgtttttgatacttccaaggcttctaaactttaggatgggatctctgttgggttttatgcc

SEQ ID NO: 13632 - DNA, 603 bp, Cannabis sativa
ctttaaaaaaaaacgtatttcctatttttagtaatatcacataaattgttcataattttctaaacttattgtgaaaggctctaaataactatatatatttactatatatatatatatgtatccattactaaaaacatgtgttatcccacaaaaaatccaaatccgaagagatttgtgtggattcttcttctagtataaatattggtcattgtagatagagttgtgatataacacttgagaacacatgaacaataacatttaacgttagaatcatgagaacacgtgactaacgaccttcaaagctaagtcgtgaggacacataaggacatatgaccaatgaccttcagagctagagtcatagagcacatgaccaacgaccttcagtgctccacgttgggctgacactcagtgctggtatctctgaagtccaagtaactcatacgaatttgagtctacgtgaagatgcacttttgtgtgccaccaaagctatagtccaagaatatctacaacaactatcgttttttgagatatttattttgaaatattattttatattttaaatttaatttaattatagtaaggaaaaaagatatgtcaggttaa

SEQ ID NO: 13633 - DNA, 613 bp, Cannabis sativa
tgactttgccaaggctgttctttcatgtcttcatgaggggattgatttttttgctgtgaatactactcttatttctctgattcctaaaaagctgcatgctcatactcttaaggattttcggcgtgttagtctttgttctaccttttataaggttatctccaaggttctagctaatcgtttaaaagctgttttggataaaattatttccccttatcgaagagcttttgtctcgggtcgagtcatttttgataatattcttattgctcaagagattggtcatgctattaattctaggaaaagtgggaagctcgggtgggctgcacttaaattggacatggccaaagcttttgaccgtgttgattggcattatctggagagtatcatgttccatttcaattttccgcctagatttgtctctcttattatgaaatgtatcactactacttctctttcttttttgattaatggttctatttgtggttcccttcagccttccaggggtcttaggcagggggatcctctttccccttatctctttattctttgggctgaaggactttctgctcttttgcgggctaaacaagatattggtttgcttaagggtattgctatt

SEQ ID NO: 13634 - DNA, 1112 bp, Cannabis sativa
cactcaaatattttcaaaacttttaagcaacggactttttttatgtttccgccgctaataataaaaaatctgacaattttattattagcggcggaatcctattattaccagcagaatagtccgccgctaataatatcgtatagaaaaaatgctatcagattcatttatacctatgcttccttcattttctttctcttctctctcaaacattcctcctctacacccaccttcctcagcccttccccgcctccctccgcccacctaaacccctctgcccggagcaacaccaccacccttaacgatctaccacaagtgcaagtttttttagcagtaagttttctattttaacatttattatttatatatatataaatatatctttaattctataaatatttttctaatttttttctaatattgttaaggtctctactatcttaaccactattggctaaaaccaaaagtgcatgaccgatgcatattttttggtaggtcagttttttcatctcttttttttttccttacaatttataattttttgttaataaaatagttatatatttgattatttttagtgtgaatgtttaaaatatatattttttggttaagtgtgtgtatgtatatatgtacgactaaaaaatcttaaaaagttaatatttttctatattatatttttagtatatatgtgtatgcattcatttatatgattatatagatgtaatatataataataatcgtaattctttatgtatttattatttgataataattttgtgttttttcaaatttaggaagaattttttttttttggatattttgcaccttattggatcagtagtattcacaaatttatatttgtaaaattatgtttttaacaatataagattttcttttctcaatctaacaaatctgatttaggtatataatttttgaaatttgaaaaataataatttagtaatgtaatttgttagtaatgaaattattaaaaatttaaaatgtgatgtgtttgtacattgtttttgttgaataaagatcttctgtctcaaaactctctgtccctcttgtcaaatgacgacacgtatcaattattttaaaaactcacgtgatgatta

SEQ ID NO: 13635 - DNA, 631 bp, Cannabis sativa
tttttatcctcaatggtatagtatatctctttattcttccacctaaacttttcacctcatcaaacatttttcactaagcttataagactaagtgtaagtaaaaaaataattgagaaagtttagtcgtcaaaaactgtaatatttacctattaagcaagaaagagtaagagggttccaactctgtatttttcattaaaaaaaaaaaaagaaaattaaattatttattaatataagaaatttttctagtagatcaccttaaagggttgttttagtagacgctttatctatttcggtattttttttttaaaaaaattagtcttattttttaataaccgagtacgtatgtttgtaattatttaagaatacttataaatttttaaaaaattccgaataatttacaatgccgaaaaaaaagtttaaacagttacttaccacatgtatatgaaaaactgtttttatttttaatattgtaaattacttgaaattttctagaaatttacaggtagtcttaaataagtataacatacacaataataaaaaaaataaactaaaaaactctcctaaataccaaaacaattagagaatttatcaaaatatttcttttaagaaaatgtactatacacttacccat

SEQ ID NO: 13636 - DNA, 519 bp, Cannabis sativa
ttatattgaactgtgtagatgccaaaatccataatcaatcgaaaatggtcttacatcttatgcgggcatagacaacctatagaacaaagaagagactaatcgaaaacctcaggacattgggatagtgctggctgaagggactccgatgggcaagtcagcaagattgttaacaatgtagcaaaaaagagaaaaataaatgactgaactaaattaccacctatcttgatagtataaatatgtagttttagagagaatgaaagagtgaacgataagtgagaagtattgagataaatgagattgatttgcctctctcagtgactgactgagagttgcttttataggcattcatggaagaacgttactcatgaccgctcacccctcttgggaagcgctcgttttccactttagtagggagattgttatttgcgtggtcagtttgacttgaccacttcagagatcgttagatgagtaataagacttagtttcatatacgtgtcagatcattgtgagctcagtgtc

SEQ ID NO: 13637 - DNA, 514 bp, Cannabis sativa
aataattttggagaaattaataggtgcttttacactacatactgaagtttctaatttttttacttttattgtatagcgatttttatttttttttcaaaaatactgtataagttttacattgtgtactgtgttaagttttcactgttgttccataattattttttagttgttccattgttgttttaattattctgttttgttgttttacagttgtttatgaaaagacaacatttttgtaaaaaaattccgtgtgaccgtaaaattataattttttttttctaaaatcaaatatttttgtaaaaacccaaaattaataagtgtagaatgcttaattcattccatacaaatgagctgattcctcatccaccacatatttaaaattttaatcaatgaattttattttatacactttccattacttaatctatcacatgtataaattgtattaaataataagaaatatatttataaataaacaattatattgtattaataattacaattataataattg

SEQ ID NO: 13638 - DNA, 551 bp, Cannabis sativa
  modified_base (412)..(427): a, c, t, g, unknown or other
aaaagtttctaaactaacataaaactgtcaaacaaatataaaacaactaatatgctaacacaatctaaaaaagtataaaaagtacacttacattgattttagcaacaacctctaaaccagccaagacaacttggtcatcatcaatctcaagctggcttaaaccattgaaaaaatccatctccctttacatcagattctttgcccttgacattttcaacatccttggacctatcttcaatgcatgcaacaacctcattttgaaccacatcaatagccgaaacatcagcaccaaccttagcatcaccaaaaccatcaccaccatctttacccaactcatcaccatcaacagaatcaattttaatattctctaaatctggtaatcttttgtcatcattatcatcatcatcatcannnnnnnnnnnnnnnncatcatcatcatcagaatcttgggcaacaaattcatcagatgactttacctggttgaaaacagtattgcaactgaaataaaacaggaaaaaaccaacaataacagaaaaaatatgaaaaaaaaa

SEQ ID NO: 13639 - DNA, 787 bp, Cannabis sativa
tggggatgctaatgttgtgttgatcccgaaaaagaaattacctgaaagtatggttgaccttagacctattgctttatgtaatgttctatacaagatcattactaaagtaatggctaataggatgaagccgtacatggatcagattgtttcagaatctcagagcgcgttcattccggggagacttataactgataatatcatggtttcctttgaggtactccactacttgaagaggaaaagaaaaggcaaggatggcttcatggctctaaaacttgacctcagcaaagcctatgatcgtattgaatggagatttttagagtcagttcttagaaagttgggcttttcagatcattggatatccttagtgatgaaatgtgtgggttcggaaaagtacaatgtgattcatggaggaagaacaatggggccgattctaccatcccgtggtatccgccaaggtgaccctttatcaccctatatctttattttgtgtgcggaaggattatcagctttgatcagaagatatgaggcaatgggttttattcatggttgtaaagtggcgaatggagctcctaaagtttcccatatgcttttcgctgacgatagttatctgtactgcaaagccacccttcaagaagccaatcgaattaaagatcttcttcaccattttgaatgtgcttcaggtcagaaagtaaacttggggaagtcttcaatcttctatagcaccaatacagcatctcatgttcgggaagatataaatactcgtttacaaatgccacaagcagatgaa

SEQ ID NO: 13640 - DNA, 673 bp, Cannabis sativa
taataagaatggtcaataattcacatcatatattttgcatgcaccattgctattaggaactagtggtgtttagcacttttaaacatatcatcttgtcattgattagcgatacttcctaaaagttattacattaaagtatatgagacctgatacttaattagatcaatagcgataatgacacataagaagatgttagacatcactagtaccttttaattagcatttttctaaattattatgtggatcaattattataaaatttaacaatattttagtggtttgcgtattaatatattgaattatttttatatgtaaaaatttatttattgatttataataaggtgattaaattactataggagatgcaatatgaaatcagttttttgagtggggaattaacaactttaagaggattgttgcaattggtagtggcacctcatttctcatcacactttttttattaatcaattaattatttccatatatatttattaaaggaatttttttttaaatgaataatcataagttttattagacttcaaactcagctaccaaacatgataataattcagttaagacatttctcatactgaaactacatttaggatataaactagaagctcttgcaaaagaatgaactatactacgcttgttgaacgtttaacaaaataaa

SEQ ID NO: 13641 - DNA, 528 bp, Cannabis sativa
atatgtggaaaaaagaagccgcctaagttgttattatatgcatcactatatatagaacctataccactacattttttatttgtttttatatgaggggatttttcagtttattattattttttttatttgtgtatgttataattatttaaaatattatgtaaaatttaaaaaaaattagaataatttataatataaaaattggtatttaaacagtttatttcatatatgtataaaataattaaagtttttaattttattttcggcgtgttaaatttttttaaatttttaatttttgtaagatgccttaaataattacaacattatacaaacataagaaaaattagactaaatcattattccaaatactaaaacaaataacagtatatcaactttttttgtaggggtgcatattatggagttttaattgaatatatatacataattatacatattattattattattattattattattattattattattattattattattattattattattattatgtgttctttt

SEQ ID NO: 13642 - DNA, 513 bp, Cannabis sativa
tatttttccatattttttagaataatttattattattttaatagagcctccttccctatgaaaggatagctcctctaactcatttttcacattcaaaaatatacccataaggtcatagcatctctctctagtttttctctttaaaaattagagtttacagacttagctatttttcttgtaatcaatcttatgagtataaaaactcaaagtagacattgctctattactgttgcaacacaaagagtgaactactatagattcttgtgtgctctctttactttacatagttacttacaactttcatctcgtccatacatatgagcaagttggctaaatttttgcgtcaatattttggtgcttttattgagagccacaactcaaaaaatcacttacaagatgtttgcaactcgatccacaagagcggaaagaaccactattggccatcagactgggggcacgccagccactagaactggtgatgaaaccacacctacatcactgatgccaaataga

SEQ ID NO: 13643 - DNA, 689 bp, Cannabis sativa
tttgtttattagtaaagatataattgtgtaaaaattatgtagcatatttatgatattaattttttttgtgttgttattctattttttttttataaatttttgttagttaaaattttattttttttctaaactttgtttattggtagataataatagagacaatcagatgagcttgcatttagtcaaaatgattggtgatcttactttcaacaagagaacctatacttatattcttgtttaaatgtaattttttttaataattatttaaatataattaataaaaataaaaaatatgattataacaaatttttaagagtattaggtacatctggcaacgactaagtatatatttttatatatataatgatctattacttttgaatagtgctaaaatctttgagtctttgggacaaagaatagtgactagactattaaaaaaaaaaccacgaattggttattggtgactgctatatatccattgttcgctcactcaatcatggagatataagccttattaatattattccctcttaccctggaatttgtatcaactcggctcccccggtttggccttcatctctggatcaaataataataattatatatatgtttgattcatagtactttttattaagtaattaataatgcaataacatagtttaactagccaaataaaataaacataatgg

SEQ ID NO: 13644 - DNA, 502 bp, Cannabis sativa
ctatttttttttattttttattatcacgaagtgatgtattttttctttttgacctttttttctcttttttttttattaagatattttaaaatatttcttttttaaataaatgataactctaaaatttttggttataactcaaaaatttatcctcatattttggcttttggactttttttttctatatttaaaaaataatcattttttttgtcgctcattactaaactctttatataaagatatatatatatatatatatatatatcttaatttacgttctttttttctttctataaagtgttattttcttaccgactaaaatattaataagaagaatgtaaaattgataagtcttgatatgatttttattgatgagaaagtgattattatttttattcatatttttcatcttctactttttttttatcaatttattaattattaaatactcaacgtgcctaacatttattctacaaagaagtctaatgcatgcaacaataag

SEQ ID NO: 13645 - DNA, 613 bp, Cannabis sativa
aaggagaaaggtgtgcatagttttcgtcaagaactagaagtctagaatagcaatatgacaaggtaagtgtatgtggaagggtttagttaaagtcagtccaataatttcggacaactcggccttgagctgatggagtgtcttttaattcttttaattggtccacaatatgaacactaatggtattttatagcttttaataaagagaaatgttaatgagtatcttgcttaatatttttttgacgtgtaatattgctattggtgtaattaaatattgagttctatatattttactttaataaaaattataaaagatcattaattaattataaagtattaccatgaacatgaagtggtgctagctacattaccttattgtaatacaattaaatgtataaaaatttgaatacaatctaccatcaaccacttaatcaaaattccacatttaggtattatatattttaaaaaaatgtcaacatttactaagtattgaagtaattattaaagcaaacatttggataagatgagtgataatattagtaacaataatatataaatttcaatacgaattaaataaacaaaaattttcattaaaaaaaaacaaaaattcatcact

SEQ ID NO: 13646 - DNA, 606 bp, Cannabis sativa
cgcagtagccatgctaaagcgacttaagtctgccttaagtgtctcgccagactgttactttatggttgtgagtgaggacgctttggatcgcctatcccttacagcctggaactgtcttttgaagtccttagacaactgttcccaggaagtgatggaatgatgagtaaacttattgaacaagttgcttgctgctccaactagtgaggtgtgatacaaaatacaacgtagtttgtttgtaacattgctagctcgcattatagtattaaagttattcaaatgcgagaccggatcaattgtcccgttagatgacgagacgtgggggtttttaaatccttggggaaaaggagtattaatgatgtctggatggtatggctcgagttcctcgtctgagtcatatctagattgttttccttgttccctgacttgatatcttctgaacttatcctccaactcatctatttacaattggattggatccccttgctttggaccgagttgttggcgaagattaggttttttctggttcaagtattctcgcagatccggttggttataatttcaagctgacctcgttctactcacggacttcgtcctactcatggacct

SEQ ID NO: 13647 - DNA, 612 bp, Cannabis sativa
aaacggagagaccactgccacgaacgaagaccacaaatacaaaccacaagcccacaccaacctggcattctctataaattttctgatttttttttttcatttttttttgagttgatccaatagtatttgatatatgttcgatagtaggttccaaaatttaagtttttaaggtgatggagaaggtctgatagtggtctgatgtaggttcgatgcttagcaataggttggtaggctttttgtgttcgatgagggtccgatataaggtcaatgattatttgatgcttagtaacgaattggtagggtttttgtgtccagatggggttcgacactatctgatgatgatccgatggggtccggacgtactgagtctgatattagactaatatcggactcaatacgttctccaatatcagactcagtacgtccagaccccattagactcctattccccatcggatacgaaataattccaccaatcagttagtaagcattagaccaccatcaaatctatatcagaccttcaccatcaacctcaaaaacttaaattttggaacctcctatcgaacctatatcggacactatccaaccgactcaaaaaaaaaaaaaaaaacc

SEQ ID NO: 13648 - DNA, 615 bp, Cannabis sativa
tattatcatttttttttctttaaatgaaggtcgagtagaggtttgagaaagaagagatttcagggcaacacgtgtaaaatttattttttaaattaaatttaattcgcataatagttcaatgtgaattaaattaattattttttaatattaaattaattatttttttaaatgtaacaaattaaaataaataaaataataaataataattttctttatattaaaatattatttatatatataatttttcaattttttttataactatacgtggcttaaatcgaatcatttattttgttaattaaaatttaattcacacaaatataagtttaaattttccaatcatccaataatttagattgaaccgattatttcacgaacacccttaaaaaagaaaattccctaaaaagtcctcattccaaaattactccaactcgatcaaagattaaaattattaacataaaaaaaaaaaaatcatctcatttttaatacaccctaagtagatatgcggggcatatgtttttgttcagctaaaaaaacaactttgctttttccttcttttattggatatatcattaaaatcatatataaacatgttaattaactttacacattaac

SEQ ID NO: 13649 - DNA, 765 bp, Cannabis sativa
tctatataaagaatgtcttatataatatgaaaataccaaatatatgtcataaataaaactaaattaattccatttattatttagtgacttggacttatttgtagtaaaatttattgatacaaagattctttcaccctcaattataaatttgttataattaatcttttcttaatacttttaataatttgaaacccaaaaaaaataataaatacatgcttaaaaaaataataataaactcaaaagaaaatgtaaataaggatagttttacaaatacacaaaaacaataaaaaaaattacagaagtacggtttaacagaattttaaacatttttatgatttttttaattttatttacagaaaatacgatttttttatgttgtactcttgtcaatttgttgttgaatttttgttatctgcatgttattttgatgttacttttatatatttttcttgttgttttcatgttatttttataaaaaaccgtaaaaatatatatataaaaaaaaatctttcaacgtaaaaaaacgtaatttttttacaaaaaaaaaatagtatcttatataattatcgcatgtaaatatatcttaaaaaaatgtaaataaatttaattctttgaaaaatgcaaaaaatctcttatttttagagttttaatacagagatatttagtgtgtgtacataaatgtgtaaatatttttcaccaccttattataagaatattatttaacatattagtacatgtatctaattctaacaatttcatgttttt

SEQ ID NO: 13650 - DNA, 565 bp, Cannabis sativa
gagaccttcaaagggttacttgggtagcacaaaggaaagatgtctcattcacccttaatgggataccgtccttgaggaagatgtatccttgacctaaaacatcaacacgtgtcattagctagtaccgggaaaagatgacaagctcccagaactcaaggagtttcaaaagcttggggagtaaatgttatccaagttttcgtgcatgagacacatggcatgattaaaggacaaagtgtattagcggaaaggattaatcaaattaacccatacggtatcccagagagaacatctcgacaatcctggaagtgttcgttagatgcttgataaggcaagtcatttgcaggaaaaaaaccccttccaattcaaaagatggttaaaacagaagactcctggatgaaacttccttaagtaatgaacctggagcggaatagcagtttcaagggtactgaccacgtcaatatcacaaaaaaattgctctatagatggttacactatattctgacatcagattagatcttgtcccttcatgccaggccatggcagtgtgcatacgcaccgcaagaca

SEQ ID NO: 13651 - DNA, 601 bp, Cannabis sativa
ttaattctctaaagaaaaaaaaaagtaaattatgttttgaaaaataaatttagttctatgtagataagagtgtcacttccttgtgctagtcatgtaattgagcgtgatttgtcatttccttataatcgttaaattgtttaatgaattctatttctcaaaataaataaataaataaataaataaattgtataaaatataatataaaataattgagcttaactaaacaaatagttataactctaatcttttgaaaaattcgtgataatttaccacactagaaattaatagaatacaatgtcatttattttatacgagtataaaatagactatttagttgagtaaaaacaaagaaattaaattaataaactgtttgagtctttttttagtacaataaattatttaattctaaatagctataataaatttattattaaaaaaaataaaattataactattctaatgtcgaaaaaataaaaaaaaaaatatgcatccatatacctctttgtgctaattaggacttacgtcgccaaattttgacatgtactaaattatgctcctgaaccctttagactgttaattttttttccaactattgagattg

SEQ ID NO: 13652 - DNA, 557 bp, Cannabis sativa
gtctatgccataactcgacattcatatgccattgctgcccgtacctaatcaggtatcaccgacaagtatgtcccatcacctaaccaggtgagctcatatatcacattcatggtatcatcacattgtcattgcctaatcaggcaatctttttattacataacaataataaccgtatcttaatctcaatatcaattaattctcaacaatattaattgtattacaatataacatgctatgtagtacaatgtacttttcttatatttgatccaaattcatgcatgtcggccaacccaagtggagaaacatccccaatgatcttggccctatgtcataacaacagtaaaccaataagtgtttatcccaaaatgctgcttaatagttgcgaagggaaatttaaggtttcctaccaaaccctgtagtacaaatacattaaaataaaacttatattttagctctaaaacacacaccacattgtagagctcattgcaagcttcaaaatggtatatagaatgtccaaaacagacattggagtgaaaagttacgacaaaaatacgatt

SEQ ID NO: 13653 - DNA, 625 bp, Cannabis sativa
ttgacagttgttttagttcttttgagttctttgatagaacttgaagcttcactggtctgggtagctcattttttggcccttttgtcgacgagcggagggttgttgaacttattttccaagtctagatccatatctacgagataaaagagatacattaacacttaatcaaaaataaataaaaggaaaatggggaataaactcccacttatagaaagttaccataatcatcaaatgatgaagaagggggactataatagttactaaatttcctagatcatgtgatcatgaatatgtcgtaaggattaattggatctaaatcccaattcgaatctgggtggcttgccctatccaacttggcccatactgctcggcaatcccatagtacgagttagtgcaactaagttggacgaaaaaccttgggtaccaactatcaaacctatgggttatatggtctatgaggaaagggttccaaatataaaaactatatcgactatcttggaatgttactaacgaagtatgtttagcactaagcacagtaggtgaccatccacattgattacctcgggaggctccttcttcagcttcacgagggactattctctaaagatagtgtgtgtgagccacg

SEQ ID NO: 13654 - DNA, 886 bp, Cannabis sativa
atcttaacatcaccatgaatagatgtttacagagaatgttatgtgttatttttccgatttcctcattaattttgttgaggggtatttatagcgattggtaagaagaaataatgtctcagttgttctaagtgtcatccatgggcatgcagaggttctcaaatgtatgaaatagggcatgcaccacctacatagtagacaacctaggttttaggtgagattagccttcatcccttcttgattgacgtgattcttcataatagagttgtcacttatacccttgattatcgtgtactcactaaaagacgcgtttacgacgtctgacacgtcctcttatacgtattcccagacgcttttcccatgctacattaaatgcgaggtgacaattcatctccaatttcactagtctggaggagttcatacgcccttcacctcctaaagggaactagttactggttatcttagaggggatttagttaagtactctgcttatctccaggtaaggggtctaggtttgccacgtgtcctatactaaagccgccacgtatattgggagaagcttggaacaacaatatcctattttatataataacattttttctttcaaaaaaaaaaaatatatataataaaattataaaatagattattgaaataaaaaaaccaaaatcgttgtaaactatcattcttcattaaaaaaaatcttattaaaatataaaaaaaaaaaaaaaatcgtatatcatttattctatataaaatgtggctatgtaataaaatttttagtttaacgatcattttattttatttaacactatcactaacgtcgttacactgacacagttaacttattattatcaatttttttctcttaaaacttatattgtgatttcca

SEQ ID NO: 13655 - DNA, 703 bp, Cannabis sativa
ggagctttggcagaatcgatgttttcgactcactatagttaccgcggtgagactatctatggtcacagcgacgcctctgtatgggacaaggatatctttgtcttttcgctattttgagttataaaattgatttttataaaggggttttgaattttagtggaggcagaaaagaaccctagaaacacaagaataagacttttgaaatgagtgtggcgatccgatcgagttctccacctagtttctttctcttccctttaatttctttatgttttattatgtctttagtttaatcatggatttgattgttgaaattataaactaatttctcaatttagagatatgatgaatgttaactgattttattctatgagttaatgtgatttgactatttcttctttcttgttcttgtggtttgttcgtatttgttttaatacatgtttaaacttgatcaccttattcatgattcacgatcctaatataaaatcttaaaagtgaatattaggaatgctctaattgaacaagcacaagttttaatgtgaaacgagagtattcacatagcttatgtggcatttagactattactcaatgcaaattatatgttattctatctcaaagatacaataattagcatataatttaggacttttagatcagaagagagttataatctgtcatcatgaaaaaggaaaaagactagttaaat

SEQ ID NO: 13656 - DNA, 528 bp, Cannabis sativa
tctaaaataaataccaacactaacaattataaaaaaagtacagaaaaaacgatgatatatatatatatatatatttatatataaagttcatattaaaagttattggattgtgtttgttttaagaaaagataaaaattcacacaaaatgagacaaacgagacttattagaatatataccgaatatgattataatataaactattatcgatatatgcctcaattaaataattcacgatatatatgtaaataaaatgataagaacgacttttagtgtaaataatccttatattttgcaggtggtatcatttcctattttggaggaattaaaattgctgtatcttgatcatgtaaagatgatttggccagataaatttcaagaagtatcttacatgcagaatttaaaagatttaactattagtggatgtcctaagttaaagtatctattttcttctgctgtggcaagaagtttcattcaacttagaaatctgagagtaagtcactgtaggaatatggaagagattgtagtga

SEQ ID NO: 13657 - DNA, 607 bp, Cannabis sativa
caatgtgggactaactctaatagcgagtttcatatccaccacataaagatgcttaagacgagtaggcttatcataaattttaaatgtcataggtcttggaagccaaagatcttccaataccctaacattatcactagtccccacccttcatctgtagccatttaatatcaccttcttcccccaaaccaaactacaccaaacgaatgacgcatatgtaccacatacagcctccaagatgcctttattagggaaatatgaagttttcaacaccctactacgaattcgggaacctaatgcacctccaaattaagtttgaagtgtgtaattactttttgttctactggattaattattagaacgtgtaccattaaatattaaattataagagattaaaaaatatatatatcaaataataagatcgttggtgtttactcataatttgtatggctgttgtaatgctacagatttatcgtcagacttattttgtaatgaccacgagatctaacgttattaatctatatattagtttttttttaaaaaaaaacaaaaaattgttactaaaattatgaaaattgtatggtcattaaattaaataatatatattaaa

SEQ ID NO: 13658 - DNA, 968 bp, Cannabis sativa
caaagccatcaggtatggcaaacagcataagagatcgatcaaaatgcaagggttgaccttcatcaacccttctcctatgcccttcgcaaccaaaacagaccatgaaaagaccagattggtacttagagacaaggaaggcgagacgtgtgatcctgacatccttcatagcattgcaaatccaatctggtttaatggttttgggggtaaggattttcacaaccaggcagaagcttttagaatggggttctgggcagatggaaacgttgtcaaactcatggattaaagcttcttcttcggtaagatggatggcaagagatgggttttcagaagacgtagacatggctgggtgcatgcaagtgagatggtagaaaaagagaaggaaatgcagggaaggtgataggtaacaattatggaaaaacaacaaatttatccacttatagcaactttataatttatgttgaactagattagtaggatcataatcctacttattatctaattaacccataatataattataaacccaaattatttacaattaggcttatcgagatattacactggtcaacccattaacacattgtagacatcgcggatgtcgacgactaagaagtcttgcatttgattcgcggacaatggtggttcccccatggttagaggaagttcaattatgcccaaacttacgacactattgcttgtgaacccacacaaatttaccatgcaaggtcgtaattttgcttcctctaatcttatattctttaatgtttccttataaaggatgttaacagagctcccattatcctcgagaaccctctttacccttttattggcgagttgaattgttattacaagaggatccacatgtgggtatcgcacatgctttgagtcttctttagaaaagacaatgggtggttcatatgattttgctttcttaagaggttctagagctaatgctgatgtctcattct

SEQ ID NO: 13659 - DNA, 616 bp, Cannabis sativa
atagttggtcatagcaaaaacagttgctcatacaatcatagagattcaaatatcattccgaaactctatttttcttgtgaaaatatctaaataaattcgaattaatttcgtaattaagtaagtttaattgtaaacagtctttttcaagttaatagtagaagttgggatgttgatgttgtgcgagatttgttctctcctaaagatgctgccataatccttggaattcctttaaacccctctagtggtgctgattcgtggtattgggttgcagagaaaaatggcttctattcagtctgaagtgcttataacttgcttcaaagtttgaagcactcctaagatttttaaggatctaatgagatatggaagaaactgtggtcccttaaagtgcctcccaaagcaaaacatcttgtttggagggcggtttcaaactgtcttgcttctaaagcaaatttgtgtattaagaaggtattggttgagaatacttgtcctttgtgtggtgtgtttgctgagacggaaaggcatatcttggtgttttgtaattttgcttggtcttgttgggagtatgctggattggttgctgttaacagagacacttcttctcttgggttgtggctgg

SEQ ID NO: 13660 - DNA, 617 bp, Cannabis sativa
  modified_base (457)..(462): a, c, t, g, unknown or other
aaaataattagttttataatatatgttgggtatgttgagttcacgatctaaattatatatttattcaaaatcgtatttttgtaattaattaaaagtcatgtttttttttaaaaaaaaaaaaaaaaaattttgaagaaagtaatataaaaatgggtgattctacaatgcaccctttaaaatggatgtattgatgcaccctctatttgtttcggcatccaaaaaaattttttagtctaatttttttttttttcatattcatgtacgttatagctatttaagataccctataaaattttaaggaattcggaataatttacaatataaaaaataatgttaaaaagtctattttacacgcgtataaaataaaatagtcatgcgtgcaacacactgcttgaacgtaattttcagcgtgttaaacattttcgatttttttttaaattttgcaggatgtcttaannnnnnataatttacatgaccatgagaaaaaatttaacaaaaaaattattttaaatactaaaacagatagagatgtatcggtgtatccctttaaagaatttgcattataaaatctccctataaaaatacatacacataaaaaataaatgttttttttttaa

SEQ ID NO: 13661 - DNA, 712 bp, Cannabis sativa
aagacttttggtcttagcggctgcttctaagacccgttgaatgtagtccttgagggactcatcttcttgttgtttgatatacaccaaatcattcgaatcaatctagcattgtcgggaaggagtgaactagttacgaaaagcatccactagatctttccatgagtcgatttatctaggagagagcttaaggtaccactgttgagctaggcctgtcagtgtcgcagggaatattttgcacctgaagttatctctcataccttgcagatcaatttgcacttcgaagtagtggatgtaagacagtagatcttttttcttgttgtattgatgccaggaagggttcttgaacctcagaataatgggaagagctttgatttatttagagagcggtgagtgccattttgtatcaattttaaattcaaacaacttaggagttgtgattcccttcactaaagtttccaagttgtcaaattcgatccagttgaccccatgggtggtggtctacttcccagtcagagcttttgttaccaaagtaggatcttctctaatagttcctacttctactattctcttcttgattaagaggtcacctaggtctcttggtcatccgggtcaatcttttactctagtcaacctaggccttgtacttgtctcttgaccacggagtcaacaagacaacactagtgaggcttccagaatgaactctagatcgtct

SEQ ID NO: 13662 - DNA, 566 bp, Cannabis sativa
aaacaaaatattggtcaaaaaactaaaaagcaaggattaatgtaactgagcatgaggaaaataatcacttacaaattctgcgaaaggtggttgtgccgattggggaaaagaccatatgtccagaagaagttgtctttaaaagacactttatttggcaagtccacaaaaattttaggctcgctagaatgagtaccaagataatagaagcaccatgcggcattcttcctcactggaacgaccttaaccgaatagagatactcgatttctactggtgtggggcattcccagttcagaattttatacaagaccttcaaactagcgagaatcctataagagataggattcagttggaatggggcaaccccaaggtggtttatgcaatccttgaagtagtcttgaagagggagtatggcccctacactgatgtgctcgaggctctaggcgcccatgacagtcgagccactggtactagcctcaccgctagcccttggggtaccgcttgaaaagcgcgcagggggaaacaactgaactcaccctctcgcactgaactaacttggcttgatcgc

SEQ ID NO: 13663 - DNA, 745 bp, Cannabis sativa
taagttctgtaatgttgatgccagaagtgtctatatattaaatatggtatcgttttgaatttattaaacttgattagtgaattggttagttagttagaaagttagttaggtggttggatgttggttagttagttggtttgtgtgtttgtttctcttgtaatctcagttggtatataagttgttaaacactttgtatcatttcagtttctgacaaataatagttctgttgattcaattttcttcttcttcttcttctctttctctctttctttcttactttgttttcagctcactcgagctaatatggtatcagagctagcaagctcttcttcctgatttggatctggtttgttgttgatctgtcatggcacgaggtggaggaaatcaaacacgaggaggagttcatactcgtgctaatcatggatctgaaaacaattctaatgactcgaacatgttctctgttctaggagaaaattcttgatcgaccaatgctaatgatctgtcgaattcatattttctctccaattgcgacagtcctggcattgttcttgttcctaaaatcctcaaagggagtgagaattacagtacctagagaacagaaataagattaaattcgtcaatggaaagcttccacaacttgatgaggatcatgaaaactacgatagctggtataaatgcaataacactgtcatttcttgaatacttcatgctatctccaatgaaatcgcagatagcataatgtatc

SEQ ID NO: 13664 - DNA, 670 bp, Cannabis sativa
  modified_base (120)..(123): a, c, t, g, unknown or other
cacaaaaagaaaaactccatgaaaacttcattcctctcagggtaattcccactaattaatacatatacatattaaaaaaatataaaatatttaaaataaattaattataataaaataaannnntattaaatctcttattttttttttaaattaatttatattttattttaatattaacaaacaatatcaatttaaattttttcttatatacttgagtttttaatttttattttacatttaataaagcataatataaaaatactatagattatttttatcaaatgcataaaaatttaatttgaaaaaaaaattaaaaatatataaaaaataaaatattacataaaataagtttttaacatatttgtgattataataaattagattataataatatattaacaactcacagtattttaaaatttaaaatttatcaaacacttagtttagctttttttacagttttgttgccgttgttttttctcacagtacaactacagttattttttccatagtacaactgtgccaaactgggagtgagtgtatctcaaaaggattgttcttaggaagtgtagattttcttaatataattaattatcactcttccaaaaaaaaaaaaaaatccccaaaaaatcacaaaatttattagaaaaaagcaaattattttatttaa

SEQ ID NO: 13665 - DNA, 625 bp, Cannabis sativa
taactatgatcacagataaatctggtcgtagataattgtcctcatagataactatgatcacagaaaaatttactcatagataagtctgctcgtagataactgtgctcgtagataactatgatcacagataaatttgctcatagataagtctgctcgtagataattgtgctcgtagataactatgcttgtagataactatgatcacagataagtttactcgtagataaatgtgctcgtagataactatgatcatagataaattttcttgtagataactgtactcgtagataactatgctcgtagataactatgatcacagataaatctactcatagatcgtagataactatgatcacagataaatctgctcgtagataattgtgatcagaaataaatctgctcgtagataaatctgctcatagataaagatgactcaatctgcttaaagatgacctaatctgtttacccatagaaaagatggagacactttatagtgaacaactcgcaatacttagcaagttgaacctcagcaggtagaatttttctttgcaagggagcatgcccaaatatcactaattaaagtggttacaattgaagaaaaaaaccttctaatctagtcacaacc

SEQ ID NO: 13666 - DNA, 728 bp, Cannabis sativa
ggaaaagatgttagaaaattctttatcgccaaaaaagtcactgaaattgtctcgtcgtcggaaaaatcattggagttagatatctcagatataaattaaaatagaatcgtatctataacataatgaataaaaacaagtaacacacaataactaaaactggatataattaaataaacaaagatgaaatctgtttctaaaacactcaaacataaattaaaaacaaaattagtttcataacaaaataagtaaaaataaataacacataatacctcataagtaagttataatttcttttaaaaaaaaaaagttgtggatcaattttaaaaatactgaagcataaatctaaacagaatcggttcataacaaaataagaaaaaataaataacacacaataactcaaaaaataagataaagaaaccaattatatttatcaactagttaaaaatgtgagacaaagaaactagttctataaagcatctaagataaaaacttacacacgaaaacaagttaaataatataaataaataaaaaattagttctcaaaataactaaattaaaaattaatttcttcattatttaaatcaaaaactaatttatgaaataaataattcaagaaccattttctgaaatgactaaataaaaaataggcttagatataaattaaaataaaactagttacacaacaaaataaatataaacaaaaaatacattgttgacctcgcttttag

SEQ ID NO: 13667 - DNA, 645 bp, Cannabis sativa
  modified_base (121)..(127): a, c, t, g, unknown or other
  modified_base (154)..(154): a, c, t, g, unknown or other
gaagggtcaacataaatccagattatgggatttttgggctcttttttattttattttattttttattttttgaaagggggactactcatttaaaactataccaatttgtacttcttatatnnnnnnnaggaataatttcaaaaaaaaaaaaaanaaaaacacacaaaaaaaaaaaaaacaacaaaaaattacaaaaatacactaacacaagattttaaatatttttacgatttttacgattttgtttataaaaaatattgtcttcggatgtattaatgcaccagtaaaagtccttaaaaaatagagaatttttaccgcatgtgaacaattttagagggaaaaattttgttggcgcatatatgcgccgacaaaagttaccagaaaaaaggagaaaatttcccacgtagtaagaatggtaagtggaaagacttttaccggcgcactagacaaattaaaacaaagagagaaaaagcaactcatcaatcaacatgagcattagacaaattccttacaagaagaaaaataaaagagtacaacacaaattaaaatattatttagtaaaaagtaatttaacatagttacactatttattgcaaaaacactaaataaataccaaaacaaatcaatcaatatgaacattaaaaa

SEQ ID NO: 13668 - DNA, 556 bp, Cannabis sativa
cttgtgaggtaataaaataatatttatttttatcattaccaaaaacctttcttaaattgtgaaaaaagttaaattaatttacaaaactattacttttatagaattatatagaaaaataccataatttttcttcaacaacaaaatataaatgaagtaagcatcattctatttttttattgattgatatatgtctataaatatgtatattgtagaatgttggttggattgatcaaacggttattaattattaaaagttaaagtatatgaaactaagttaagggatttttacaaaaatattagaaattgagtaaaaatttataattttattgccacaccgaattttttataacaatattatctttttataaaacaattgtaaactaataaaacagaacaattaaaacaacactggaacaacaaaaaaataattatggagtaacagtgaaaatttaatacaatacacaatattttttaaaaaaaattctgccccagtgaaaaaaaaaaaaattgtgtaaaatcctaagtttatgtatcaaaatttttagatcttagaaat

SEQ ID NO: 13669 - DNA, 505 bp, Cannabis sativa
gaacacattgtagtcactagtgagatcttgaagatcgcttcaatgtgttcagctggggagatctcatgaccaatggaagcaagtagatcgactaatcttttgatcttgagtaggtaatcaccaagagatccttgcatttcagcattgcaaaacaaagtgcgatattgaccaatattagctctattcagtgctgtgtaatactccttgagtgtgattcacatttgagaggttgtatcacaaccaaccattcctgtgagaattttctcaaacattgacgatagcaaccaagaaacaaggatgttgtcctagtactcccaatcttcgaacttagggctaacacttttagagattcgatcagctttagtaagaaactttggaggagtgactagtggatcaagaatctttgtagccgacttcctttaattgctacaaacacttgatgaatccatgatagataattgttttcatcaagtcgaaccgagagaaaaagtaacaggggattatt

SEQ ID NO: 13670 - DNA, 544 bp, Cannabis sativa
ggattcaatggactgtcaaaaaatatgacaagagccaaagattctcgaaaattcttagagctccactcaacaagctcacaatgatgcagtctttttggccctttgttctatgggaaatagacctgattggtcaactcccaaagggaaatggaggggtgcagtatgtcgtagtcactattgactactttaccaagtggacaacagctaaacccctaatgacaataacttctaaggaagtccttgactttgttatcaagaacatcatatgtcgatttggactaccataaatgattgtgtcagacaatagaaagcaatttaatagttacatgttcactgatttctataactggcatggcatcatcaaaagcttctctgtcgtgacccatcatcaagtgaatgggtaggtagaaggctgtaaacaagaccatcaaggacaatttgaagaagcgcattgaaaaggcaaaagacaattagctagaattgatgtcagtagagttggtactaccatctcacaggaggataaccaagatataaataatatctt

SEQ ID NO: 13671 - DNA, 596 bp, Cannabis sativa
tttatataaaataaaagtatctagatttttttcttttaagaaaatggtagaaatataaaaaaaaataataataattatattttccttaaagtatcatgtgagtagtgggtaaaatataatgagtaaaaaaaaaataattcaatatgtaatacttcatgataactaaaaatacaacaaaaaattactaccattaaattaaaaataaaaggttataaaaatgctctcatttataagaagttccctataattatatatgttataattatttaagactacttataaatttataaaaattttaaatagtttacagtgtccaaaatgttcaaatattttgtgattcacgtgattattttttttgtttgaattttattttcaacatagtaaactattttaattttttaaaaaatttacaaatagtctaaaataaccacatcatatttaattatgaaagaaaaaaaaaactaaaaagttctagagctcataaaactgaaaattgttttacaaatgtgcattaatcttaaataactacgacatatatagttataaaaaaaaattagacaaaaaaattctcaactcataaaacacgagaattattt

SEQ ID NO: 13672 - DNA, 554 bp, Cannabis sativa
gttagatctagtctgttaataggatgccttttttttttttaagcagaatgacttataaattaatgatacaaatatttataatcggtagtggaagctcttcaaaccaagatagctcatcgtctaactgcaaaagtacatactttgccaagctatagactacatgatagcatagtaacgttccttttcaagatgttccatgccaagagcaatcatgtgattagtggccactgtatcaacataccaatcttgatctattgcatagtcaagcaccatggaggatggaggatgaataagcttgagacttttcgaattcatcaatttctatcaataatgcacgagaatttaggtgtaacaaatcctttatcaaatttgtagtggcacacgacaaaagtgtggccaagtttatgacacacttggcaaatgaaccttggtgtgttggaagcacctcgacaaaattatttgggtggagcacgagtgccatagctttgtgtgaagcctctaccagaaccaggatatcaattgggagcataagaaccagatcttgaaggtccaac

SEQ ID NO: 13673 - DNA, 703 bp, Cannabis sativa
tcgattttggcaaaatttgctaccaaccctgatctaagtgacgctgtaggatctaaaataatcgacgccatacaggtacatatggcgtcggttcactacaaaaaaaaaaaaaataggtattggcacgattaaattagtgccaacaaactcattttttagtgcccatctgttgattagcacgacatgtcgtgcccttttagtcgggctaggggcggagccaaaatgtaaagttagggggggccaaattattttataaatttaggtgataaatattttaaaaatactttattaactttataatttaaattaaaacgcataatttttttcttacatatcataaaagttatcgacaaatgaatttatactaatttttttttgaaaatttctcttttttaatatacaatactagcgaacaactacttaaatattcatttttcatcttaatgcgaagtataatttttactatattcatagctgaaaaaaattattttgtggtagttataaaagtatagttataagaattataactttatacacaattaaaaaatttaaggtgttacctcaaaaaaaaatagcatgtcttactagttgctaagcaaattaatatatgttattaaattaaaaataaataaaaaatggtatgccaaatcaatattattaaagaaggaataaatgctttaaaaaaaaaaagaaacaaataaat

SEQ ID NO: 13674 - DNA, 712 bp, Cannabis sativa
caatgatgaattcaatttataaataaaaataatgttaatcacagatataatttagttattttttcaatcataattatgagaaaattacaactaatgtgcaaagttaaaattaactaaaatttaatcaacaaataattagtaatgataagattaataattcacatgcaacaaacagagattaaaacagaaatgaatagagtattaaaaccaagaacaattaaagtagtaaaataataaaataatacaaccaacaccaagatatatgctaagtcaagtcatttagatcgatgtgatctatggctctacttcagttcaagaacactaccaaattttctttattgattgagcaagaactaggtacaatatagtcaatatcggttatttgtcagattctctaaaagtatttatttctcacactctcactcaagaatcttcttcatctacagaagattcttcatacaaaatacaaatccaatctctctctttattttgtacctctctctctacctctcaatctctctcttcgaaatcacctctgaactcttctcctcaattaataagtattggtggtatttataggttcaggatatagattctaaagtcggtggttgtacgtgctaagttgttaagttggttaggacttaacagacttaataaagtcctctaaacagaatcttcctgtcagcacaagaaacgtgcttctggatgagac

SEQ ID NO: 13675 - DNA, 531 bp, Cannabis sativa
tctaagatcacccataacagcaaattttttttctttggaatatacacaagattagtggcattaagtctctctggcataagatctgtgtcaaagtactctttcacggttttaataacatcaggaccaacaatgtcccaatgatgttggaagaagccaggtcccataccgtctggcccaggagctttatcggggtgcatagagaacactgcctgcttgatttcttcatcttgtatgggttgtaagagagcttcattgtgtgtggcgctgacagagactttaatattatcaatgacttgggcagaaaaattatctgtagaatgataaagttcctcaaagtactgctttataaccaagtgtagcccggtattccaactttgccagattccattattgtcttggagttgctgaatatattttgatctcttacgagcactagccgtagcatgaaaatatttattgttcttgtcacccgagtgtaaccaatactgcttcgacctttgtttccactagagttcctgctgtgcaaggatt

SEQ ID NO: 13676 - DNA, 547 bp, Cannabis sativa
gctagcatgccagatcaaatttttagcttgattgacattttgaaagaaccgaactgaaaaaggtattggatgtaagtaccataatacctttgcggggacaccaacttttatcttgtcgaaattctttttctttttccatctagactcaccacatgtgggacacaatattgcatctacaaacatcttatgatataagatacaatcgttaaaacatgcatgtattttttcatattgcatgcctaaggaagaaagtgtcttcttcgcctcgtggaaagatgaaggcaccacattaccttctggtaataactctactaagaaagctagtaaatctgtaaaactctcatcattccacctgtgtttggcttttatattgtataatcgaataagtgtcgatagtttagtaaacctattacaattagaataaataggcttctcgatgtcctctacaaaactataaaattttaaatggatcgacatttaattcaaattggatacctcctatcatttcaagaatgtgatcatcctcatagtcttaattaacagcctt

SEQ ID NO: 13677 - DNA, 604 bp, Cannabis sativa
ttttttacactcttacctctgcagagaaacttgtacacttaattctcatttatgttccaaaattcttagcacaaaaatgtggctaatacatgagaaatattgttaaagggtattgtagtacagtttgtcataattttagttctctttagatttttagtttaataatattaattattttaaaaaaattgctagacattcctaaggtcggctactaataatattaaatttaccttaagtttaattttcggttataaataaatactgaaatttaatttttaaagataataatacataatttatattttattaaaatttccgtagataaaaaattaaatttaaatatttaactgaaaataaaaattaaacttaattaaataattaggctatatgcaaaatattcaaatattagcattaattattagtattaatgatgtctagtagtagtagtagtagtaatgctagtgttatattggttctaagtctttatggtatcaatttcgtgagacagaattacaggtttgttttgaatgaaataaggttttgaggtatagtaattaagtatgaacaatatacataagttataaagtgagatgtcccccagtcc

SEQ ID NO: 13678 - DNA, 532 bp, Cannabis sativa
attaaatggaataactcattaactacagagtcaatagggtacatttataactcgcaatttgcgcagtctttagcgagacaaggatgtacgaactattgactcacgtatgaacgagaaatcatttcgagtcagaggacgtaatcgcaaggacatctataatacatagcaaggcatttacctcgcaatatgtaaagaggtgttgacaaggcaaattggccattagaacacttagcgtataatatacattatattaactaagtgtaacagcttgaaggacctaaataatggatagcgagacatccatctagctataggaacgcatactcctggtaaactccagctcgctgccagggttattattgctattgagaacccccaagacatgattgtccagtttgcaaggccttatggttaaagagcagttcttaagtttgcacagtacactggtgctcatgccattgctggaagacttatgaataaaccaagctattcatgaaccaagcgagacgcctcagcaagatacgttttgcag

SEQ ID NO: 13679 - DNA, 592 bp, Cannabis sativa
cgattgtaaataaatacttaagttgaagtttttgcggtgataatacgtaagttataattttgaaacttctatagatacctgttgttaagtgttaagtaaattaccatgtgtcaatccttgattggttcaggtcattaaatctttaggtatctgaccgttaggtgttaataaattatcatgtgacgatctctgattggttgaggtcattaaatctttagaaacctgggtgttaagtgtaaataaattgtcacctagcaatccttaattagaagtcattaatttttattttaaaaaaaaaaagtttaaatgtaccaataaaacaatgatacatggataatgacttgacatttaacggtcaggttcctacgtaaatttcgaaaatataacttaagtaatattaccgttaaaaattaaacttaaatatttttataactaagagttaatacttcaatatttaaaccgtaaattattcggtcatttactataatttgtctactgtttcttcttcattattcaaagagtatactagaagaaaaggactaatataatttacttggaagtggaccagtgtatgtgatgagtcatactgatg

SEQ ID NO: 13680 - DNA, 570 bp, Cannabis sativa
aggggtgtatataggctagagttcatgttcaggcatacctgtgagctgtttaggttattaagtaaaagcaggcccactattgagacaaaatacacaatataatttatcagagggcccattaggaggttctccctcgtatgatgacagtttcgtacaaccgtgacaacttttggcgcagggcacatgtcaggtagaaatcacgcctagcgaacaaagtcgtcagaggatcgtcagacaaatcgggtgtacgtagaggaggtgcacgcactaccatgacctgccacaggggacaagatctgatcctgtgtcagtaaggcagacacgtcagaggagacatccaatttccactttacgataagcatctaacattctccatgttgcaaacatctggctttgattcttcaacaagacaccttgcgttcccctgtgagcttagagtgttttgtcccttccgcgtcccagaaagtgtaggaggctttcggtcatggaaggaatagtgcatcttgcggcaaggcactatgccttcactggacctgggcctatttcaggtttgtatttatcttttgggga

SEQ ID NO: 13681 - DNA, 542 bp, Cannabis sativa
ttattattattattattaaaatcagttaatatatagagaaaaacttaaaactaaaacaaaccatcaaaacttctctctctctctctcgtacgaaccaaaccatcaccaccaaacaattttttttttaattatgtccatctaaaaaccagcccttcaatctgctagtagcatctagaagtgaattaagaagattggaagcttgaggtaagggttagtttatggttttcatggaaaagcttagtttttaaggtttgattttgtattttgtgactgttatggggtctgtgaatgcttagttttgcttctaaggtgctatgggattggttttgatattcatttaatagttttgctactattttgagttaggaatcaagtttgaggtgttaaagctcaaagtttgaactttattgacacttttcgcttaagagtatgattttgatagagttacgtagagaatgttgtatggatgttatataagtgttctttgaagtttggaatcaactggttaggttttggtagggttttgagaagttgaaactcaa

SEQ ID NO: 13682 - DNA, 505 bp, Cannabis sativa
tagacctggaatattcgatcttcgaggcaatgggatttattttgacagtcgcatggcgacaacttttgttgttatatgttttgtaaaactgttgtaactttttaaagacgggatcccggattatgtaaagtttatatattaaagtttaaaattaattatgaaaagctttaattaaacacgatttcaataaacccgttggttagcgatggattgcacatttagtatttaaatcacgataacacgcctaatttagtaaggtgttacagttcgggggacctgattcagtacatggacaattaccgcattagtaaaagtgaacgaaattggacataaattcttgaatccaacaatctaaatggttcgggaagaatttttaccaacttgaaaagtttagagatcataatttgatacatatcaaaattaaggtggctaaagttctgaatagccaaaattttatattaaaactcccctatattaatttaggatagggagttttatttgcacc

SEQ ID NO: 13683 - DNA, 660 bp, Cannabis sativa
tgaaccccgaaaagcctaaatcggatttcgagtttgggtgtggataagcaatttatttttggtcgggttgtaacccgtaactcgaaatttttattttttgttttaaaaaaattaatattaatgatacttaactatttattaatcgggaataggattcacattcaaaaaaaaaatgactatttattactaagtctaaaaattattggtcagtttaagtattcattaatgaagttgttgtaaatttaatatgattcatgtttttaaacagattctaaaaaaaacaattaccaataatttattttttttgttggaagtacaccaaaattaattaatacatatataaaggctgaatttgaaaagagccaactacatatatatatatggctaatggctaagacatcatgagattagtatacacgtttagtcgatcgaagagccacggttgcagccgacaaaagacatcatacacataacattaatactaaaacataacttatacatacataaagtcgatcaaaaaattaatgttttctcttcttattacatatatattaattattataattacattatatgtagaatgcagaaaaggctgactgaaatctctagaaagagaaagatgtgttatgatgtgacatgtcttgcggaaagaaagatata

SEQ ID NO: 13684 - DNA, 595 bp, Cannabis sativa
agtttggggtgttacaaggctgtttaagttcaagatttcgacatcctttagtgagctcattggtaactggtgtgaatcaccattagtgtactttgtgttcttgactctccattgttgtataagttgtaattttttccattcaataataaaatcatcacaattaatagagctatttctacccgggaattaggtccaagttttatctaaaacttgtgactgaacctcgttatttcttgctgtcaatttactttttttggtttattgtttccggtttaatgttttaagcctatttcctttcttgtattgtgttcttgtttgtgtaagagtgcacaacatgaaattatatgaatatatgtaattaaacttaaataaatctatttgagtttgtgttcattaatgatcttactaatatgattttttttattttttggaataataatattttatgacttaattatttatatatattgaatttaaattaaatgtaaatattcttataataatgatatttctatgatgagatgatcagatagttatgtacgtacgtgcacaaaggaaggcgcggcacaaaagaattaattatcttttttttttt

SEQ ID NO: 13685 - DNA, 951 bp, Cannabis sativa
tactgtatatcttgcctaccatttttgcctctctataagagatacaggatttcaatatgtttggattgaacacacgaatgttaaagtgacacctactggattctgtgttcttaggatacatcttttgcaagtgtctatgttggaatcctacatcggaaaaaccctgtgccaggcagattggaaaccctgtccaagttataaaccaccgaccaattccccccacttagtgaatgtgggatcataaatatagaatccccttagatatgggacgttcacgactcacttctaaaagactagcttaagagaggagagtgcgcaaaaaaaatttaaaccaccaaatcatacaacacttagtagatgcgggatcaaaacaacctctttggcaaaggttattcatttattttattttgtgaaagggaattctatttagcagcaaacaattacataggaacatttagtgagatgattagtaacaaagggaaggccaatattccacaagatagacgcttttaatatctaaagccatcttagctaaactatgaacaaaaggttgtcatctattggctccaaacaaaactacagaatactcaaactacaacaactaactagattatcatcaagaaagctatcaatatcacgaatttctctatctttttgatttagcaatgtgacaacattcaaacaatctggatcagtaatgatgttactcaagctagctttagcaaccaacttgaaaccacactcctctaaagttcagcagcaatcagagcataagagcatctaaggaacctcaagctgcacaaacaacttgaccaagatgattacgagttagcactcttgaactatagtagcacgtcatattaatcttgaatttattctcggatggaggactccaatgttgcacactctatttttatatattcaaacaccccttttttcctcccaaaaaag

SEQ ID NO: 13686 - DNA, 560 bp, Cannabis sativa
atgagatttttcgcccccaaataggcgtcttttgtcgtttttctcgttcttataataaaattttaagataggaaaatgaatggaaagtaaaatattatttgtgtatgtttaagttgaatttacagttcacgtcaaaaaaaaaagttgaatttatagttgtaaataaatatttaaatttaattttttgctgtagtaatatttaagttatatttttaaatacggtaagtatacatgtgaagtcattattcacgtgttattttttttataagtatatttaaattgatttttttttaaaaaaaataaaaatttattatttggacaaatcagagattattacgtaacaatttactttacatttaacaatcaattctaaaaatataaattaagtaatattaccgttaaaaattacatttaaatattcatttgtaacttgaaattaaaattaagtatttatactttaaattatttaaattaaaaataattaacaaattaaacaaagttgttttaattcttgaacccaaggaatacatgcttcattttaattagtttaagaagtgtct

SEQ ID NO: 13687 - DNA, 721 bp, Cannabis sativa
atatatatattaataaaaaaaaaaccttattttttaattttaaccatttgattagttaaaaaaaatatcaaaattaattaaaactagaattatacaaaataaattataaataaatttatgatataaatattataataatttaaataagaataataattttcataattagctaaaaaaaaatatcaaaatcgaaatttagaattattatagtaatttaatttattcataatttatttggctatttggcaccttagtaaaaaatagatggtttagattatggatgggcatcatgaatattatttctattcaacgcttgagttttaatattgactagaaaaatacataaaaactaaactatacaggttttagggtttttttaggaatttctttagttaagtttataaacaacaaataaaaataaaatttaaatatttttcatattatatatgaataagaaaaatatgtttttaatatgtattacatgtaattagattagatcaatttttaattagattttaaaatttttttaaaaaactgattttatccaactactcacattcaatccaatccaatggtaatttaatatccatttttttttataattagattggatttatttgattcgatgtaattgaattggttatgtgtaattagatcataaatcgaatcacaattattattgaagattagtaagataaagttttaagattagggtaaaaat

SEQ ID NO: 13688 - DNA, 615 bp, Cannabis sativa
gtgtgtgttggtagtggcagaaatgaaaggtataggagcagtggcaggttgagctactggtgcaaaaacagacatggtagggtctgaattgctggtgtagcatcacaatgtgtaaaaatttgaccttgattgtttgtaggttcttgaggaggttcaggatcaagagatgaccttggaagtggactaggttatggagctgttggaaccattggggccaacaattgtggtgagggagcaaatctggtaccttgtgaatcatgttcttcatcacttgcaggcacaggtggatcagaaacaccaataacatgtgtgtgagcatgggacatatcaacatcatgaggaaataatgactcaacagtatagggaacatgaacagtgggaattgtgttggatgtagtagacatctcttgagatgtatagtctactaaattgatccaagcacttgtagcccttatgattgaggctataacctatgaacacgcaaggagaggatataaacttaagtttgtgtttgttgtaaggcctaatattgggaaaatacgtacatccaaacactttaagcttagagtaatctggggtaatattgaataacacttcaataggtgacttaaagga

SEQ ID NO: 13689 - DNA, 565 bp, Cannabis sativa
aggacatgaacccatccagctttgaaccagatcctagactcgaaatccaaacctgaacctcaaaccctgacttgaactctaactcggacctgaactcgaaccccgactcgaactctagcccagacctaaacttgaacctcgaaccctgatgaggacttgaatccagacctatactaggaactcgacttggagcaaaaatataaaaaatgaatatgttagataaaaaaatatttttgaaaatagaaaataacatttgatgtttattattttctagttttttaatactcaacttttaaaaactgtttttaaaaaatttggccaaacacctcatattagattttaaatttttttttctatttttaaaaaataaaaacagtttttaatttaagaagtcaaacaatcccttaattttttgattgaataaaaaccacatattaaattaaaaataaattaattaattatatctattatacatcaaaaaaaaaattaattaataaaattaacttgattgtccatgtttttcaattcaagcacttgagaaaaaaaaaatgagaggctaaaatat

SEQ ID NO: 13690 - DNA, 799 bp, Cannabis sativa
tcctcaagggtctcaatgaatcttatcatgttgttcgagatcaattattacttcttgatccttgtccacaattgaataaagttttctctatgattgttcattaagaatgccaaagaacccttggcaattgaaatattacccccttactgcagctgcatcgtcgtctacaccttctacacccaaccccgatcctaatcctgcaaccaatttcactacaaaaaataaaaagatgcgccacctactccaatagccaaaaaccaggccatcttcgagataatgctattttctcattggttttcccctggatatggcaatcggagaaccacagacactgctgccaaaggcaaaagcaggtatgattccaccaacactacttagtaatgttaagtcattatatctatgtatcattttcttattggtatatttaaactattttttttttaaaatactaaaaatttaatgacttggaccaatcaaagattgccatgtagcaatttacttaacatttaatagctaggtacctacagaagttctagaattataacttaggcattattactgccaaaaattaagcttatgtatttatttacaactgagagttaaacttaggtatttatgccgcaaattagtcattttgttatttaattaaatttgaaaaattatttaagttgaaattttttgttattttataacaacttaaattagatattttcaaggaatttattttattatattttatatattttgaaattatatatttttttgaactttattctaaaaattaaattaaagttgaaaa

SEQ ID NO: 13691 - DNA, 701 bp, Cannabis sativa
acgttcccttgaactttgtcgtaagtattgtagttagaaacgtcttcgcaggatcatagtgcctacctaggtgcccaaccagggcaccatcacaatttccaatgcccaagttgaccaccattagtctcggtggttggggcctagggttttttccttcttgccatgtgtcatcgaatcaaatttcaaggtcaaatttttaggtcaaagtgggggtcgatatcttccccaccatgagaatattgttgtggttattatgtttgtgattatgaactaaacccttttttttagagtgttaatgaaactattttagattatgaattaaaatttttagattattcccatatttattcttggtatttgtttgtgcaattttatgttaattatcatcctgttaatgcgctatgaccattaattagtatggagattttaggttttacacatgcaagaggtatatgacataggaaaagtgtgacattaaaagatttcactatattctatgagatcaattaaagagaatcatattgttttattattgcttaattgattaaaattaaaacagatatctttatttttctgatttaaattatttttttatctgtttacttttttcagttattatattaattcattcttaattattatttactttgaattgtttaattattaaagcataaaactaaaaaaaatatagtaactagtga

SEQ ID NO: 13692 - DNA, 546 bp, Cannabis sativa
aaatacatgaacccactgctacagtaccgcaacatcattttgcggtcaacaaacaatacttttctctcggttttgagagtgttgggttaataacttgacgaaatgtcttacttttagcttttttcaaagaaaaccttagtggtgtttttgttctatacttccttcttctttcttttggtcttttaaggcttctaatcaatcggttagtcattattctctagtgcgagttatgggggacaaagcaagtgtatcacgtgaacaaaggaattcggaatctgtggctacaggagatcctgaaattaatacgaatattacttctcaactaccccaaccttttgacaatagcaaggaatctaatgctacagtcaacggggagggggaaatagagacccaaaacaatgaattcaatgttgacccaaaagaggattttgaagccctacgaaataactttttacagtccatgaccctggacttagaacctgatttcgaactcactgctgagattgttagctcaggggttcttgccagcttctttgatggcaaagg

SEQ ID NO: 13693 - DNA, 517 bp, Cannabis sativa
attacaaatacactaatactatataacttttctttgaaaaaaaaatagccatttttaaaacaatcacattacaatttcttcacaaaccaatatatatgggccttttatattattgtggtaagaggtgcctttcaattcagcccaatggaccaattgactaactaatgtattaaggtccaatgggccaactaatgtatttagaacgagagaattgtggaacaggaatttttataaaaatattagattttaggtaaaaatttataattttattattacacaaaagtttttataaaaataccatctttgtataaaataacgagaaaataataaaacataataattaaaacaataatggaagaactaaaaaataatcgtaaaataaccgtgaaaacttaacacacaatacacagtataaaacttacacaatattttttaagaaaattccgccgtaaaaaaataaaattagaaatttcagtatgtggtgtaaaaactctagtggaatattgcttgctaaact

SEQ ID NO: 13694 - DNA, 955 bp, Cannabis sativa
ttaaataccagattgtagttgttaaaaattcattttataacaaaagaaataaaattaaaaaacttgaaaaaaaagagaaggaatggtagttagtggaaaatataaaaaaaatgacctggtaatagtaaaagcagttataaggaaagaagcggtcctagcttctggcaaccagtttcaaacggccacagtcgcaacccgatagcaactaagcgacactcgcgtcctgcatcaaccacgtggccagccccgaaaattctattcgcgctgacgtcatacgtaaaagctaaagtacaaataaagaaaggctaaaaatcagagtgtggacgaatgagaaagcgagtagtgataagaaaccaaacggatctcgcgagtgggtgtagattacaaaagtgaaacgacgtcgttagtttagttccaaaacgcgggtgatgaattgaagagaggagaaagagatgggttcgggtctgagtctgaaagtctaagtaggagtctaaggctaagctgagctgagggtgaggcttgtggctgtttggttaaatcggttggtttttattccctctcctcgtttgtggaggggagaacacaccgctctctctctatctctctcctcctttcactttctctctctatcaaaaaaagaaaagagaaaagaaacgcactttctctctctaagaaaaaaaagacacaatttttttttcttccttcttctttgatttagctttctctctcggctttgatcgtcaatttgttttctaatttaatctctgagagaaagccggccgtcagaattgagaatgggaattctggtggctttcctacagtgatggaccggtgactatggatgtatggagttcgatggtgaaataatcccgatgtctcatctcgcgtctgtgaccgaggctgctccctcgttgtcaccatcgtttagcgaaggttctgtttttttttttttttt

SEQ ID NO: 13695 - DNA, 752 bp, Cannabis sativa
ttgctaaaggacaggtgtccaacatcatatcgacgaattttaatttaataatttatataaaaaattgtttatattgtgttggatattttaaattgcttaataacaatagaaaaatcattccattatattcttaattaaagttattaattctttttgctagtatggagtggatcaaactagatcatatatcaaaaagcatgtcatttgaggaaatttttttttctttttggaattgtcatttaactaatagagatttgtttggcaatagtatagggtaagtttatagtatactctttaagaggtcacttcagtatattatttatctaattaacatttagaataatttttactctaattttataattatgtttgttgtagttactttagtagtttataagcttaaaaataatgtttaaatattttatttgacgtaagactattttttgttatatttatatgagcaacaattcgattttttttttttttttgacgtggtgaccagagttacataataaaattaataaaaaaaaataatcttttaaacttttttatttaatgaaaaaaatatgacaatgacacatcacatgcaagcatgcattcaactcctattggaactcataacttattctaagccgttcgatcctctctcatcacacactattggattacaacactctttacccaaataaaacaaaaaaaccttccactcaaacaaaagtcatcacaactccacaaaaaatattggataaatt

SEQ ID NO: 13696 - DNA, 575 bp, Cannabis sativa
cctttgctcctccttgtaccaacacattaccttgggtgcatttcgggatttacacttggtgaactttcaggcataacactaatgacttcaaaaattacacttagtaatttttgggggtcaacactaattatgagataattagtgacgtttgggaaaatgattaaatgagcgtaatttattaattacgaagattttattgaaacaggtgggtatttataccattcttttgaaataaaatatttttgggttcgaggaccgtggaaactcaatggattggccaagaatgtcacgatggtaatagaataagttatggattgtaccgcaattttttagtatgcttgaatttttaggttattcgacgtagatagctttgacaaaaatgcccataagttataaagttggttatttatggaattaagggtagagtggtcattttattaggtttttaatcttttgtcatatttggttaggggtatgtaaagggcttaattcaattaagtcttattagataattagagatttatccaaataagaaaaatctttttaaaaacatcacataaactctttctctctct

SEQ ID NO: 13697 - DNA, 524 bp, Cannabis sativa
agataccctgtagagattaccgggtacactggcttcccctatgttggttggcttggtcatagtgtcacattgagcatggggcggtattgccacttcatccatacttccaagatattgttgcaactctgagatgtgtccgacataaatcaccctgaaaagcatcaagtacctttcatcgatgtttgtcttatatgggagctaggttggccttagcctactccttatgagatcggatatttttttatttgaagtctgcttcgaaacagaataggattgagtacttctactttagtcagatcagtcaccaatggttgagtgatactaatagtgcagtcatgtcaaaagttagtgggtacgccaagaaacactttattgcttatggcgttcggaggattggacactacgagttccgacgagtgtggttcttcaaatgctctatgcccaccttacaaatgaaggatagagcagcaaatcacattctgtctttctgggtggagcatagaaacatactccgtttgccaact

SEQ ID NO: 13698 - DNA, 539 bp, Cannabis sativa
ctacaataataacacaacaacacctaaccataaactttaaagattctcactctttctcacaaacagtgttatgtaaaatcccaaaacatataacttctttatgtgtaaaatcccaaattttttaattgcaaaataatctcatccactcagaatagattaataaatattcacactcaatactgccaaaaaaaatagaatattttttaaaagtcagaaatccctcacatggaacccaccaatgaataccatcattatcacacactcaatacttcaaaaaaaaaaaaaactattatataacaaccacaattctataggtatcaaactcctttctaacctcaattattgaacccaacaaaataaaaaccacaaaaaacccacacattttaaaagcaactcgcaattttttggccaaaaatcttaccgtaattagggggatcaccaccagccctgaaaaacgccataatcaactgctcccgtcgcttcccgtggtcagagaaaagggtcttgccactttctcttgtcaatgctaatggctgggt

SEQ ID NO: 13699 - DNA, 592 bp, Cannabis sativa
attaaattgtgcaattgaccttttgtttttttatttttttgagagaattgtacaattgacctttgatagtattaatgctttacaaatgttatatatatatatataagatcaatagaagaattgatccccacaaaataagaaagacttgtttttgtcttgttacaattttttttttataagttttttttaataaatttgttttacaattgttgtttataatttctttttacaatttttttatatttattttactactttttcttttgtcattttataatttttttactaaatttgttttacaattcttttttataatttctttcacatttttttttttatatttttttgtactaaatttgttttacaattttttttcacaattttttttactaacttatttttttttgtctttctatcattttatatatacatttttttctttttatattttatttttactaaatttgttttacaattcttttttttttttcttttcacaattttttaaaattttttttactaaatttgttttacatttttttttcacaatttttttacaattattctctataattttcttacaacaacttat

SEQ ID NO: 13700 - DNA, 594 bp, Cannabis sativa
ttttgaaaactgaaacaaaaataatttatgaatgactttgtgtaacttaaaataaaaataaataatttaaaatatatcacaaaaacctcattttcaaaacagacaacattaatatatatgagcatgattggtcgataatctacaaaaattatttaccaaccaattaaatcataaccgcttcgaaaagtttataccgcgcgcacccccatcgtgaaactaaaaattcgtaaaaaccgcaccacaaaaaatagtgcggtgtgatttttgtagtttatgcggtttagactattactaaataattaagctatcacaaatacaacaaattttgagcaaaacttgtcaaaatactataaaacttgaaaataaatatgaaaaaaaaaaattaagtgtcaacaatacaataattaatgggctttaagttaaacatttacatattgtacctaaataaatatgaaaattagtatttttataatgtgcggtgtggtgtggtttgaaccgcatattaacaatttaaaacgcaaaccgcaccgcactgtgaggttaaggaaaaattcaaactgcacgcactgtaaaaaatttcaaattgtatttttt

SEQ ID NO: 13701 - DNA, 835 bp, Cannabis sativa
tgcctcttgccacgtgtctttcatccagaaatgcgggtaataattttaattataaaattatttagttgaaatattgaatttatttaaattttatgttagtttttaaatttgaacaaaattgtataaataaaaatagagtcataagggcgattggaagttgaataaaatgcctaccatccatttatattataacttgggaatgaatgtgtaattcgcgcttcgcgcaatcttcaactatttttctttttaagctaattaatctttgtactgaataaatggtatataaaatatattatatattttttttaatatataaaagttaagatatatgcatatatatatatatatctgaactaattttaattttttaataattaatctattcagatgtaatgtttattagttctatcaatatatatatatattaataatagagatgatcacttgtgataaaataattaattatttatattaaaaatagagatggtcagatcatgtgataaaataattaacttattatattaatatgaacatttacctttctaattatttttataaaataactaattgatcatcactaatagtaatattttatttccacaatttcaatatatattttttttttaaaaaaatatcaagttcatcgtataagttactattctatgctactctcataaatgtataatcatataagttactattctattatattaatatgaatatttacccttttaattatttttataaaataattgatcatcactaatagtaatattttgtttccacaattctaatattttttttaaaataccaagttcatcatataagttactat

SEQ ID NO: 13702 - DNA, 543 bp, Cannabis sativa
taacaaatctctagcttttaatacggagatcactagaatccaagatccctgaactaatcccacaatgacaaacggttcctcgccctcgggttggaagatcaccatcttccatttacaatcattactagcggagtacttggacaaaaaatccattctaagtatgatgtcaaaatctgctaaacctaattccactaaatcaacactcaactctctatcctcaattctgattggcatagacttaacccaccttttggagataactaattctccgccaagtagtagtgttcttaaccttttatcatagctatcatacggtctacccaatttattaaaagttttggacgccacatagaaatgggtgtccccagagtcaaattatacagagaagtaagagttattgaccaagagctaacctgtaaaaacagaggggctagcttctgcatcaacttgagtaagagcaaacaccatagctgaagcgggctttactactgccttttattcttctttcttgagctacgtacagtctctcttatagtgtccaag

SEQ ID NO: 13703 - DNA, 511 bp, Cannabis sativa
aattttataattttggataaatactcttttggactctgtgttttgcaaaagttattaattagactctctgttttgttaaatgataatatggaccctatatttttgaaaatggtaaaaatagaaccctgagctcaattttcaacaattttattttttaaaataaccaactttaagataatttctaatacgaacagatacaaaaaaaaaatgtaaccagtttaatcataacatctctagatcagattatcattatgtaagttttattttgataaaaaaaaaaaaaaatcagtttatggtcttatttgtacaattttagaaaatacatgacccatttatcatttagcaaatcatggggtccaatttataacttttgtaaaatacaggtccaaaatcgtatttaccctataatttttaatgataataaatgggaaagtaaaaaaagacaataattgtctctaaaaacatatggaaacaattcaaaaaattaataataaacagtgatggggaaggt

SEQ ID NO: 13704 - DNA, 559 bp, Cannabis sativa
tccgatcttatatataaatatgaatatattatttgtattatattattcttttattgtattttcaatattggggtatattaaattttaatattcttaaaatttatatttactttgtttaaatttttaaaactttaaatattattttgttaaaaaaaaattaaaaaaattaataagtagtttcttgtaatttatgaaattttaaaaaaattacataaagttaaatattaaaatataactatacgtacattcgtaacaataacttattttatatataaataaatttaatttaaatattttttatataaatataattttaatatagtgcaaaaaaaactttttgttaatttaaaatatcaataaattcaaataactttgttattaaaaaaagaaaaataaattcaaatagcaataactagttagttaattcttcttgttacatttacattataaatataaataagaaagaattcataatgaaacaattacaaaaattaatatataatataacattcacacttctttttaatattgggaagagagagttaagcgtgggattctt

SEQ ID NO: 13705 - DNA, 858 bp, Cannabis sativa
aacaacaacaacaaaaatcgaatgagcttcgcttaatcacttacgaataactaaaaacaaatcaataatgagaagaaggagtaccttgcgagcagtgggaggagcagcagccatggcggtggcggagaagagaaggaatcggttggtttggggtttgggagtgaagaagagatttggagattttgaattgtaagggagaaaagagagagagtgagaaagaggaggaaaatggagtaatgctgccatttgaattggtatttataggatgggtttcattgaagagttttcgagagctcacttaaaaaagagctctaaaacactgttgttggatatggcgaagaacttgattccacgtgtctttttactatatgagagagttgtgacacgtgtaatatttacacggtatatattataggctaattagaattttttttccgaatttttacatgtaccaaattttttaaggttgttaaaaatgctacttgaactattgagattgttagatttaagaatttttgtccaattttagtaaaaaaaagtctaatatgatgaaagttcaaggggcatgatttagtacatgtcaaagttcgaggggcataatgtggtagatgtcaaagtccgaggagcataattttatacataaataattactgaaatagtaaaattaaataaaattagacaaaagtcctaaaatttaacaatctcaataatttaggaggaattttttacggcccgaaaaattcaggggcatgatttgatacatgttaatgtttagggggcgaaaatcctaattagcctatataaaaatgaaataataaatgtcttatttttagcaaacatttattaatattttattaa

SEQ ID NO: 13706 - DNA, 523 bp, Cannabis sativa
agtgtatttgtacattaaatttgagatataaatgaataaaaaattagtaatgtataagtaacagaaagccttttgtaataagggtgcacaaaatatatatgagccatattattcaatccagcccaactaatttttttgtaataaaggattatgttaagagtaggtcatggttgattaaactgaaaaataatacgtcatataattatagattgattataggttgagtatattttaactctatataatctaatctaacttgttttctaagagaccttctaaatttaaaataacttctgtacttaaaatatatttttcattcacaaaatatatacaaatatatagtttatattttaataaataaattatattattattctcacaaataatttaaatgtagtttataattatcttactacttttatcaataaatataacatgagaatcattattataacattgttactcgcaccataccaccactactactttaatttttttaaaagcccaatacttacatgcacac

SEQ ID NO: 13707 - DNA, 581 bp, Cannabis sativa
gttttcgtttgttgctcaagaactcgttcgaatttatatacactagaatctctatctaataatactctattaaaaaataatctctaatttgttataaaaagatcaaatgccaagagctaattataaataagaataacctataagttgtaattaattatatattttttaaatcccgtattaacaaagtatacctctatataccaataattacatattaataaaaaatatacatatattttttaaaataatttaggtaaaattaataattttattctaaattgtaatacatatataaatattatatttactcaaaaataattctattattatatagtattaaggattgtttaatgttattattgttacattgatatttattggtgttttaattttttttcctagtgtacctctatataattataacctctcaattagaatataattttcttagtcccaagtgtattcttggatgaggttatatactatttttaattgagtagcatattaaaacaacatattttacatttaagaatcctagcctaaatttcttttattatatttataattgacttaaaattgaa

SEQ ID NO: 13708 - DNA, 571 bp, Cannabis sativa
tcttgctcttaatctcgcccaggcagagattcatcgccgttgatagtagcaagcggagatccatcatcacttgagtataagttttttgtgccctcgatttgagttttaatttgattgtgatattgactttaggttttgtttgtagttgtagtttcttattttgtttgtgataaacaatttagggtgatagtgattttgattttgggtggtggtttaggattttttgattttgggtggtggctgtactgattttttgtttatttttatttctggttttgggcagaaggagaagaagaagaagatgatgaagaagaaagaacaaggaggaggaatggtggtctagatgcttcgagagaagaagagaaaaagaaaagaataaataaaataagaaaaaaataattttgcttttaattttgttttgtaatttattttattcttaaaaattattttttaaattataaatattttttataaaatttttataacatttaaacaattaatattacatggaccaaaaaaaattactatgtgtacattgaagtatgtccaccgtggcacttaacattgtctt

SEQ ID NO: 13709 - DNA, 570 bp, Cannabis sativa
  modified_base (403)..(404): a, c, t, g, unknown or other
accacaagatgggaccacccagtacaagaaacaaaacaatttaagggttcactgccctcgagtagggtgagcatcggttggtttggtcggttattttctatataaaaatccaaaatttggttttcggcctgaattggtccaatccgagaaccgaccgaccaatccagaacctatcttaaaaccgaccgttttgaacatcggtttggtcggtttaaaccgcccaaatcgaacttcaatttattctataaatacattattttacattttacaactacaaacatataaattaattatcttattcttttaatgttaatataataaaaaaaataatatattatttttatatattataatacatgcaaaaaaaaaacttaatatattaatatatatatgtataacgatnngttttagttttttcggtcggtttattacctaaaaaaactgactgttcaatggtggttttaaccgttagtagttttttcgatttttgatttcgtcagtttcggttccaatggtgttcagtaggttggtttgaacggtttttctgattttctagattttatgctcacc

SEQ ID NO: 13710 - DNA, 767 bp, Cannabis sativa
ataatttccaagtacgaagcattaaaagcatctctaaagcccgaagtagaacaacagctcgagaactctgactcaaccttgcacgaggaggggtcgggagaaactgccaaaaagctcggggaatcatcctcccctccaaagtttgacactgaactggagaagttagaagatgccaaagagcatagtagagaaaaacagcccgaaaacacggccgagctcaatccttcttctcaattaggaagtgaaaaggagaccatagtaatggattcccaaaaagggggagaaggagggagctctcaattgagcagcaatgagaaaaaagagggtgcatgaaatgggcattgttattaggttctctcccatggttgatatggttatttcttcattatgtatgctttttcttctctttattctgataattaattctcactttctatggtctttattagatattatgctgttgtaattatagaatctaatagagaaactttttttggttcttctctttttatgtatcttttttaggtgatagacaaatggaattctcaggctgtatttattttaatgtaaattaaatgatatggtggaatggaaccctctattttgttaatttatttgtaatccaaattattgaggtggattttggttaaataatttttctaatcctagtgtttttaagtcttttctgtttttaatttgtgacctcatttttaatctaatccatggattacattatagtttgttctcgagtccaatgcacccttgtg

SEQ ID NO: 13711 - DNA, 877 bp, Cannabis sativa
actaactcaggtgtgcaaaattccactgcaaccccttgctctcgtatatcaaggtgtatgtgacatacatggctcttgtgtagcatgatttttgtgaattgtcatgtaacagtcgtagctctcgtatactatgtcttatttgcccccgagtgatcaaagaaatgccttcaatggtcactttccataccaaaccccgttgggctttcttgatcacgggtctcaaggagttgttacatatgtgagcacttgtccacttatccaaggatttgtgggttggtagtgtttaactcactaaagaaataaccgcagttacctcaagaccaactctacaagctttgttcagtgataatgaagtaccaataagctttactcaacgcttttattcattagatattaaattcaattacatcactatgagctaagttgaaagaaaaagaagtagtggttgcagactttcatttttcatcaaagcttagctgaagtgattcccactacactaatgcaatgttcgaataataatgtaggggacataccttagcgatggacctcccaaccaaaagatgactttattgcatcttgtcgctttgagaggcaatcaattcacttgcatgaggtaaagcaaatctcactgtgaagtgaactatttagggaacagttgctttattatcgtcttagattctccttagatagagggagagccttcatcacttcccccctctcttgagtcgtcttgggaagtagggggagattcttcatccctgatttcttgctcgagatctttttgagaaatagcaggggactcgtcatcactatctccctactcgagttcatcttggaaaacagaagaggattctgttttagtggaggcattagttgt

SEQ ID NO: 13712 - DNA, 520 bp, Cannabis sativa
tttttagaaataaccgacgccatgtatagtgttcccctatgtcgttgattactcccaaataaccgacgccataaggagtttataatcctccccagcccttcatcttcctcattcgatcagccaacccaaaacccccaaaccctctccgccaaccaccttgttaatcaccccccatttcacccttttttcaccatttcaacttattttttgttttttaaaaaaaaaaaagattcttctattttctatacctaaaattatatacctgaaaagatcacatttttcttgttttaagtgtaaaatgaaggtagagttagtggttatgatggttatacttctagccaccgattttaatagagaaaacgtttaatctcaatatccattaaggtataaatctagtttctactaattttagtaatgtacattgctttattttgtaaattttttaagggtttttctatattattaagattgtattattgtgtaaatgcatctgttatatgacattctgttctctggggat

SEQ ID NO: 13713 - DNA, 517 bp, Cannabis sativa
gggctctatttaagcattgccacgtataggttcaaggtaatttttattatttaatatttgaattctacaatttttttgttctcactataccgatgaccatattgcagaacaaagctctcaacttgtgaggccttctccgcaatcacttattaataaagtaaatccaaatatttgtttatttgtacatgaattgttgattttccttttttatctctaaataaattcgttggaggcacaaataagcttgaagttataatgagccataacaaacagtgaaagaaagaaaaactactgcctactataatttgattaagagaaagagatggtggaaaagtgagagatgtgaatatgtatacttaaacctgttttataaatattgattagttgtgcaaagatttttttttttttttttacttcaataactctctttctataggttaattgtacttcatatttgtttcataaagtcgtattaacagttggaagaattatgaaaccaaccatatgactataatta

SEQ ID NO: 13714 - DNA, 618 bp, Cannabis sativa
aggaaagggtaagtcggtagttgaccacccatgagatcgggggcttttgcggtgccttgttcatgttcagactaagctagaccacgagggttataatctccacgagggagaattgttgtaatctccactttttccacttaggtcggcgtgtactaatgacttgtaatattttaaaaatattttacgggatcccaaattaaaatgtactctttttagatgtattttaaagtgtatttattacaagttattattttattttgtattttaaagtttaatttttgctcttggctatactatatctcaaattagtgggattaattagtatatgtttagactcagcacgtggtgttctttattgttagggtgttacaatttggtattggagcgccaaagtttttaaacttcctgtagatcggccgaacatgtacaatcatcaccaaagacaagctcgactcgtggtgcaataagtattgagagtaaatgcttaacttcttctgtgattaaatgtttactgctttttgttataggtagcatataagcatctagaagaataatgttataagaaaagcaaaattattaattatatgtgaataattgttttaaaaaatgtatagtatg

SEQ ID NO: 13715 - DNA, 637 bp, Cannabis sativa
tcttccgatcttttgttgagacttttaatttgataaatagcaagtactagattttttaccctcaaaattcctttagaaaaatcgtcaaatagaaatggcaacttaggttatcatagcagtaacaatattcaaaaacaacaatttaaaaccaaaaccaatcacaaaattaaaacttgaacttaattgaaattagacaaaaaaagcttaacttggtaatgaatgaataatggatccttagtgaacacgaatagtcagtagtacacaatagaatgagccaagattacaactcaacacagtaaagtattacaaaaaaatgtttcacattgagaaaaatcacttcaagagtgatactcccattacatccctccacacacactcactatgatcttggactctctctaaattgaatctaaagtatgagcttttggagattagagatcataactcttcttccctttgagaatagatgaacacctatttatagttattggtggggtcccctttaagttggttttaaagacaactgttataactagcagcaactttcttcagattcatctgatgagcaaatagatagacatactgacttgacatgttaagtgagtataattctaacaattccacctgattagactca

SEQ ID NO: 13716 - DNA, 523 bp, Cannabis sativa
aattttaatatgtaccaaattctgtcttctcaatttttcagactgttaattttttttttaaactattgagattgttggatttaagaatttttattcaatttttactaacagaagtttaatgtggatgaaagtttagggagtacaatttagtatatatcaaagtttggagttacgatttgatagatgccatagtttggggagcacgatttaatacatgaatattcgccgtgttcgtaaatttaaacgaaaatagatagaagtctttgaatctaacaacatcaatagtttaagagaaatgttaacggtttcaaaagtttagaagatattattttatacatgtcaaaatttgaaaagtaaaaattctaactagtcaataataaataaagttattattgtgaaataaaatgcatgtgtctattttcactttttagatatattatgtaaaagaaatgagttaagaattggaccataaagtttataaagtctacacgtattattaattttatcttgaaatgaatgaaat

SEQ ID NO: 13717 - DNA, 649 bp, Cannabis sativa
gaagaataatgtgtttgggtttgattggaagtgaaagattagtgatgagatgaagaaatttgaaatttttagagagaggtggttgtacaactaataattgtgtgggaagtggttatgagattaaaattagatgaagaggcgattaagagttaattagatttttaaaggctctttagggttcacttgcgttcagtggtcgcgaccacaaaaattgtggccgcaaccatagtgtattggccaaaatcgaattttttacccatgatccctggtcgcgacttcataatggcctagttgcgactaggaaatttgtcacaaccatggattagtttggtcgcgaccactggaaggtcaaaattttccttgtttctctgtaacctctagggtcacgaccatagaatttgctagtcgcgaccactatagtggtcgaaaaaaaatattttttcgacttttcacgctttgcatggttctaaatttacaaaaaaacttctacaaattcaaagaacaaaattaaaaagctaaaaatgaattaattgcaaatgtctcaaacttaattaaagtaataaacaacttgggctgcctcccaagagcgatgttgttatcatcatatagccagatgctgaacttttcttcaaagaggcgccaagaggat

SEQ ID NO: 13718 - DNA, 532 bp, Cannabis sativa
  modified_base (228)..(228): a, c, t, g, unknown or other
ctctgcaaccgccaaaccccacttgagcaatctctccttcctcgtggacttccttaggggtgtgcataaatcatccaatccaatgacaactgaccgatccaattacaaccgaccgccaaacattggatatccaattgtcatcggattgaattgtatgttatttttgaatatccaattgaatgttggatgaggtgtctaaaaattcaatacatccaacatccaatcganctaattagtattttcatttagtttggatgagtaattaaattttttattattacacgtaaaatatatacattaaaaattctcttctttcttagattggatgaatccaatccaatatggacttaaaatattagatggatccaatccgattcaaaaagtactaagtctaaaatgttgaataaacccaaattaaaccaataaatatatataaaatacataccacgtatagaaccaatttaatccaacatctaataaatgtttagatgtgatccaaaaaaccccgtacaaattacattttgtttttctc

SEQ ID NO: 13719 - DNA, 544 bp, Cannabis sativa
attgattgagaagttagttttctacctcctgatggctggaagaaagttaagaccctacttccaagctcaccccatcaaggtgctaacaaaccatccgcttcggcaagtcctactgaagccagaagtgtcagggagactcctcaaatgggccatggaattaagctagttcgacatacactacgtaccacacatttccataaaaggacaagccttagttgacttcataacgcagtgcaatgaagtagaagctagtgcaagcatgcccgtaccacaaaccccggcatggaaagtattcgttgacggagcatcaaacgaaaatgcatccggagccgggatagctatgatatctctggacaggcttcgactccaagcgggcctgcgtttcgaattcccagcttctaacaatgaagctgaatatgaagccttgattgtagggttgaaattagcaaaaaccgtggaagccacgagagtagaagtcttcagcgattcgcaacttgtggtaaaccaagtctcaggagagtattaaacgcgtggagaaaaaatg

SEQ ID NO: 13720 - DNA, 994 bp, Cannabis sativa
ttgttgtaacaagaagatatatagaatatacatatagagtacgtactatctataattaaacactatatatatagggacacgattttgtcctgtgatgtactttcacggtacattagatgggtctcagatcaaataactccctcatctaacggttaccgtacatcacggaatacattatgtgaaagtacatcacgggataaaatcgtttcccccatatatatatattaatgaaagtgaaaatatttatatataatatttaattatttatatatatgttgtgtacagatgtgagtgtgtgtatgtgcatacaagaacaattaataataattagagaagtttagttaattacctgcaaaaggaaaagaaatgctacgagtttgatattttagctctcttaatacgattctctagttcatataaagaacgatcaatcgtcattcgtcagtgagattccacattctttgatttcatatggcttgtctttgatgtaaaactcaaatgaagcactctttacaagatgtaactcgttaaaaataatatcagttttggtaagataaaatatgaacacatgatgatgagcatgatcagagtttgagtgtttagaatgaatattgatgtcaaactgcatcgatgaatcaaaagagcgtggttgatgatcatcagagtgcttcgaacaaaaatggagtttgcatttggtgtttgacttattatcattgttatctgaaaagtaggggccaaaatcaacaacgatgcatataacgatgccatagaagctcaaatgatgaatcctcgtcgatagatcttgaagcttataataatcttcattaattttagatccctgaattcgataactacaccagtagggaattttatttcctgaataccaaaagctcagtctaggaccgtaaattatagcctgtaatacaacacaaacaacaagaatcaattatagccagcatcaacatcaacttttttcttaaattttttcagcgga

SEQ ID NO: 13721 - DNA, 684 bp, Cannabis sativa
aaggagaggagcagtggcgtcaagtggtagattgtctggaattcggaccacaaagtgctcgtccgccaccattacatcggagaagccaccaagggtggtggttccgtcgtggtaagtggcaccgcaagtgggaatcattttggggcaatagttttctagattgtttgagcattgaatacatgattggcaagaaccaatcatgtacccgactccaactttgtcacctactttgaatttggccactttagtgcccacctctgtcactataccaacaatctcatgcctgtgtttatgcgttgtttcacaaaaaattaacacatattttgtcggcaagaattacactcatattctcccattgaaagaaatatatgtttataatcattgcaaaaaaagaaaataactaaataagtaaacaaatatttataaagtaaaaggtaattgtccaatatattaaaattattataagatgagagtttcttttttcattatcttattcttttcgaaatagaatgttccaaaatctaagtcaaccacttttgaagccatcaatttgtcaagactttgaccatgcataagtctgtataacaaaatatatgatatataagttttataatataatattattacatacccaggaacgagaggatatgaagacattccccagtcattcttgatcatgtgcag

SEQ ID NO: 13722 - DNA, 501 bp, Cannabis sativa
attaaccaaggtgctaaatcaatcctttttatttctgagtaaaaaaaacccaatcatcaactatactcaagaagtagcttgctccacctttgatatttgttctggatgtaactcaaggtacttccatgttgttgtgtgccttgcttttgtgaactttatattgcaactttgaccacaatcacaattttcacaaaattttagtttattaccaagtttatatttgttgagaatcatggggttccatctcaaaaccaattggcaatgattcgagtagcccatgttctttatatatggctcaatacttttacatttaatcaatgtgggataatgttctccaataatattttagaataccttatttctcaagctcatacaatcctatttcactaacatgtccaaacctcatgtgccataactttatttgatccatccttgcacttttggctactttgcagcctttccaaccactgtctgaccagattttaggattatgttacaaat

SEQ ID NO: 13723 - DNA, 599 bp, Cannabis sativa
tctgcacctgaacttgatgaaccatgtgtattgcagttattaattgcagacaagggatctgaaccatggtttttttttttgtaatggtaacatagttgttagtgttgtgagtatgatctgcaaccagatgagaaggattttccattttgtggtgctgtgaagattcccccgggaataactatcttggtgttggttgtgaacgtttggtaatttgagggattgcagaggtaagggaatttttcgccaatcgagtaatgagtggccaggcatgcccctttgcaaaatcaatgcgatatcaatcatatcctgaggttggaagtgctgagcccttcatgctcggtccatattccagttcaggttcttggccattgtcaagcaattcaaggaacttcagacatttgttgtatggatgacccaattttccacactccatacagtactcaggcaaccgctcatagcaaaactcaacccagaattcatcacggatctggtttaaagtgatcagtcttccacgcaacaaaggtttgaagatatcgatattgactcgaattcgcagaaaaggcccccatccttcatttggagagtcctcatagacatca

SEQ ID NO: 13724 - DNA, 543 bp, Cannabis sativa
ttatattgggtattacttaagtgcaagtattcgcttttgtactcacaaaagaggatattttgtaatatgtgtagtgttacttgttatactatatgtgatctctacaatggtcactatgtaaaatggtgttacacttttaatttgaattttttaatactatagatattatggtgtgtgaatgagttatgatcataaataatatatacaaaggtctagggagctcatattgaaatgatgaagtttctttcaaaaaaacattttgctagaaactctaggcttgataattctcaaagatatttcttacaaaattccttagaattagagatagggagaaataagcttttcgacaaaagtatgataccttgtacaagtcatgatgattcccactaatctacactcaaagttgtgaagactcattgaattcgaaaaaaaaagttgaaataaaacaaatagagtggaaacacttcatgtattaattaacccttttacctttctttctcccccaacactctcactgaatccctctctttctttctatctttc

SEQ ID NO: 13725 - DNA, 566 bp, Cannabis sativa
tgcaaatgaatttattatatgcatgtcaataattatatatgcattaactaatgaataattgtagtgaagactcgagaggaagatatatgaacaacaaataaattgattataattaaatttagagaaatgctaaaagatattaatggtgcctatagtatctttctatctatcaatatcactattggtctaattaagtgtcgggttacatatagtttaaatttagagaaatgctaaaaggtatcagtagtgcctagcatcctcctatgtgtcaatatcgctattgaactagctaattgcaacgcgacatgtcgagaaagtgctaggcactactggtgcctaatagcaatacttttaaattagcattgctattaggcaccagtggtgcctagcgttgcgaaatactaacgatactccctaaaaattattatattgaattatatgagacctaatatttagttagaccaataacaatattaacacctaagaaaatggtagccagccttacctttagcatttctctaaaatttaagcccaaaaccctttagacttttactacaagaccatat

SEQ ID NO: 13726 - DNA, 679 bp, Cannabis sativa
agactttggaaaacttttggctacagtggtcgcgcccagccatacccgtaattgtaacccttttttgtggtcgtgaccatggtcgcaaccacgggttttacagaaaggcaagaaatttctttgcgaagttagtcgcaaccagcccgtagggtagtcgcgaccagcttacaaaaatgcctataaatccccaattttcacctcattcaacctaaacctaaaaccaattcttcccagccatcccaaacccactcctatccgaaaacaacaaaaaattcacccattcttcaattctcctcatcccttcaccaattcttcaatccaaatcatcccaaacctcaaattttctcatcaatcatcatttttcttcaaaaatcacacccaaaatcaccaattcccacccaaatctgaaaaaactctattcatcatcttcaacctcaagcttttcaaggatattcaacaatggaggtggattagtggcttcttcaattagtaagtatcatccttttcttatttaagagattgattgaaggatttatggatttattggaattaattgggtatttgggaattttgtgtgattgattggaatattgtttgaatattatggattgtggattgctattggtattgtttgtgatattttggagacatttgtattttgggaaatcaagaaatttaa

SEQ ID NO: 13727 - DNA, 858 bp, Cannabis sativa
aaataatatattaattaaaattgtggtggttctttttgtaagcttgtgctaattaactcctattgtatcgtgtgacccttcaaactttgttgctatagttttgtgcaatagttcaagctgctcaatgcttaagccgaccatgacttacatttttatatttttctagattttttttaatttatcaattttcattcaaatatgagaaaattaaattctctaaagattttttttttttaaaaaaaaactatattttgtaacataagaattttcacattcatatttagccgaataagggtctctttaaccaatgaataaaaagtgctgggaaaaactaaggaaaactcaccaaataatgtacaagaatagggttatttggtaattctttaaattcgagaatgactatttccaatacttttatccaaaaaacaaaaaagagagagaagattttattagtgtatttttttattggcaataacaatcactaattaataataaaaagtgtttacagtcactctcttatgtattcaatgtttatcatacctattgagaaaaatttaaatatattttcaacattataaattaattaaaatattttattatatttttggaatatgaatgttgagtaataggaggagtataaagaaatgaacactcctcataaattatggtatagccttatcatatatgtttatagataagatgagaagtattccatatatattaattataaacaaaataaataaagaagaacacaagaagaaaaataattaaagtattattaatataactattatatatttatatgatgattaattatcatcatcaagagacatcttttacaactaaataatatattat

SEQ ID NO: 13728 - DNA, 532 bp, Cannabis sativa
ttatttttaaaataaatttaacataatagttacatatttgatataaatattgaaatcacctctatatttataaatatatagaataaaaaatgttgaaataatattaaaaaaacaacaattttagtaaaatttatattggcatttatatttaaatatttatgtaaattaaaatatatatttttatttgttcgaaaaaaaatatatatttttaagagaacaactgcatgctctaattcaatatgtgtggatctacttatgtgtagcacgggtttcacttagattgtagataaagaacatattattttgtagtgataatgtagttcctatcgtaataaattgtactgagatttgttttaattacaatacttaattaagttaacgtgttaatatatagtgtgatgaaaaatttagacatcatcatactaaaataaattttatgaacaaagttcacataaagatatttaatctagaataattctaagcaaacaatggaattagatgtacaatgatgtgaatttaattttagccttat

SEQ ID NO: 13729 - DNA, 618 bp, Cannabis sativa
attttaacatgtaacaaattatgtttattgaatatttttggctgttaaaaattttcttgaagtattgatattgttagatttaagtatttttgtttaatttcattcaattttactatttcaatgattgtttatgtactaaagtatgtttcccagactttgatatttacctcatgccgctcgaactttgatatatattaaatcatgctccgtgaactttcatccatgttagactttttttttattaaaattagacaaaaatccttaaatccaacaatcttaataatttaagaggtattttgaacgatcttaaaagttcaacagatatgatttgatatatgtcaaagttcgagagtaaaatttttaattagctataaaaaaaaggttatttttcagacaaaacaagaattaatttgaagaacccttttgctacacataaatctgttcttgtttacactttttctgaccaattgtcaagttagtttggaacaaccattctagtatatttctaagtaaaaaacatatacacgtaaaacacttatatgtaattaaagtacaaaacttgatattaagatatactgaccaagtgtatcaccggtcctaaaacgctttcccttaggc

SEQ ID NO: 13730 - DNA, 502 bp, Cannabis sativa
taaaacctaaataagaaagaaaaataaatatgtttcaaaaagaaaaaaaaaatgaaagaaaaaaaaaataaaaggatactgtacaattctttttttttttttatatatttattagggtaaatagcggcataagtattacaagttttatgtttgtaagtcccataaactcaatatttatttttagctgtaaaagtaactaatctctgtaaaaatataattttttttctaattttgtcaatacaactcgattattgtcttaaacagtgcacatataagacttaaattcttgattattgagtttagataaaaatatgtagtattagttacttcataatattcttttaataaattcaaaatagatattgaaaaaaaattacaattttacaaatatttaatatgctaaaaataaatattaaatttatatggttactcccatttagaatatttattattatttatttggctgaaagtgctctcaaaatccacacacattcaatacttt

SEQ ID NO: 13731 - DNA, 557 bp, Cannabis sativa
aatctcagccattcaatccattttggcttctcctctgcatcctcgtcaatctgaagtacttctcctgcttggaggccaagcttttgagcattctcagaagtaagatacaaaaacggaatgttgtccacttgtacccagaaaatagaaataaatgattagtatcataaatacctgtgttaggggaacattcttttagaactaaatgatttccattaatgcaccacagtgtcttatcccatacccacttttgccagcttcattattaacttttaaagcaaaacgtgttgttgacaatgtgtccgtagttgtgacattgtcgatattagtccaagctctctttatggtgccacacacaactccaaggtcagaaactttccttgatatcactttgccgaaaagggagcaagtggcaagaatctttgctaaagtgtcatcaagaaagagactgagagtggccttgtcaagggcaatgcacccacccctaggaatgtcaatcgggtcggaccgtacccgacccgccatagactcagcccggcctgccccgatatcactttctt

SEQ ID NO: 13732 - DNA, 609 bp, Cannabis sativa
gtaggtacccaaaaagacttgaataccgtttgaactacctctcactcattcttttttgcatttttttcttatattctttgaaatttataatttggcccactttaatctaatttttttttctttttgaccctctctaaagttcaactctagctccgtccctcactaagagaaacttaaatcttagaacttatgaaaggaaaatacatgtctaatcatcggagcagggccgaccctgaaatttagtgggccataagaaaaaaaaatatttttggaccctcatttaaaaaaaaatatggtattttttaaaattgataaaaagaatatgtaattttaaaaggggataaattttttttgggcccttgagctaggtgggccttaggcaatctcaaactttacgggaagaaagcacatgcctgatcatctatcgatattgcgttatagtaacattagtaatgtaatgtgataagaataatgtataaaaaacttttaatacatattttgttacatgtaaatgttatttaaaagacttgtatgggttagaggagcttactgtgatatcatgtcccctattcatgacagtagcaagagctggtttgtaatctcttttca

SEQ ID NO: 13733 - DNA, 648 bp, Cannabis sativa
ggatgttctgcattttttattttttttttgatgggataatttagaaaaaaaaaaaatacaaaaacaacaaaatggttacaaaaatacagtatgtaagggtgtgcataaatcatccaattcaatgacaactgaccgatttaattacagctgactgtcaaacattgaatatcgaattgtaatcggatcggtttgatgttatttttgaatatctaattggatcgaatcggatgttggatagggtgtccgaaaatctaatacatccaacatctaatcaaactaattagtatttttatttagtttggatgaataattaaattttatattgttatacgtaaaatatataatatgtatatataaaaattaacgttaaaattttactctatttttcttggattggatggatccaatctaatccttggttcaaattcacctatccttaccttgaccaaaaagttttcccttttcaaaatggttgaaacagtttctttgtcaaataggtgattcaatttttgaatgttccaatcaccgtaatccgtcataagatcagccactctgctaccaacagcatctacagatccattatacttaggataaaactccaaaccatgaaaaacccaaggatcattccagattttagtatcccttcca

SEQ ID NO: 13734 - DNA, 572 bp, Cannabis sativa
aacatgtaaaaggcattaaaaataaaaaccctataagttatccaaattatataggtactctcgtcttatataaaaatttggttctatttcactatagcataatcgacactcacttctcaaatttcgcatcaagatcataaacatttaattggtgatcaggcaattaaaagtaattaagtacaaatgaaatagaatacatagaaattgagggaaaattaaatcatattaaaactaaatatcaatttcaaacaatatccatctagaccctaatgaactgtttagctactcatgttcatcgtagcaaacttacacatattaatctaaaaatagagaagaaaagaatgttaaaaaccctcttgaaaatgcctccagtattgaatttgatttccaaaattcgtactcccttcaatgcttttggtttccttttgaattgcttgatgaaaaccagtgaagtccacttcttttatagccaataagggataaaaaaagatagaaaagataaccccacgttgaaaactcctattcagcttcgaattagatgggcgagccgaggtatgcccttcctatgtcgc

SEQ ID NO: 13735 - DNA, 505 bp, Cannabis sativa
tattctaatgttattaaattattgacttactaaataacctgatgtcttatcactgtagaatttcctttgcaccccccattgtataattactgaggtgaaatggcgggaagttcctatattttcaataacgcacgtaaggatttttacagtgttatgtcaaatcaatttcactaaatgatgacctgtagatattatgggattttatttttattttacatatttaataagttattatatgaaaacccgaaacctactgatattactttggggttttttttttgtgttataataattaaaatagtattttttaagttatgatatactgatatgacccgattcttataaattttgaaattataaaataggttagaattaaaatgattcgattatatgaaaaaagattaaccaaattacgtggaaacatttatttaacaacctatgtgaaagtttttttaagaggttataaatgccaaaaaaataaattttttatgtaccacaaaaaggt

SEQ ID NO: 13736 - DNA, 662 bp, Cannabis sativa
ccccccagccgatccaacagccgaataggccaaaactccaaaaaaccccagcctgcgacttaagttctgcatctcaatgctcgattttttcgtttccatgaggaaaactaaatcaggattctcgctacgaatcaagctacgaagcgagtccaaagcccgaggctttccaagcccccggcagttccaagaaagaactaacattgggggttggggggcatgataaggcccgcctcctcggccacagtaaaatccgaaacctcctcattagagacaatcaacttttccaatccctggccctcgccattatcttgaacggagacatcattctcctcctccagtcgacatggttttttccccaaggacaatgaagcaaacccagtaaaagcatgagagtccagcacactctccccaacttcctcgatccttcttttcttaccacatccagcacttgagttattaaactttggaaggcccaaaccttttttatccggatgaaaaggcttcctagaaatcttgggcctcatagccttgtgggccttagccagatttgggtcaagagagcttttaaataccatggccaggtgcttcaccttatcttccaattcatttatgggcccaattgaagaggaacaatttggtattgatcctttagagtcattgtt

SEQ ID NO: 13737 - DNA, 787 bp, Cannabis sativa
ctcattgagttgttaaaacaactggaatatgtaagcttgatcagtatggtggacgattgtagactttggaggccatatgcggagggtatattctcttgtaaatcaacttttagttggtttacgtcaaaccataaccacagtggctaagacgttgtggaaatgttgcatttctacaaaggtcaaagtctttgggtggttggtggtgctagggaaagtgaatgtccatgataaaatgcaagcaaggcgtccttatctagctatttctcttagctggtgtgtttgttgtaatgctaatggagagagtgttgaacatttgtttatggaatgtagtctctcttttagtttgtggttgaatattcaaggaatttgattatcatgggtcttactttatgccttccctcaaatgattgtcagtaagccagttgagaataaacacctagtaagataatggaggacactggtgatggctactgatggctactgtctgagcaatttcgatggaaagaaataacaatatttttgaaggaaaggagaactctgcagaggacatttggggaaaaattatgttttggacagcatcatgggcctcaaaggatttctctttcttagatatatgtagagattggaaaactctgttgtaggcttgatttttgtttgctttgttttggttgctgttggttttagtgtagtttgtgctaaaacacgtgtaaccacggttttcatctgccacaagtgagttttctatacatatcggggagtgaccgcctctttttcaaaaaaaaaaaaa

SEQ ID NO: 13738 - DNA, 581 bp, Cannabis sativa
atatgttcttattctcatatattaccgattttgaaatttcgtactttataattaccaacttattatttaattcatcaattaattaaattcagaacaataaatttggtacataaatatgtaatctgtagctacaaaatatgattgtgtaacagtagaatgaataatttgtaaagaataaaagtacaaaaacataaaaatacacaagatttttatacgttgtatcaaaatttcatgcagattgttactagtctacgggaccacgcccagagataagattcatcagatagatctcaaaaatataaagtaattgacttatgcataaatagaatccctcttattatatgaccccagcttgatgtatttcatcttctcaaatgaatcttactcaaagttcaagtactcgaactcccttcaatttgcttgaagagtgtttgcttcctcccaaggtaagacttgaaacattttctttcaaaaatttgaataaccttctcctgaaggcttgcacttttattcttattgtttgttgagtttattacagacttaaaatagaaacaaaaaaatatacacagagatggagtcga

SEQ ID NO: 13739 - DNA, 582 bp, Cannabis sativa
cttctttaatttacttaaaggaagtaacaaggggtttgaatggatggatgaatgcgagcaagccttccaagccctcaaactccatctagccaagcctcccattttatccaaaccaatagatagtgaagaactatacatctatttggcaatcaccgagcatgcagtcagtgctactctagtgcgtgaggaagaagggatacaacaccttgtctattacatcagtaagcgtctcattgaggccaagccaaggtatccctccatcgagaagcgagcctactgcttggtcctagcctccagaaagctaaggccatatttccaagttcacacaatcaaggtactaactaaccaaccatttaggcaagttctgatgaagctaaaagcatcagggcacctattcaagtgggttgttgaactaggtcagtttgagatcacctaccagcctcgaacaacaatcaaagggtagacattagcaaacttcattgctgaatgtattggcctcgaagaagacgatcctatgatgtgtgaaaagaaatctagccaatttgttttcctagattaggggaattccatgcattcgttcta

SEQ ID NO: 13740 - DNA, 548 bp, Cannabis sativa
agattgttgcctataagtttattaattatttgcatagaagggtcatgtttgtgctatagttaggggtgtgcagaaagtcatccaatccaattataatcgaccgatcaaatttcaatcgatttaatacaattgaatatccaatcataattggatcagatcgaatgcaaattttgaaaattcaattggatcggatcggttgtttgatggcacattcgatctaatagataaccgaacttaaccaatctagttatcatccaataatcatctaattatatttatatattttcggtctgatgacccccttcctttcccacacatatatgcacccctaaataccccctttaaatatacttttttagggttaatctaagaatgtttatgtattttaaagagattattgaaatttgtaatgctgagataacacaaccaaccaacgatttcgcaactatatcaacacccttagagacaacatatagagtctaattaagtcaccttaagagccaattgcaacgcagccaacgcttcattctccatagcactatagctag

SEQ ID NO: 13741 - DNA, 505 bp, Cannabis sativa
cgaccctaactcataaattcgtggcatgttcgtgtgccgtgttgcaacttgaaattattttacccctataataattctaatgctaattaggatttttgcccttgaactttgacatataccaaatcatgcctctgaacttttaaggtcgctaaaaatgctcaatgaactattgagattgttggatttaaggattttttttccaattttagtaaaaaagtctaacctggataaaagttcagagggcataatttagtatatgtcaaagttcgagagacatgatttggtagatatcaaagtttgagagcatcatttagtacataaacaatttttgaaatagtaaaattgaatgaaatttaacaaaagtctttaaattcaacaaaatcaatagttcatggggcatttttaacgatcttaaaagttcaggggacataatttagtacatgtcaaagttcaagttcaataagcaaaaatcctaattaatttaattataatggtaagagagaat

SEQ ID NO: 13742 - DNA, 503 bp, Cannabis sativa
cagcatcacacaccacacataaactagtagcaataggaaggaacctgcttagtatgtcacgagttagcaactgttcatttaaaattttccaataaatgaacctatgtttaggaacgacaagtttgtgccagacatttgttgcataggggaccttagcagcccttatcatatcattatagaatctctgcactttgaaattgcaaccggttgaagcaaagttcaataagcttacattcgttgagtttcgaatttttaaaagcttcttaaaataccaacttacatcaggttttaccggaaaagaccaaacatcctgtccctttaagtaaattgagttgatccatttcacccaaaggttgtcttgcttgttggatagagcttacaagtgtttagctatcaaagccatattccataattttccttccctgaacttgataccaccataatgtttaggaaggaaaaattttccccatgaggaagtatgaagcttgctcctattacccttc

SEQ ID NO: 13743 - DNA, 546 bp, Cannabis sativa
tcatactaaaccacaattaatagaatattactcaatttacttaatatggtgtaagccatgaggtataaatatataagaaaatactttatatagtatttttttaattttttttttaaaattatagtttgagctgttttagtagtttcttcagtgacttttatgtgagttgttatgttattttgattgtaatttaggttgctctatcaattactatataaatttttatataaatttctcgaagaatgtaaaaaatttattttgaagtataaaaagaaaaaaatctcataaatatattatgggcaattttgtttttattgaaggaatattatatgatgaatacaattttgtagatgccttttttttttttttaatgatttgggttgttctagtaatttttatgtgagtttttatatgaatttaggttacgatgctttattaattgttacgtgaatttttgtaaaaatacaataaaattagtttaaagtgtaaaaataaaaaaaataaaataaaaacacttttataatggaatacagtttgtagttatca

SEQ ID NO: 13744 - DNA, 717 bp, Cannabis sativa
agcattttttgttttggttttttttccaattaaaaaataaataaaacagtacaatgacattttataaaacataagatatagagaaattcctccagcagaactgagtactattataaacaaagttaagaagcaagaagaaacaatgagacataattctgaatgaatcatttaaagaacatacccagggctcgcaaaattcataaccggctgcattaccaagcaggttaaaagttctcgtgcaattgatcgaattacaggagtttgagcttcacgtggtcttagcaccacagtcaacagtccagccattaatcgctgaagaacctataaagaagcatggaacattgccttacatacaagtgataaaaatattagaaagaaagtgatgaaataaatctatttccgccagtatgcaccactcacaccttgtactcactctcaggtgataccagtgcaggatgaagctctttagaagccattagatggtgttttaacctttcatccctctcttctgaagacaatgttcccattacatcaactcctatggcggcttggtttcttctaaacaggtctaagtggtctcccactagatcaactatatccctgagacagcagagtgacgcgaatttattagttacttaaaaatacaaaagcttcttaattactagcaaattctttagttgtcagcaggattttaggtaccgtgttaacaagtcaaca

SEQ ID NO: 13745 - DNA, 542 bp, Cannabis sativa
aaatagaacttcccattaaaatataccaatataccctcatcttccactcaagtctagcacataaattacattaacttaaggtaaataatagagacatcatctataaaagtgggcatattttaaagaacatgaaaatgaaggtaaaaattaaaatatgtaaagtaaagtaagtatataatgtaatttccttaataaatattaataaaccacatggacaaaaagattataatttccttaatgaattgttctgttctatacctcttctagctgtgaaaaagaatctcaagcatctaaagcaatttatttcccttgtatagaatagtaaactcacaaccaacaacaacaacaaaaataagtagccttacaagcttagtcccaccactgcatttgtgaaaataattagtcataagtattagaaaagcttgtgctttcctccctatgcaactcaccccaatgactagatcgcctcaacggttgcttcgacccttggtttggtcttacgaggacgaccgatatgccttacttgtttaccttttaaatac

SEQ ID NO: 13746 - DNA, 598 bp, Cannabis sativa
cttcaaacaccgagagttagttccctttctttccaccatccaagcagagctatattaacagtatttatctctaaacactcgaactcatatcttatcctcatccttcaaaaccatccaaaataacttggcaagtagagcaatgttcatatcaacaaatctttgaaaaatcacatttttgattagtggagttattaccctgattcttggggaactaaggagtaattggctggaatttctttttagtaattgtaataaagtttgtaatttgttcgtgtgattttatatatttctattaattaataatgattaaatgttcttaatagtcaagaaaatgaactagtactacatttaaaatttctttttaaaaaaaaataaatatgttatatactcatttcagtgaataaggaggaatgtcaagaaaaggaacatattaatgtatgtataaggggtatcttttttaccaaagtgtcttactatacctacttacaattgataatcttttgtatgctactactaatttatacacacatatatttacatatatatagatgtgtatgtttatataattaaattggaaatgtgatgaagtaagagaagt

SEQ ID NO: 13747 - DNA, 663 bp, Cannabis sativa
ggacacttgtgaagcatgataagcccatcataataataactttgcttaaaaaataagcacacacagtgacacagctaaacatcaaacgaaggaaactgacaatgacctccttccttggtatgacaatgacaccaaaaacaatgctaaatctttaaacagctgaaaaaaattaaatattgaatccaaaaaaaccatattaacatctttgaatttgcaagcaaaaccacataaaaccaaaagcaccaaacgaaattccactccagaagaatcaaagattaaattctatgatttcacatgcaaaaaatgaaacaaatttaacccaaaaatctgcatcttaatcaaagctttaccgtgtaggaaggaacaaaaacaaatatgtacatcatacacgacatctttgagcaccaaaaccatgaaaatttcagtcattcagggaccaaaaacaaaggggtttaaagagaatcataccatccttcaaggcaaccggtttccttcctaggaggttcttgggcatattgtggagcatacccttgtggtggataaccctgttgtggataagcctgctgtggaggatacccttgaggagggtacccttctgcagggtaaccaggtggagggtaggcatcctttggagggtatcctgtaaaagaaacaagcaacaaa

SEQ ID NO: 13748 - DNA, 584 bp, Cannabis sativa
tttatacatatgatcatcattttcgtcttggaatctggtcttgattttctccacaaaagtttttattttgttccactttgtatgtacatactggtttttcagaaatgcagtcttttttctgcttgaaataatatatataatttataaaacataacttggctatgtgggaatgaatgagggggcatatgcttggaatttctatgtttgctgttgttgttttatattacttttgtcccactatctgtccctagcattatttttctctcatttttactcctctacctctacgttaactaatatttattttgttcataataataaattcatggcaaatgtttagtatatgtaattgtaattgcaatgtatcaataaaatatttgagattaatttgtttatggatttttttctttgtgataattcagaatataatttttatttatttattttctgtttctagttactttatctttagaaagcatgccttctccccatgtttaaatggtctaaagattatattttttggaaaagtttaattaggctcattattggctactagcttgtgttataaggtctatatatgttgt

SEQ ID NO: 13749 - DNA, 501 bp, Cannabis sativa
aatttcaacaacctctctcaatttagcttttatgttgattatagtaataagacatttcagttccataaaaatatatgcggtaatgcatattaatatataatcaccttaactgcttaaaaaaaaaatgatagctaacaatttatttttattaccaattttatatttactaactctatttaccatacacacaattacactcatgtttattattttaatgaatttttatgattgttttttataaaattctcttcaagaaattattttttttttttaaaaaaaatatatatgtaatgagtatctaataaaaatctttacccgttaggtaatcctcactccgtcccgttttaatttaaaaaggtatatatggaataaatttagaaagtaagtattagggcagggagcaatatccctgcacccactccgcccgtttacatccctatccttataagctttaattcctcaataatgagatgaaaatacttattaattacatatacacaa

SEQ ID NO: 13750 - DNA, 647 bp, Cannabis sativa
gaatttgatccaaaatatgaatccacacttaggtggcgtttggttgaaggtaatgaaagggaatggaatggaaagaaaaaaaatattctttccatttatttttttggttgcatattaaagtattggaatgtcattccaacatttccaccattttggtagaatgactatttcgtttaaatggaaaaaaaaaaaaaaaatcattttaatgcataatgagaaaaaatttaataattttttttttaatttttttttatgcattttaaattttatttcattttattcatattttatttcttatgtttttattcctcccaaccaaacgcggtgtcgtttggttgaaggtaatgaaatggaatagaatggaaaagaaacaattttcatttcattctcatatttggttgcattttaaagtattgaaatatcattctaatggaatattcttcccatcattttggtagaatgactatttcattttataaaatagaaagaaagaccattttgtattaacataaaaaaaaaaattaataatttttttattaattttttatgcattataaattttatttaattccactccaattcattcttatgttttcattcttcctaaccaaacgctaccttaatttgaatcgaatgcactatgaaca

SEQ ID NO: 13751 - DNA, 504 bp, Cannabis sativa
tcatgcatgattactcaatattcacgccgatctacatatatataggtccttgtcatatatagtttctattatatacaccacattcacttaaatgtcatactacatcagtaatccgaatcgagattgcttgcactgaatacaagcaacagtgaactgcactagtaaccattgattaaagattctttaactttaatattttgctgactattttattcatgacttagtgatcttaattctctgtacagtataagtcacaacatcaagtatgaataatgaattttccgatatttatatataaatcattcaatattaaatatttataatttaacactgaagcatatataaaaatgtccaacttatatttataaatagaaatatctgtactgactttttatagcataaaccctaacatgccaaacatgtgctttagcaccctgggttccttgtctttgttcccgcaatctcattaaaagcaacatcgccctaaacataagtgttttggtt

SEQ ID NO: 13752 - DNA, 601 bp, Cannabis sativa
aaggattttgctccagcaatagcagtgccacctactagtggtagttctgaagaggtaatcttaatgttattttatgaatttatctaatgtaaatttataaatatggtgaactgacaaattgaatgttgcttatttaatttggatttgcagaccttactgtgttggatgcactgtctgttgaagcctagtaggatggtactaaaggatgctttgggctacattgtgaaggagaaatatttgaaagatagaaagttttccattgacaatgattaatacctacttaaatattatcattaggtatttatcaaagaagtcaatgtggagaatacactgctcctatttcctatagccaaagattcattgacaatagtaggtcaagctataaaatattatgtagcatggtcaaaggactatcttacacctattggaaaacacttggtatgtttcaatctgtttacttaacttattgtgtttattcattaatgaaatttctaactttacaattttttccatatatataaacacaaccacccaccaagaatatccttaaagtgctaactttactattttttcctgtaatatccttaaagtgaggatctat

SEQ ID NO: 13753 - DNA, 622 bp, Cannabis sativa
agaatgatgtaaatccttttcaaacatgatcagacaaacaattgatagaaagaaaaaaaaataattagaacacaatcaatcacacaaaataccaagacctattgcataaagaaacctagtttctaccataagaataaatgagaataaagagtctttatataaggcaaaagaaacctcgcaaatgtgaagccttctcaagaatgtgtagaaatttcttttaactgatgcttcatcaaaggatagagtgatgggatcgcagtggtgaccgtggacaggaatgctggttagtgggtcactcagcacaacacaagcggaagctgattctactcttgagggagtaaatgaaagctatgaagcaggcaatgggattgcctctccctctgtaatgacttcatattctgttttgatgaagaagaaatgcatcgaaaacgaaatggatagtaactatctgcactgattaaaaactagtctctcaggctttcaacaaggatggttgtcctgcagattggaaattatggagtatatctttagatgttctccttgtcaagtctagatttactgcctgttttatttttcctttcttcaatcatgttactaaaattaacaatgcttttgctgggct

SEQ ID NO: 13754 - DNA, 594 bp, Cannabis sativa
ggtaaatgttcagaatgtgagacaaaataataggatcaataccgaccatatcctcatgtgaccagggaaaaatgtctaggtttgctctcaaaattttattaaagctaattttatttcaagcagcaaacctttaccgattttgagtttcctggccgggatgtttggatcgatttccactttttctagttcttctattggccaaccatttatatttgtttccccaagttggggatccatgtcttcatccccgctttgggtgacttcctatttgggcaatgattttccccttgtccaacctctggctaaaggtattttccctcttgaccttagttagagtaaggttgtagcattcctgtgcaattctttaatttcatttgagacatcccactccacttttggttgggaacttgacccacaaatgaaaaaataatgtaacaacttttaagtcatatagggccgatcggcctaacatgacataaaaagctgaagggacatcaattattaagaattacgccattacagttatgctcctcgaagcttgtccaatagtgagtggcaggcggatttgtccaagaggtgcaatactctggttgg

SEQ ID NO: 13755 - DNA, 508 bp, Cannabis sativa
gtataagatcatctctaatgcttacactatttttagtgtatttttttcttcattaatttagtgcataatttattatttttcatgtaacaactctaataattcaaactaaatatatatatacaatttaaaatatttaatattttatattatatacattaataactaataacaattaatttataatataattatatatattgtcaagaaataatgtatgattatttttaagataactttaaaaaaaaaattagaatgaaaataaaaaattatctagatttaaaatctaacaccattaataatatgaaattcggcgtacatacttaaagttaaatagtgtaaagattctgtgtacatgatcaaaataatcaatttttgtataaaaatcacaaatttattaatgatgaaaattttatatttaaataggagagatgaaaatcatgagattatattagtgggtggaggttgaagtcatggtggaccttgccgaaggcgtggagcttgagccatc

SEQ ID NO: 13756 - DNA, 619 bp, Cannabis sativa
ttatggtagttacagtgttaccaatacaagtactagggcgtacgtcgtgcatgcagtacaacacttagtaactcccgagagtacaaaaatggatctaccaacacgagtacagggttgatactttagtacatatggtacagtggtcgtacttccattaagaacgttcttaaccatttgatgagctcggttgttgagctcaggtcggcttaggcataaagtcggtatggcattatttatatattatgcatatcttactgagtctgttgactcaccagtttgctaccttgtgtaggtaaaggtaaagctaagatggaggagcagtgagttgaagctttgcagtgattgtacatatcgcgacagtacagcttggagggtttcagtctttcaacattttgagttgtattttacagttgcttgtcgtttgtaaaaaaaaattattactaagagattttgtattagtaaatgtaatttcaactgtgttttgaaattcgggatcgcgacccatatgattatataattataataatattataaaattaattttggtttagcaagttttcaaatgcaggcgttacaactatagctataacgattatgaaatgttgcttagatagtttgg

SEQ ID NO: 13757 - DNA, 627 bp, Cannabis sativa
aattatgattttataggtttttttcttaaattataaaaatatatttttattataatataaaaaaaataaaataaactgaaaaacaaacaaaaaaaaaaaaagaaaagaaaagcaaacaacatcacagttaattggttttactattcttttcaaaaaaaaaaattggttttactaaaacatatatttttataaataaaaaactcaaccgtgaaagtaataaattacactgtattaatattttctttttgactaattagaatttttatcacctaaattttaacgcatgataaattatgattttaatttatttttttgattgttaaacattcttaacattgttaaattttaaaaaatttgtctaattttatttaattttgataattcaataattagttatgtactaaataatacttttcaaattttaatatctaaccaattataactttcattttattatgttaaatcctttttattaaaattaaacaaaaatatataaatccaacaaattgggttcacaaaatttttaaaaggcttttagaatttgatttggtacatcttaattattcttttttttttttcttttttcaaatttgtgatgtgttaggttgaaaatttctatatataaaa

SEQ ID NO: 13758 - DNA, 665 bp, Cannabis sativa
agtgttaaatgaatgaataaaataataaaatgggtatgtgtggtgaaaggtaaaaaatttaaaaagactagaaaattttatattaaaataggaacatataaatttaaaaatttacataaaatagactaacactacaaaatatagttctacctttagtaataacttttaatcacgacataaattttttgtaattaaatgtgacttttagtcacaataaaaaaaaaataacctgtaaaacataatatttagatacaagttaagttgtcactaatttaattttagtaaaaatacatttagtcatcacagtaaattataatttttgtgattaattaatatatttaactacagactttttattatgatttataattagtcacaattttttactttaagtcacaaattttattgtaactaaaaataaaactttttgcagtgtaaattgtaaacgtagacaaataattatattatttttttttaaaacaaaaaaaaaaaaaaaaaacccacttgttttcatctaggtctaccactatgtgtggaatatgtatgttacaaacataaaatactttaatgattttaatgattttaggtcttatagtagtgagggagagctagaaatttaaataaaaaattaaggaggcttataatttagtttttagatttattat

SEQ ID NO: 13759 - DNA, 554 bp, Cannabis sativa
aaaaaacagttacacagtaaaaaatttataattgacgtgtaacggtaaaaaagaaataaaatgagaaaaatcagtatagggtgtaaatttccctatataaattaaaaagtttatgttttgcaaagaatttttatgtgaattgtaaattgtttttaattattatatatatataaattaaaaataaggtgaattgtaatttttttttaaatataattttttaattttaaaaaaatgtgatgaagaaaaacaaaaaaaaaaaagagttattaatattttttttaaaaaaatagaaaaataaataaaaaatatattttatatcaattaatatttatgaagttaataaaaaattaaaataaaataagagaattgaaaaaataattaaatttaattaaagagattgtaaagtgaaatgctaaccactgatatctctccaatatatagattaaagtattgaaaaatcaatattaaaacacaataatatgctacctctctttttgtggtacttggcaccgtgcgcttttctcaattattaaaacatttggtaattttgtgca

SEQ ID NO: 13760 - DNA, 505 bp, Cannabis sativa
ttatattttgattaaaaaatttgtagataaaaatattagttataaaaaaatataatttattataattaatgtatttttagtcacaatattataactaaaagtaaattagtgatatcttatatctaatatttatactttaatcacaattaattttttattgtgaataaaaattacatttaatcactaaaaatttatgttgtaactgaaatgttcataagaatcaactttgggtgtctttttttttgtgttgggagataataactttgttgataaatgcagttttgtaaactaattattgaagatattatagagaaatgttaaaaggtaccagtgtttagcatcatcttatgtgttaatattgctattggtttaaataagtatcgggtcctatataatttaatataatcatttttaaagagtatcgctcgccaatcacaagacgacatatctagagctgttaggcagcagcactgatgctctttattataaggtgttcattgaaatt

SEQ ID NO: 13761 - DNA, 509 bp, Cannabis sativa
gtagaggaggcccagttctctctcatatcttctttgttgatgacttaattcttgtggggaaagctaatttgagcaaagctagaggttactggcagtgccttgagagttttcgttcttggtctggccaacaagttaataaacttaagacctcaatcttttttagtaaaaatactcccagtggcctgaagtgggagattcgagaggccctgggaattggctccccagaaggaaatgtgaagtatttaggcttctccctgttcagataaagatagaaggatgctaattttaatttcattctggacaacctctcagctaagctgcaggagtggaaagcgaaaacattgtttaaggcgggccaggctactctcatcaaatatgtgggcctgtcgatgtcgatgtacgctatgcaaactactaaactatccaaacgtctggttaccaaaatcaacaatatgatgcgtgacttctggtgtgattttgtgaaagacaaacacgagatttacctaaaa

SEQ ID NO: 13762 - DNA, 533 bp, Cannabis sativa
  modified_base (198)..(198): a, c, t, g, unknown or other
gagaagagttgggagtgctcaataaaatatacattaattaggattttttttccccggactttgacgggtaccaaatcatgtcccctgaacttttttggtcgttaaaaatttcccttcaactattgagattgttagatttaaggacttttatataatttcattcaatattattgtttcattgattgtttatgtactaanccatgctccccagactttgatatttactaaattatgtccctcgaactttgatatgtactaaatcatgccctctgaactttcatccatgttagaattgttttactaaaattggacaaaagtccttaaatttaacaatctcaatagttgagggagaatttttaacaactaaaaaagttgagagggcatgatttggtacatgtcaaagttcaggaggaaaaatcttaattagcctataatatattcaatagtttatttatactaatgtacttaacaatttttttattttttctttatataatttttatttttattcattcatcatggatatatttata

SEQ ID NO: 13763 - DNA, 540 bp, Cannabis sativa
taactgctatttatataaaaaaaaagatatatataataatattcaaaattattgttaattacaattttagttaatacttttttgttagaaatatcatatattttatagaaagatagtctttttgataaatgttaaaaaaagttatttatttacataaagataaaagaaatataaaaaaatatgtatggtgagtttaaatttaaattgaaatatatatatttttgtatagtgagtttgatttaagtaattttgtatataaatatatttttgatataatgcaaaaaaataatattatttgatatttatattttttaattaagtagttaaattaagcataaaaattaaaatttttcatttattatttgtcattagatcaaaatttaataatttaaaattaatatttatatagttaaattatttaattactattgtaatatccataaagaaatattcctatataatatattttaaaaagcaacaatttctctgctataaacattatataaacagatttagtataacatacatataaaatatgtt

SEQ ID NO: 13764 - DNA, 518 bp, Cannabis sativa
cagaggcacctggaatcgtgggcaagctggcagcgttacaactgaagaacatggtaattttttagactggtttaagccgattttttctggtgcaagtatggctgataaattactaatgtcggatctttgctaggcaatttggaatgggcgaaatgaggtcgtttggaaaaagaaagagctgggagttgaaagcatagtagtgttagctatgaatgtaaacaactcttgttggagttggataatgttaatgtttttttcattaagcaatcagcaaatgtagtagctcataattttgcaagagcttctcatttataccctggttgtagctttggtttggagaatgttccaactaatttgttaccttgtttggtaacggattttgatagttaataaaactataattttccattcaaaaaaagtactaaaatagtatccgtttcaaataaaaaaaaaatactaaaatagtagtttttgaaaatataaggtacaaattaattattattcataacttagggtac

SEQ ID NO: 13765 - DNA, 598 bp, Cannabis sativa
agttcacaatgcataataaaatacctcatatatcaaaattgaccccattattaatttttaccaatcaaggaaatctcagttattatatacataattcttcttcttgaagcttccgttcaggtgtgtctctggtacagtgatcgagcatctccgtttcgtttccctcctcaaatcccatttttcaatctcttcactgcattattttttctctatgtcatccttaatcattgcaaatagcctccgaatttttcgtgctcagtccatatttaatgctctcctcctttctcagttgcatttaattctgacggctccctcttttgggcatttaatgtttgcccagactttccctctcctccacttccttctccagcctcccaaattaacccaaaccatcttatccgtcgcctcaaacatatactcctttgtaatcattcctcctccgcctctgcagatagccactccaggaatcgaagcgatggttcagagccactctcctccttcgacgcgtctttctctatccatgtatcttctatctctttctcctacttcctctgtctatttaatcctccaagctttgtgttgttcggcaccttttcct

SEQ ID NO: 13766 - DNA, 640 bp, Cannabis sativa
ctaccttccacgtagcagacctacattttttaaatcggtgaacaactccaggcaagctttacacatagctttaaatgcaatgtcatctagttgagcatacaaactagctaatttctccttttcgtttacaagctctttatcagtctcttcaatcttcttctgtaaagtgttaagcatttcaatgaccttcttattttcctcttgaagcactttgttagactttttaaggacggcgttcaccttgttgagctgtttccgatcttgacaaataaaaatcgcttcagaaagagcttgtcaagaacaaataaacatcagaacaaataaaaacctcaataagaaagaagctttgaaaagatacttactcgatatattgaagaaaccaagtaatcataagatgcagcgcgtctaagctcatgtaaacgcctctcatctagaggactcaagagagcctcaacatgtccttcaatcgtagatggattcgagtgcacacaaatgtttcttggaataatagtgccctcttcgtcgtcgctttccaagtcaactctacatctcatatttggatcttccctggaattagttttcgaagtgacaacacccttcgaagacgcacaagtgcctgaaggtcccgtaattgatgatt

SEQ ID NO: 13767 - DNA, 505 bp, Cannabis sativa
ttgaggtacattcatgatacgtgggtgaatattgagaacactggcggatatttacatatcaggaacataatagcaagtaaattattaaaaatcaataagaaatctaactgtagctggttgaatagagaaatgggtttgtgacagagatgtagaagattgtattgaagtgaaaaattcacataatattaggttgggacaaactgaaattttaatttttaatttttttttttttaaaaatttattgtaaatattatagttaaatgatttaaatgttacttaaatatcataataagaacttagatataaaaataaaattacttataaatatttatggctaaacggctcttattaaatatttaaattaaaattaattattttagaaatatcgttaattatgattaatttaattctaatttttttttacctattaataaaaaaaataaccattattacaataaaaatataaatatttattctttactatattagaattatatttttaaat

SEQ ID NO: 13768 - DNA, 557 bp, Cannabis sativa
  modified_base (257)..(293): a, c, t, g, unknown or other
aattctataatgcattctttaaaaaggatgtattagtgtcctcctatttgttttggtattcaaaaaaactttttagtctagtttttttttttataattgtgtacgttgtagttatttaaggcttcctgcaacattttgggagatttgaaaacatttaacacgtcaaaaatagggttcaaacaatctattgcacgcataattcttttattttatacgcatgtaaaataaactgtttaaatattattttctatattgtnnnnnnnnnnnnnnnnnnnnnnnnnnnnnnnnnnnnnttaaataactataacatatacaattatgaaaaaaaataagactaaattttttttctaaatgtcaaaacaaataaaaagtacatcaatatacttttttttaaaattatattataaaatcaccccataaatatatatatatatatataagttctaaataattataatatgcactattatatttaaaaaaaaaactctcctatacttactaaatcctccctcgtgaaacttatgtattgcataattttggtattataatggtctctc

SEQ ID NO: 13769 - DNA, 591 bp, Cannabis sativa
atgcaacatatcatctacaaagtaaagatggtttaatttaagatcagcataaccttcatggaacttaacctcttttttccccacttttctcattatccttaacaaatatttcgcgccaagaacaaaaagcagatgagacattggatctccttggtgtaaactcctcatggctctaaagaagccctgcatggtaccaaacataaggctaaaatggagagtacaaatgcaaaccattactagctgaataaattctttaggaaaagtaaaggcttccaacatttcttcagtgaacccccatttagctgtatcacatgccttcctcaatctagtttaatcatacaattagctttagcattcttccttccataatgtctaaccagatcctagcaaaccatgatgtcgcagacaatgaatcttccattcacaaaactattctgattcagggccacgagattcggtaaaaagttctcaatctcgaacatatcattttagtagctactttataaagtacattacaacaatcgatggggcaaaagtcacttatcgattcaagatatttacccttatgtataagagtaagtgtagttgagt

SEQ ID NO: 13770 - DNA, 535 bp, Cannabis sativa
tacaacaaatgtcctaactagatagggaattacatataagctaagtagggtagtcagttaaaataaaaatacatatattctgaaggccgatcctaaaaatatatgagcttaagacgaattaaattttagagtcttaaaaatatatataaaaaagagagttatggaatttgaactcatgaccttgaatattatgccatctacctcaacaaactaagttatcgattataatacacttaaattttacttaaataaaaatctaataaatttttttattttttaattttggactccaaaaaagtgctgtgggccctaggcacggacttagcccgcctatacctagaatcaaccctatatattgtatattttaattagttacaccatatatatttataataataaaaatactatttatatataatattaactttaatataatagttaaattaaattacatataaaataaatattatttttgtccttgcttaaaaaaaaaataattacactctctcttattttaaatattttgagtgtatat

SEQ ID NO: 13771 - DNA, 874 bp, Cannabis sativa
agtaaaaggttacttggggcagaatccatatattcccctctagaaaaactcgcattttgcttagtccatgcgtctcgtaagctacggtcatacttccaggcgcaccccataaaagtgttaaccgatcagcccttaagacaagttttatcaaaactagatgcttctagaagattgataaaatggtcgattgaactggggcagttcgacataacataccatcctcgaacttccatcaagggccaatgtttggctgacttcttgatagaaggtataacttcagaagaaattccacttgtttagcgagacgcagaaacttggaagttatacatggatggtgcatccaacgaacaggcttcgggtgcaggggtaatattaatatcatcagaaggctttaagtttcactatgctctgaggttctgatttgacgcatccaataacgaggttgagtatgaagccttgatcgctggttgagtatgaagccttgatcaccagaggcattgaaagtcaaaaatctcatctgtcatagtgattcgcagctgattgtgaactaggtcctcggggaataccaggcaaaaggcttaaaaatggcgaggtatttagagaaagttcattaacttggaaagattcaattactttaaaatcgaacaaattctgagagaacaaaactccaacgccgacaccttagtaaaactggcctgacaaaatgacttggatgaattaaacatagttccggtagagatgctgagcgagccaagtatatgtaaaattgaagacgtcgagatgatatatagttctcctatgtggatgactcctattactaattattttctcgatggacaactttcgaatgacaaaaacaaggtaagattattat

SEQ ID NO: 13772 - DNA, 513 bp, Cannabis sativa
aatgcagaagctctcttcttaaattaggggacttttgatcacacatcacgaatcttgtctttgtatcctaaatggaactgtggaaaaaagcttttcaagtacttttgtatgtggaaaatacatcctaagcataatagaaggattattgaagtttggggaaaagaaataagaggcgccaacatgtaccagatagtttgcaaactaaaggctctaaaacctgtcatgaatgagatcaagcttctctgatctgcagactgcttcaataaaggccaaaataaagttagaagatattcaggagaaactacagaaagaaccattaattcctatgttgcatgatcaagaacttactgcaaggactaaactaattactgcacagaaaaactaccaatcattcctgtaataaaaggccaaaattagttggatctgagatggagatagtaacacatctctattccatgctggtattaaacaaaggaatagaaagaatcatatccttccaattgaaacagatga

SEQ ID NO: 13773 - DNA, 624 bp, Cannabis sativa
aataatgtaaatcatttttaaagtcggtgtaaatgttatttcagaccatctgttttgtaaaaattattaattggaccatttattttattaaatgataaaataaaacctgtattttcaaaaatagtaaaataagatcctgagtttaattttcgacaactttttttttaatataactaacttgaagacaattcttaacacgaataaatataaaaaatgtaaataattttctcataacacatttagatcagattattaataaattttattttgataaaaaaattagttcagtgtcctatttatatcattttagaaaatatacagtcaattttgtcatttaacaaaattgaaggttcaattagtaatttttataaaatacaaggtccaaaatagtatttatcatttttaaagtttttttttagttcttttctgaagaaggattatgttttttctttattaatttaatcacactaaatataaagtctattcaatcatcaaaactatatcataaaattaatattttgtttttgataataggggagagagattcaaacttcaaattttctttttatattttgtaagaagaagagtaaaactactaaattatatctacggccacatcataaa

SEQ ID NO: 13774 - DNA, 596 bp, Cannabis sativa
atgtgaggctatagcattaaaaaaatattacattttaaaaaatgaaatatatatttttaatttaataattataaactaaaatagtacaaaagcactttagaattttgataattgttatgtgataaaatttatccaaaataggatttttcgttcttaaatttatagttacatgtacaataggttgtatttttggtactacgattgattttgtctctatgacatggttttgagaatagtcttgtctctgtgatatggttttgagtattttaatcttgttcccgtgatatggttttgagtatattagtcttgtctgtgtgacatgcatggtttaatttagttttattcattgttggttcttcttgttcttgttctcaaaaaccaacatggtattagagctttgatcgtccccatcatagagtattcatccaatcaacaattgaggttcgtcgattcccccaagtttgtctcaacaaatcaatctacctaacactaatcttgtttctttctctcactcactttctagtcgtttggacgagttcaattgcctgccatggaagcaccaagttctacgcgcgatcaaagggagtcaactgtag

SEQ ID NO: 13775 - DNA, 513 bp, Cannabis sativa
attttaaattagcatgtaaattatttaaaataggagtgctcaaggtacaggtggtgttgtgactatttttttcaaactaaacagcaaatgcaatttttgtaatttctcaaacttcaatcgcactgtgagataaaatagtgtggtgtagtgtgatttgaacaatacactatcactatcaattcattgaacattataataaaaatgtaaaaatgaatctataaaattttaacaatacaaaaagaaaatctcattaaagtttcaacatcataatatatatactaatcatcaacttattatattgaattgtctcttaaaaaataatataatatataaattgataactttataatatatagtgcagtgcaatttgaatcataattattaaatttaaaactgtaaattatggtacaattagtttattaaaactgtttgatgaacactcctaattgaaaatagccccacgattgacgaagaaggagcgcgagtaagtgtcagagggagaaacaaattatt

SEQ ID NO: 13776 - DNA, 526 bp, Cannabis sativa
aagctcgcaggtttagggtgcaatttatcattctatgggaggctaacagacctcgtattaaggtatctgcgttttagttgagttttgtatatggacaccttatcaacgttgataacataggacatgcgagtccttatcgagtcatcgattacattgggtcatttggaccaattcgatatgtaaagaataatctttactaagtcacaggagaaggctacttagtcatcacatatatctcagtatatgcacgacctatattgttctgcttattttatattacgcgaggcgtaataatgcgactaaactctatcacggtcacatcctctcgtgagtttgattcaggcgatgtttattcttgaggagtcctttcttaacagcttagcagtcctaaaagaatgcgagtccacgtgtcactcttatttgagcttggtctcgaatttttcggtaaaaaattcgtactataacgctattactttaagctaaattcaggtgctaggaacagaataatattttgcaataaggtcac

SEQ ID NO: 13777 - DNA, 511 bp, Cannabis sativa
agtttttttttttccctcaagcgattatgtattgataagttttggttcaacgttaatatatattatacatttagtgagtgataaaagaaatttatagatactgtttaaattcatcatgatgatgataattattttattttcttaaaaaaaaattacatggaaaacatttactataaaaatttaaatgttttatttataaaaattataattataagctcacatagctagtcaagcgtaatacttcatggtcatacgcacttaaattaaacataattattacttgtgtgccaaaatatttcaaactaactgtatttatttatcatgaatccaacttattaaacttgagttgttacataatatataagttcctaacaaataaaattggtgtagtgtgcacatatatatcagtattaatcttaaaaacaaaaaattcgtttcattatatgtgaacaaattttattttttaagtttgatagaaatataagtgacgaacaagttgagaaacgaatta

SEQ ID NO: 13778 - DNA, 520 bp, Cannabis sativa
attattattttatttttttatagtaaaataatttatctatttatttatttattattattattattattttttgaaaaaataacttcaaaaaacaccaccaatgaccaaagagtgtaaaaggaccaagagctaaagaattggttaatattctaagagtaagagtaaatagaggcataaatacctaaaatttagagtttgtgagcggtataaatttaatgattttttagtggcataatctaaaatttaggtgttatatgtgtcctcttaaagacaataacagaatttgtactgatgaaacggaaaaaaaattacagttttataaacattagtatttatgccactaaaaaaatcattaaatttatgctgtttacaaacctaaaactttaggtaatttatccatattcttgttataagtgttagagaaattcttttactctcgacataataaagtatggtaataatatctcactaccattatgttattttattttgtcccgcttgcaattgtagcggaagatgc

SEQ ID NO: 13779 - DNA, 575 bp, Cannabis sativa
  modified_base (425)..(425): a, c, t, g, unknown or other
tatatttactgagttttactacaacgtgcattgatataattaattccagtgattagccatccttgtgtcagttcgtacttagtttttgtcaaaatattgttttacccttctaatgacttctttatcctttagtaccgttaattcactagtgaaagtataatttagatctcatctaaatttgtgcacaacatatgagttccaaaattaaaaattaaagggaaccaacatttaatccattaggaaagtcaggattccataattgtagattatgttcccagccatccacattgttagatttccaaaacagaagttgtaagaatcatcttctttgagaaactttaatgagtaaattaaagaaactaataacatgaataggagttcatgattactcatgatttaggccgatctactattgatcatcgttntgatatgaattaggtctttatagcaaatgacatgtttgataaagataactttattcatatcggtcattgtcatatataatctctattatatataacaccttcacttagatgtcataatacatcatcaatccaaactgagattacttgtac

SEQ ID NO: 13780 - DNA, 576 bp, Cannabis sativa
  modified_base (395)..(396): a, c, t, g, unknown or other
atgtattaatgttacactttgctaattttgacctttttggtttattttatataatatatatatgggtgtactcttaatggatattacttatttatgggtaatattatgaaaatttcagtttttatgtttagtttttctatctaattaaaaatatctttaatttttatattatatgagttgggattgttccatcaactgaaaaaaaattaagagaaaaagtttttcgataaaaaaaattgaatttaacttaaatattttgtatataaacatatttttaatataatataaaaagtgattttttttatttaaatagatatattaagtgtagaaatttaaatttttcttttattatttattattggattaacatttaataatttaatatttttaaaatnnatatttatagttaaattatttagtaaccatcaataactaatgaataatacccattaaaaaatgatccatatatatatctaaatataatacagaaaattctatagcttgttaattaacttaatttggtagatggtcttttttgtctagctatagcaaaaaagaattaaaggtcattgagtt

SEQ ID NO: 13781 - DNA, 500 bp, Cannabis sativa
ttgcatagcgctcttgcgcttttctaaaatctccaaaaatatgtggtactccaatgatagttaaaatattgcgaggagctctagcaccacttgtgtcacttgtattgttggtatcatccgctcggggattctctccattcttcttatattagccaaacttccctcgtttgatcaattcctcaatcatgtcctgaaggaaccaacattccaaaattgtatggccgatatctttgtggtatttgcaaaacttcttggggtcccttttgtcaagattaccctagattggaggcagttttctgaaacgtggttagctccttgatggcataaagatggtcttgggggagagacaattcggtgtagttgacaaaaggcaggttccctttcctcttcggggatgtttctttcttactgggggacttcgcgagctttagactacgccttcaagggcttcaatccctagatttcattcttctgagactttgggaagcgaccttggtact

SEQ ID NO: 13782 - DNA, 503 bp, Cannabis sativa
cattagggttaatactattttgaattctaagttttataaatttagactctgtgtttttcaaaatatggtaacaaaaatagatgtaaaaaaactcagactgattacattttttttacatctattcgtgttagaaactagtttagactctgattagggttaataataacttgacctaatggtaactctgagtttttcaaaatttagactctgattagggttaataacaaacttgaaactagtttctaatacgaatagatgtaaaaaaatgtaatcagtctgatcataacacctttaggtcaagttattattaagttttagttttacaaaaattaagctcaaagtctattttgtaccattttgaaatatataagattgaattattatttaacaaaatagaaagtccaatcaataatttttataaaatacaagatctaaaatagtatttacctttaatattattatttagctaattatttcgaaatcaaagattagactttagagca

SEQ ID NO: 13783 - DNA, 582 bp, Cannabis sativa
atcatatacaaggaatataaactatatgcactaataaaattattggttgtatttgattcacatccaaaataaaagttgttatattttatgtatgtaatggtatgtgtcaaattagatgttcaacaccactcaagatatgtaaatatataatctaaccaaatcataattttttttccttttgaaattccatgatccttttttttaaaaaaaaaaaagaatcataaatataaaatgaacatatcaataaatataatataatatttagagattcggccctcccaaaatttagagaatttttttttaatcataattttttattttatcttttgctcttcctaattcttggtactttttttaaatttgaaattaagcttttttttttttttttttttaaaaaaaatggacttttaactaaagagtttttggcaaacttttggagtcttgagcctacgaccgactctcttactctccatggccatctttaagatagggcggttagggtcgtttctcaagatctctcagtcaaagagatcttctagtttctttaacagtttaaagttttattttatttctcaaataaaa

SEQ ID NO: 13784 - DNA, 595 bp, Cannabis sativa
aaaaaaaaaaaaaaacacccttaagaactttagtaatttctagaatagattaatgtagaatatactagctaagtgaagtctaaaaacatttagaggtgtatagatacaatttcttctagtaaaagaaggatctagaagaaattattttaactacaaagtgtaaggggtaagcatgcaactataaataccccatcaagaattctaaattgtgtaaccaacatccaaactatcaataaagcttactactttctcatataattctcttctaagtcaaatcattctctactaaatacacaaccaactatcaagttatcaccatactacactagtcactaaacacattacaaaactatcacctaaaacaaatcacaactatttactctatccaattcaacaaacaatcaagtttttaaaacatattttgtgtgacattgatgatgacattagattggaacttgttatcaggatttagcaatcatgaatatttttactatcagagtttcctactctaatgattttagaacattgttagaagtttttgcaaattttttatctaaatttctaagagtcgctataaaaaaacagttacttttag

SEQ ID NO: 13785 - DNA, 579 bp, Cannabis sativa
attcattttcctctgacaacggagaaatgaaaagtggttggttacccctgcatcgctttagtgtttacctcagacttataccctcagatgctcttttgataaatcgatttggtgataaattttcctttcccacttgtttttctgcactagaactgacagttggcgtcagattggtgtaaagcttggttggcactggagtgtttatttggtttaaagttgaggcctgatgtgaagggcttagcgggggatatgttgcaaagacatttggcagcatatccattactgccaaaggaataaagaccccagaaagatcatccacactatcagtagtaattggcttcgaagtagtctgggacattgctgcagaaaaatgtagcatgttgctagtttgatgtttagtggttgggactgtttttgggttaagtattgctggtgtgaagttgattatgggtgggaaaactgtgttagcaggcgtattaacagcaccagtaggcagagtattaaccattccagaatggaaaattgtgttatgttgtgtggatggtacagagttgatatgaactccagtagaaatggcag

SEQ ID NO: 13786 - DNA, 546 bp, Cannabis sativa
atataaatatgagtcttttattatttttttcttcaaaggaggattgattaactgaaaagcaaatagtacagaaaatttaaaaatttagagacaagtatttgtccaaatacattaataataacatatatgtatagctaatgcatgggacacataattaaacattatttgtagaacgtagaatggtattacatacatgaatcaccactaatagaaactagaaaaaattaattataaaaacataaaaaaatatgaccatgtataaacaatattactaaattaaatggctttaaaatccaagagaaagtaggatgagagtgtctcctgctgaacaaaatcttgcctttcttgaaatgtccgtaaaacgaatgagatgaaccttgcctttcttgtaaaaaaaaccccaataacgttctccttgtttcttctattaagaaatcacagtctcatacatcatgataactctttatgatattattgcttcttccagccaacactcaacacattctacactagtatccacgcctcttgcaaaaagcccaattatga

SEQ ID NO: 13787 - DNA, 622 bp, Cannabis sativa
tttatgcatttttatgtatacaaaaatcagtatgtactgttcgcaatgcgggtggtttagtttttgactattttttttaaattaattcgcatatgtagtttttctaatttttcaaattgcacccgcaccgcgaaattaaaaaaccgcagaaatcgcaccactaaaaatgatgcggtgtggtatggttctgcggtttggattatcaccaataattaaactattacaaatacaaacaaagtttgagtaacacttgttaaaaataccataagacttgaaaataaatatgaaaaaaacatttaagtttcaataatataataattagtgggctttgggttggacattcacatattagatctaaataaatataaaaattggtatttttataatgtgcagtgcggtgcggtttgaacgcttattaataattcaaaatcgcaaaccgtaccgtacccaatttaggaaaaattcaaactgcgaccgcaccgtaaaaaatttcaaaccgcattttttttacggtacggtgcgctacgggtagtttgagcagttaattaatacccctaactattaagtaccttaaactactcaatatcatattgatataacattttataattgactaaaagtt

SEQ ID NO: 13788 - DNA, 697 bp, Cannabis sativa
  modified_base (475)..(484): a, c, t, g, unknown or other
tctctcatctgctaacaaaatttggggcgatattaataaacggctttcggctcttttcaagaaattcctcgatacattcactcttcaccccattcatggtcatggcagctcctacacttaaatcaacaaacactctcatcacacccacatacaagaaaaactgtactggggcatctcgaacctcatgtgggtttcttcttttcccaaggtgcatctcctccatggagacttttttggatttgaccacgacattctaaccctttcccttcattaggataaggatagcttacgggctcataaccagtgattgcctttcgataatagatggcttgcacagaatggatttgaggactgccttcataaggcgtgggcccccaatcatgattcatgtgaccacaatcatatctctaatcttacaaaaaaacttcaacattatgctctcactatctcacagtggcaaaaatcgattgggccnnnnnnnnnncaacaaatcaaaaatgttcaatctcagctttaagctacctaaagtcatccccaaccttccaattctcagcttcttctctgtcaccaacttcaaggggatcttaacaggcttctctataaggaagaagagtaatggtagcagcactctcgaattacctggcttaaagtcggtgacaaaaacacttattgttttcatcagtttgcctccttgcgt

SEQ ID NO: 13789 - DNA, 638 bp, Cannabis sativa
  modified_base (357)..(365): a, c, t, g, unknown or other
aaaataaaaataccattttatattaattgagttctcacgtgatttgttgaaagttagggatgctccattaggggagttcattaaatcgcgcgctcaaactgcccgcaccacaccgcactgcaaaaaaaatgcagtttgaaattttttgcagtgcggtcgcgatttgaatttttcctaaactgcgtggtgcggtgcagtttgcgattttgaattattaatatgcggttcaaactgcaccgcaaattataaaaaatactaatttttatatttatttaggtccaatatgtgaatgtacaacccaaagtccactaattattatattattaaaatttcttttttttttcatatttattttcnnnnnnnnnggtatttttgacaagtgttgctcaaatttgttatatttgtgatagtttaattattgatgatagtccaaaccgcagaaaccgcataaaccgcaccacaccgcacgattttttgcggtgcaatttctgtggttttttagtttcgcggtgcgggtgtggtttgagaaattagaaaaactgcatgggcgggttgatttgaaaaaatggtcaaaaaccgcaccacccgcactgcgaacacccctaccattcatatacatccctcgttctcgattttta

SEQ ID NO: 13790 - DNA, 685 bp, Cannabis sativa
  modified_base (219)..(224): a, c, t, g, unknown or other
gattttgtggaactaaatcaaagagacagtagaactcttttaatatttagagtaatttgcggcataaatatctaagtttaactctcaattacaaataaatctctaagttatttatcctacgttataattttaaaacttttgtaagtacataactgctaaatgttagtaaattgccacgtgacaatacctgattagtctaaatcattaaatttttatttnnnnnnaaaaaaaataatttaaatataccagtgaaaaaatgacacgtggattatgacttattatttaacagtcagctacctacagagtttcaaaaatataatttaagtattattaccgctaaaaattaaatttaggtatttatttacatctaaaaattaaacttaaatatttatgtcgcaaattactctaattattattgtaccacctcaagaatccccatatataatgtatatatgttaaatcataaacaaaaatgatgactaagaaagttacatcttaatgatctattaagtatcattgtaattttttcgtatgttgtatcttatggaggtaatgaaactcaccaaattttttagatcaactagtacacacaaaaatcagtgtggtctgataggatacacaaaataatattattggattcaatctcaactcatgagcaataacagtttttattgaagagaaatag

SEQ ID NO: 13791 - DNA, 597 bp, Cannabis sativa
  modified_base (193)..(196): a, c, t, g, unknown or other
tgtgaattgggaaaattaattagaagggtcgtaaactctacagcatatacctaaacgaaagaggtgaatataggtggcgtttggttagaggtaatgaaatagaatggaatagaaagtaaataattttcattctattcctttgtttgattgtattttagagtattggaatgacattccaatggaatgctctttnnnncattttggtggaatggctattcccatgtaacaagaatgaccattccaatgtaacaagaaaaaaattttaattatttttttatcaattttttttatccattttaaattttattccatttcattcctatttccattctcattctattcctatattttcattcctattcctatttccattctcattttaaatgaaattttcatatggattgatttgtgaaggggcctcatgagattattatagtcaaacagctagatttaaatataatgaaatataatattttagattgaaaattaaagaaaagggacattgagagtagtacttacgtcaaaataagacaagtataagaaatttcatttcatattgaatccaaattatgtgctctttttttgttcacaagtaat

SEQ ID NO: 13792 - DNA, 943 bp, Cannabis sativa
aaaatacatctaatcaaactttgtcgtaataatcagtgagggacccagaaattttactttgtagggcttatttattattaaaaaatatttatacatatattataattattcttactaaatttatttaattttatgggaacttttttattattttaatttataattatcaaattaaaaataattaaatttaatttttaaaagataatatttttattagtgggagctatagcccccacaataagttaactgggtccgtccctggtaataataagtaatacataatctaaatgatataacccttaacaatcaactccaaggccaatcacaaccatcggtaatttttatacctctaaatataataatttttatacgagcattgtcattagacactagtagtatttaatatttttttttttataggtgttgtcttacgattacttagtaatattctctaaaaattattttcttatattatatgtaacccaatacataattacaccaataataatataacactaaacaaaatatattttgatcctaaacaagattgaatggtaatggtatcatggtaatttacaagggaaaaaaaataaacgattgttcttaaaaaactatatgtatgacatgcagtcttgtttttaaaagtaaacaaactttacttaaagtaagtgttttttttttttttggatttttcactatttgattatattgggcccttcttccacttcattttgagttccacacaagtatgacattatctcttttgggttagtcttaccattttgtctttagaaacttttccaaaaaatttaatactaataaagtagtgaaatattttatattcaagataactactattactcattttctcaatgcgagacgtactttggttaatatcccaacaaattaattaaacaaagtttaataaccaaagaaaaaatga

SEQ ID NO: 13793 - DNA, 527 bp, Cannabis sativa
tgtatttaataataagttaggagtcattttttctaagacattgacgtttgtttaaattttataaagcatctctttcttatgttagtcgtaatttaaataagcggcttattgaatggctaatatattttttggttagacgataagctttttcaattagaataaactccttcttccatttgtaactcgcttcaaagacatgtttaatgcaaatatcgtatttttcacaaaataaaaataaataaaagtaatagcaaaattttcataaaattataagtacaccacattttaataatttttattttatatacaatatatctctttaaattttatattagtttttttaatttttttcatccatctcatattcttaaaaatatacatataaaataaaaaatatatattttaattattaaaacaaaaatgttaaaacaaaaaaaaatttaaaaaactatttatatgatttaaaattatctaagacaaataatttgaaaaagaaaatttcaaataatattagaagtgatttttaa

SEQ ID NO: 13794 - DNA, 516 bp, Cannabis sativa
ccagtctgttacacgatggataaatatttgggtcttcctcaagcctttggccgatcaaaaaaggatgccttcaattacatcaatgatcgcgtatgggcccacttgaaccgatggaactcgaaattcttctccaaaggaggaaaagaaatcctgttaaaatcggtggtacaagccattccttcatatgccatggcctgcttcaagctcccagcatcttttcattctaaaattgaatcttcaatggctcgattttggtggggtgccaatgaaaacaatcggaaaactcattggaaaacctggtcatctctttgcttatcaaaattccatggtggacttggttttcgttcaatgaaggctttcaatcaagcgatgttggccaaacaagcttggcggctactccaatatcctcaatccttagtggccatcctcctcaaagcacgatacttccctcaaaccagcttccttcattctggcaagggtcgtaggccttcccttgtttggtctagtataacctgg

SEQ ID NO: 13795 - DNA, 526 bp, Cannabis sativa
  modified_base (170)..(184): a, c, t, g, unknown or other
  modified_base (275)..(277): a, c, t, g, unknown or other
ttcccaatgtctaacaacaccgccttgctaatttaaaaatactaaattgtgattctactaagccatacaccgcgtttcatgttgttgggcaccgaaaaggcaaaattatgaaatttcactatatgacacaaaaatacattctgaattcaaatataacaacataaataatnnnnnnnnnnnnnnnaaataattttcataattaaatcttaattatcttctaatttccaaatttaaactaagcggtctttacagactatatgttctggacttaacannntttgtacatatattaaaccataaacataaaaaaaacatgtaaatataaatgacttctaatcttttatgataacaaattagattacattgtaatgggttttatttagggcataaaatcccaacatagagtgccctacgctttcgtttatgcacctacaacgatgaagtcaaacatgaagctatactagcaggcttaaagtttgcttaggaagtaggagctcaacagattgaggtgcatagtgattcccag

SEQ ID NO: 13796 - DNA, 623 bp, Cannabis sativa
  modified_base (375)..(376): a, c, t, g, unknown or other
ggaataacaagttgatctctcaggcgggcggtaacggactcaatatttttactttgtgggagcttatttatcattgaaaaaaatatttacctacattataatcacttttactagatttatttaattttgtgggggcttttctactattttggcctataattatcgaattaaaaaaaaatagtggcataagtacccaaagtttaatgtttgtaagcagcataaacccaatgtttatttttaacggcataagtactcaatgtttgttaaactgtaatttttctctaattttatcttaaacagggtacatataaggcctaaatttttgatcatcgggtctagatagaaatatatagtatcagttacttccaaatgttnntttaataaattcaaaacaaagtttgtactgacaaaactggaagaaaattacagttttacaaacgttgggtacttatgccgctatttaccctaaaaaaattacatttaattttttaaaatgtaatatttttattagtaaccccaacattagtactagtgcgtccgtcccagcaggtgggtaagcagattatgcttaaacggtggtataagtattgccttcttgcgttatgagtgtgttcttaatttcg

SEQ ID NO: 13797 - DNA, 516 bp, Cannabis sativa
attaatcaagattttggtatctcactaaaatgttaaatgttgattcttgggaggtgttggattattattacccagatagtaagggactcttcaagagaccattttttctaaatctactacttttgctttcatttttgttaaagcctatatttgttttcagccatttgataatattcttttgagattcaagcacctaaagtgaaagttagtctaagttagtctctggtcaagcagatacactcgatacagtaacaagaaatgaggattataaatcagatgattcttgattagcattttttttaattatttacatacggtaattgttcacataaatcacatcaacaattcactagtattaccttataccaactaactagtcactaacccaatcttgggggcaataggcaaaaaatgttttaaaagaaatggatcttttattcccttctccatactcattggcactttcttaacggtaaatgccacaatgcctaataccaaaacagagttctaccttca

SEQ ID NO: 13798 - DNA, 500 bp, Cannabis sativa
tcagataaaataacttgtcaaaaatactaaaactacaaaagttacaaaagaacaaattttgtcatacttatcatccattcttatttcttagatcataccatagatatatatatatagataaatgggctttgatctgtccaattctccatctggaaatgggcctaacccaaacgcaaggtattgccactagcaagatgggtatataatagaagagaatgtaagaaaacgtaccactgtaactcttgggcagctgggcttagggtctttgttgggaagttccgagttttattgggataagtttagaaataacttttttttttaatctattaattaaaaatattcttatattatattttattaaaatgtaactacttttttatgagtgggttgtcaaatatactttcacattctatttaaatccagtacataatttacattaacgtaaggagtataacaggatatcatttataaaagtggggtatatcttaaagaatatgaaa

SEQ ID NO: 13799 - DNA, 715 bp, Cannabis sativa
  modified_base (271)..(286): a, c, t, g, unknown or other
tttagcagtttctttttattttttcgaaaaagttaacagctaaaactaattgttttaagaaaaattagttttaaatatttaacattatcaaaaaaattaaataattattttttatacatataaatcttaatttaaatttaaattaaatattaattcaattaattaatcatactttataaaaaatttattagttatattatttaaatatctaaattatttacttattttattgtttaataaaattagtaagatatatttttttataaataannnnnnnnnnnnnnnnaattttatatatttaaaaaatatattaaatttattagatttaattttttttattattatttaaatttataattaagcaacagcaactctaatacaattctaagtaaacgtgcattatatgttactaatacttaatatatctacatatttatatgataaaaaacacaaaagtaacttaaaaaagaattatcgaatataagagagttttatgtttatgccctaaaaaaacacatgattatatgtatatatattagcaagttttttcttaaaaaaaaaattcacatggtttagaaagtgttatattacagactatatatgatttactatttgcttcactttaacttgtcccaaaattataattacattattttttatgagattaaagaaataaatcttgcccaattaattataatatatttttagtttaatg

SEQ ID NO: 13800 - DNA, 624 bp, Cannabis sativa
cttattgtttgtctagtgcaactcattgctggcttccgtggccttctgtccgttcctacaacttctattgcatgcctcttagctggtgaatacgtcaccccgctaacttcggaccctccagatattacactacaagttctagtgtgtagtggaggttatgctggtgtaacagtcctgatgtcccctccagctatgatactcttctccttgttagataagaattctttaagatgtccccatcaaaggagcccagcaacttcaaaacgcagagctatgcattccgccgctgtgtgaccatgatcgtcgtggaattcacaccatttagttttgtctctctgatccgctggctttttggtcttttcgggccacttgaccttgttccccattcctttcatgatagccacgatctctgctggttctacaactaggttgtattataggatgggtgccttttcttattctcttggtcttggtgaaggaaacctacgcatgggtccttttcctttcctattgttcctggaagttgggtatggctcatgatgcatattctacttgcgttccactctccttgtgctcctattttctctttagtatgagtaagatccgggagtatgcctgttggac

SEQ ID NO: 13801 - DNA, 527 bp, Cannabis sativa
gtttacatacaatgtattgtgtattaaaaatagtattttagaactgttgtttcataaaagttaccaattgaattttctattttgttaaatgataatatataccttatatttttaaaatagtaaaaataggattatgagctcaattttttaataattttattttttaatataactaattttaagataattttaacacgaacaaatataggaaatgtaaccagttttgtcataatatctctagatcagattattttctgataataataataatttgatctagaggtgttatgacaaaattgtttatattttttgtatctgtttgtgttataaattatcttcaagttagttatataaaaaaaaaattgtcgaaaattaagcttagggtcctatttttaccattttaaaaaatacataatctattttttcatttaacaaaataaataattcaataaataacttttataaaacactgtaatacaaaaaggtacaattttttatgtatctctaacattactatagatatatat

SEQ ID NO: 13802 - DNA, 518 bp, Cannabis sativa
  modified_base (329)..(349): a, c, t, g, unknown or other
taataacaaatataaatttaaataggttagaattgaaaaattgatcctatcaaaatcatttataaaattaataaatttttaagcttataacacttccaatagatctaaaatagcttaatctttaaattatagagaaaaaaaatataaaattgagcttcgaacaagtgaggtaaaccttagctattttacatattttttagctcaattaatagtgcttagctaaatgtagagataactattcattgagctaaacatattttaatattattttcttcaattttttttatacatgtgtgcaatattatataaattattaatataaaataaannnnnnnnnnnnnnnnnnnnntatttaaatgatataaagaaaaaatagagaaatgatgtatgatataatgtaaaagtttgaggtaaaatagataaagtagagttttggtgatatattttaaagaatagagtagaaaagctgttgggagtgttcggcttgttttctgtaatagagagtgatatatttatat

SEQ ID NO: 13803 - DNA, 533 bp, Cannabis sativa
atagtttgttctacctaatttgattgttcaacttttctctcttgagttatcctcacaatttaaataaagtatcaatttataatagagtgttgatttaatccaatccaatcaatatttttttactactaaaaaaatagtgtatattttcaactttttacaataaaaaaattaaaattcgaagacaaaagtaggagaaaaagaaagaaaataattgtgaatctatgtctttcgttttcgaaataactgaagacataagccctagagacataaataaccgaaaataaaggtcttcaatactgtaaccccatatcaaaaactgaaaatccgaaaacataggtctataaatccttataatctcatatctgaaaccgtcatcatatttggattggtgacatggaacttgtgagcattgtctgcccttaaaatttgctctgtggcagttgtttccgttattttctttttaactgtttctcttctaatttcttccccggttttgaattataacctcttcccatgtatctcaaccactcccg

SEQ ID NO: 13804 - DNA, 740 bp, Cannabis sativa
cccccaagacccaagattgggccccccaagactcaagttgggggggaggggacaaccacccaagttgtggggcatttcaacagtcatgactttacacctttttcgttaatttagtctcggtatttttgtgccacgcggtgctacttttgacatgtcaccgtcattaaaatttgggtaaacacttagtattacttgtaaaaacaatacgtatagttgtgtgttagatatttcgcaacatgatgctcaattgtagttctcgttgggtcttgttgatgagttctcttctataggttccttttttacctagtctaataatgaattttttttctttctaaattggatagaatttttaagaatgaagctttggtagatgcttttcccaaccacttcaataattttagcgtcgatacctcaaagttggcgtccgttttgaactgacagtaatagtacaaaatcatattttatacactattcctgtcacgttttttctgacacaaaataaaaaaagatacaaatctagactggaactagatcactcgatcaaaaccagatctcaccatcaaaattaacctcaacacattttagattagatcaatatatagtaaatatatacattaatatatacaatagatagaaatcaaaagatggttggagctcacgtgcacgacaaagaagacgactagacttgcaaaaatagaaagaaaaaaaattagtatgtcgatagagagagagagagagag

SEQ ID NO: 13805 - DNA, 640 bp, Cannabis sativa
ttttccagaaccaagaatcagaacttttatcggttgcttccaaaaacggcttgttcttcaaatacttcgctcttaacaccctgcagcatagcgtttgttcatctgtaagaagggcccatccctatttggccagtaaagcctgattcaattccatggactttcgaaatccaagaccacctcttgatttgggaaggcataaatggtcccaagcctttaagcataaaccacggttaccctgttcacaaccccaccaaaaatccctgatcataccatcaattctggaagcaagttttttggaaagcttggtggtttgcatagtgtagactgcatggcaaggcccacagatttgataagggtagcacaaccagctttcgaaagtaattttaacttccaaccatgcagcttcgagaccaggttgtcaaggatgaagttgaaatctgcatccttatgcttagatctaaaaagtgggagccccaagtaattaatgttcgtggtagccaagttaagccccagttcttgcatgataccccttttcatcccctcactggtattgctgctgaagaaaatagaggtttttagcttattcacacattgcccaaaccaatagcaaaatttttccaggcagctccaatagcctttg

SEQ ID NO: 13806 - DNA, 512 bp, Cannabis sativa
tgacatgacacaaaaaatatgaatttaggcataacacggaatcagtaaggcaagccctatgcttagggcccacctacctaactcatgagcccaaaaataatttgtccccttttaaaattatacatttttttttactgattttgaaatatactatatttttctctaaataatagtctaaattataataatcataattatttttctatatgactgtacgtaattattattgaaaaaaaaatatataaaaaactataaaatacacatatttttattttaattttactttttttttattactctttaatttatactcagatttataagtcatattctcattatgtgctttagagactctaattttgataagttatgtgaaattatatttggtattttgattataaaaaagagtatttatcaattaaaattattttacagttatattttattattgtgtaataaaaaatgatagttcttaacttatcctttttaggttttcaggttcgggttttaga

SEQ ID NO: 13807 - DNA, 563 bp, Cannabis sativa
cccgcccccacccacgaataatttatttcaaaaaactaaactaatttttgcaaaaattcttgtacttcaaaaagaaaaaaagaattggcccccctataagaccaattctccctccatccctttgtgaaaaataaataataatgactcattcatgtttatagttaccttttttacctaaactatggaacctggggtggaccatgaccaagtaagctgtccaactatagtaagacacaaatcatccaaatctctttcaaactgacttcaatatttttgtgaaagcatgcatgttaacttttctccaaatatagattagagttcaaatacaaaaacatatacactgaatatagtatacatccccgtcttcacataaaatttataccttataatcttttcctgcagactatttcaccacagaatttcttctgttcagtcccttgaacaaaaactaaaatgccctttctagagtgcttagactttcaacctattcactaactaatggactgtgaaagataaatttaatgattcataaatgtaagttgacttttcctgccaaaattaga

SEQ ID NO: 13808 - DNA, 551 bp, Cannabis sativa
tttttttttttttgaaaggggtttatataggagaatttgaaaggtgaaataaaataattaataaagtagaaatgatttatgatttgattaattaagctaaataaaggtaaagtaatggatcccatctgggtttcagatcaaatatgatcagacctcagagctcagaaaaataaaaagagagaacttggctttaatcacgctttcatcttaaaatatttatatgaaactgtgcggtgagtgagagcagtcagctcttttttatttttaatatcaaattttgatttttattaaataattaattaaagactgggatctgacaccctcaaattcccctcccctcgagctgctctaataatttcgttatttttttcagtgggattgtgacaaatattgcttcgttttttttagtttcaattaatattattttattaatcatatactactttttatatttatagtggaaaataattaatgaaactatttacatttaatactcaactttttcatatttaatttgtatgtaaactatcaattaaaaaaagttgtttgtt

SEQ ID NO: 13809 - DNA, 522 bp, Cannabis sativa
ttaagtcgattactgaaaagtcgatacttcccaaacaacagttttcttgatgcccctcacgggcactcaccgtcacttacctggcagggaattctccatggtcgcgatcttttacgtgctggtctacggtggaaaataggagagggacgacacatcaaatgtgctactgacccgtggataccaaaccatcagaatttcttaccaatttattaccatggaccgcctgaagctcttgtttccagtttgatcactgaggatcgacaatgggactgcaatatgttgcagcagtttttttcaagtgttgatgttgaccgtattcttacaatcccactaagtttcttctccacagaagacaaactcatatggcatcctcacaattcaggtatctacaatgtacattcaggatatcattttgctgtcacacttgaagaaacacaaccctcctccccatcaacctcacccacggcctggtggaactacttttggaaattacagctaccacaaaaaatcaaaatatttgtt

SEQ ID NO: 13810 - DNA, 658 bp, Cannabis sativa
ttgagagttgtactccttttaaattgtttgttaagacagattatgtaaataaaataaagcagagggtcaaactactttcactaataaaaaaaagattctaaatctaaatgctaccactaccagtcctctctctcctacaaatatcaataactgatttccaagtttggaccagtttaaaaaatgtcttcaacaaaaactagttctcatggatggctttcataatcaataatggtcagacaaataataagggtaatcagatcagttggtatgtaggactaaatcgaaatattaaacctcaaatcaaataagacaaataccaaatgccttgacgacaagaacccaaaaacataaataagttaacagagaagagagttgaggatgaaaagctcaatgctacaacttgagaaaatcatatcgccgctacattttctcttaaaagtcctaagaaagtacaacaatctatcttccgtacggatggtaccgaccattccctgcaccaccaccatacccacctctacttccatggaatgaacctgcactaccactaccaccatatccacctccaaggccagcatcgtagctgcttccataaccaccaccaccaccaccaccagccgggccgccaccactaccatatccaccataattctcaccagga

SEQ ID NO: 13811 - DNA, 682 bp, Cannabis sativa
tgagagtatttaggctgtaaattactcttatgtttatatgatcaaagaagggtttttttattttgtttggaaaatgtgatgataacaataataggtacttccagcaaaaattcatccagtattaccttcacttatcatcccagctgttcttacatacaagagaaataagtggactatgttgttcaatggaacaagtcagttgctcaagagatttgataactcttggaaaaactttgcagaggacaacaagttagagattaatgatgcttgtgtttttgaacttatagaaaacagctcaacaaatcttgttttcaaagttcaaattctcagaggtgatttacccactgaacttcttcctaagataattgaaactaagatggttggaactgtggaatctcccattgttatagagtagtagagtgtagtaataatagtaataatagtattaatgtagtagtgtgtaatgtaatatgggttatgtgaagtttagctttataatgtaaaagcttatatgttgatctactactagaacttttatatgaaatggaaaagaaaaggaatgtttattctagaattactcgatggagtagtttgcatttatttatttagaacaaaatgtttcaataaaccttaatgctaaaatattgtaacctctaactagaaggcaaatattaaattagca

SEQ ID NO: 13812 - DNA, 645 bp, Cannabis sativa
tttgatataaactatgaattatatatgaattatatgaatgaaattaatttctatttatttatactaaaaactatggtctgaataaaaattaatgaatataattgaacatgattaacaaatcatgaccaccataccatggtttgaaaatttacaacagttgcagcattaggaaaggaagatcccattgatcaacattcaacaacaacaaccagatcaaataaattaaacaaacaaaacatttcaaaaatgagaatgagaagattttcctaattaaagattggaattaccagcttattagatccagccaagaaattaatacaagatggtgatgaatctccaattaatgtcaatggcataaattatctacctgaagtgatcaacagttgaatatatatatactttaaacacagtacttagtgctggtgtgttatatatatattaaggcaaagtcaagctaattaagttgcaaattgcaatatcatataagagagcactgagtttagttgactctttaaaaaattgagaatgagacgactcaattgctgtcattttttttttcctcaactaattacaagcataatatgaatatatatatgcagggactgaaataagtatttataataataatgttagagattttattac

SEQ ID NO: 13813 - DNA, 1082 bp, Cannabis sativa
gagagagagagagagaagcaagaatctgtgcatgatctctttagtgtgaataaggtgagtttgggtgctttgttggagaataagttgataggtgatagagttagtgaaatgattggtaggtcatttaatggttaggagttttattctagtgggcatacaaagaggattttggtgcattggaagtagttttttaaggtcagtatcctttatgagaatcaatagctcatgcattatttggtttgaatggcagggatgcagactaagttttgtgtaacttttgtttatggtttcaataacattgaagatagggttgatctgtggaatgggctttctggtcttacattcccagttaaaccttggctcatccttggggattttaactctatctttcatcatgatgagagaataggagggaggccagttttggctaatgagttgttggattatgtagcttcgcttactataaatcttgttgttcctttaaagagttatggctcgaactatacttggtccaacaaacaggatgggtgacagagtgtattctaagattgatcatgtgcttaagaacattgattggctagatgttttcgaataccattactgaatttaattaggatgctatatcgaacaactgctactatgtggtgaaaactcacaagctaggtgatttaggcaagaagccatttcaattttaaaatatgtggactactcatagcaagtttaaaggcagtatttgaagttgttgagacaaacatattcaagggaaacgattatttcgaatagagaagaagttgctaagattaaaatattctctcaagaacttcaatagagatgagattggcaatatagagcaggggtaccatagggctaaagatgagttccaaaaggttcaacttttctctcaagctaggtctttagatatctttgcaagaggttgagaatcaatctgctatcaggtactcattacatgctcaataatttagaagtttcttaattcaaaggaggaaaatcacttggttgcaaaaaaatgatgataataatgcttactttcatgcttacattaaaagagagagagagagaga

SEQ ID NO: 13814 - DNA, 1299 bp, Cannabis sativa
cttctctactgcttatatagtactacaccaaatcaactggtgcgctatgatatccaaatatcactaaagtgaatttaaatctattagcaccagaaatgacaagaactcgcctccaagacaaataccattaacaggaatgttttgcttaaacaaaatgacaaatggttgtctgaattttcataacaaagactaattaatggtcggcaagtattagcttggtgcctgaattactctgccaaacaaaatatgcaacaacaaagaaaagaaacctatactcaccagcaactgaattgtagagacgccattgagtattaaggaatctagtataagatttgacacacctatatcctaaactattttataaaactaagcttctttagttgacttgttttcggttatgaatgttcccactgatttgaaccaccgcataaggtttctgtgatcttttacatagagccatgcttgaagaaatagaaagagactatcattcacacctcgctcctctatgtagccatggaatgcatctctcatcctctcatcaatgtctctgtaagagtttatgaaatcaaattagatacggattctttaccgtgtaaataaaattgaaagaaacaaaactgaagaaatttctatgaagaagttcagtgttttgtgaaattacattctaaacatcacacctaaaataaactacttaggcattcggagtttatatctttctaattcaggctcatacaattcaactgaagcatcagaagttagaagttcgtccttttctaattcaagtaaactgtacaagtgaagacttagaaactgtagacagtaaacctttttcccaactaaatacagcaaaaaaaattcaagagatgaatgaaaaaggaaaaatacttcagagaaataactgagcctatttgttaagtttagttttatgcttacttatgttcataaaaaaaattaagcaatggtggtacactatataatatgtgaaaaaggaggaatcacctattcttccatccagttgtaacattcagtgtcgtcttattattgactagattacgaaaatatacagttgatatggcaaattgaaggcaatccaattgatccctaataagaattactttagtactccaactccaaaagaatgacttaacgtatagtatataattcctaggcgctagctcctaaaattcaatgtaatcctttattttctcttatacaattctaaaacaccatacaacattctgcaaaagaggagatcccaaagcaatccatttcatccagcagtatcacaaatcctatgtt

SEQ ID NO: 13815 - DNA, 701 bp, Cannabis sativa
cctcttagtacaaataatgttaatgtatgatttgatggttgaataataaatggtgtgccctgttgtagttcattgatatacatacctttgtactgcaggtatcaagaaactgatcgtagttatatatgctggttagtttgtcttcatgacagatctgatctacacaatggaaacattggtgtaaattttgttaggtagctttcactaagtttttgtctttcatatatattaagttgcacatttgatggctgatttgaagaaagtgaaaaaagaatatgttcgaagagaaatcaaatggtgttgagcatgccaaatagtaatgctaaaaaataatatacttttaggtgctataaatgtaataattaagtaatttctccacaaataacccattaaaaaaagcagaaagtagctattcttatgtttggttgaaaaatacacatgagaattggttatttttggggaaagtttgaattaaatggaaaatttgattttctatacttaaaaaatcttaatattttatttttaaactaatatattttaaattaaaaaaaatatgacacttttttcaaaactccaaaaatactcctcttataactcaaaccctttctttctccttccctcaaactctctctacatctatctttctctctcactctcggtatctcttcacccacccactaggactgttcatccgatccaat

SEQ ID NO: 13816 - DNA, 522 bp, Cannabis sativa
aaaaaagacaatctccattaaatgttaccttgaaaaaattgaaagttcctactctaacgaattataatcaaacaagtaattgaaaaataaattagaaaaaacaaaaattgagactcaccacagcagtggcatcgtgtagaacagaagtaatggcccactcacctttatcctgaacaggtcaataacaacaatacccaaacgaaattcagaaaattcaataaacaaaaccctccacattgaaatagcaattcatcgatgaattcaagtgcattagaaagaaaactattaatttgattctcacagggctaggaaccagcgtggatagacatcgggggcaacgaggagcaccaagacctggattaatggtgggatcgtgatggagatttcctcttctgagcttctcctcgtagacctctctcgtccccattcttcctcccgctcacagtcgccaactggtgtactgtgtctgattccctatcacacgaccacgacgaggccaattgggttttcagtaaatataag

SEQ ID NO: 13817 - DNA, 769 bp, Cannabis sativa
tttctgttttgctggtttagcttcgacaccattacatataatcaatatatgtgtgaccaatactaatttttctcgattgtactttttatcaactatactaaacatagcgtgcgattagactttatctcgataacacattctcgcaaatctatgtcatgcgagattagctggaattatttgttgacacatcattctttttattagaaaccgaattcacttgtcaactatctacgagactatacttttattgttagataaaaaattcacgcgtctcaactatttactagactataacaaaaagcaccaaatgaaatgaaagggaaggattgaatttttatgttatgatgtcatgaatacttactactgcaagtacaaactgagacaacagtacagtactcctgttgtaatttctagtataattaatcccaatatacaagatgattatccaacggtgtgtaaacaagagatgatgattttgatttttaagcatgcttcataaaacaatagtgacagatttgtctatattacatttaagaatctaagagagagtggagtttaattgagttattggggaaaggaggaatctcagactgataccgtgtgggtgggtgtatcctattcctatatatctatctattcctacttactagactagtactgctactgtgaaagacttaacaactctatctattacttactatcctaccaaaaaatatggctcactaattttagttttcaacacactacattaggtaattttataatgaca

SEQ ID NO: 13818 - DNA, 566 bp, Cannabis sativa
acaacagtgaaacatagtatactgtagtgtgaaacttataaaagaaatacagtaaaaatgtaaaaaataccgtcggatagtatttttgtaaaaaaataacaaaaattagtataccatgtaaatttcccaatttaagttagaactaattttgatatacctctattttttattcatgattataattcacaataattcgttcatgtctgtaacttttgatttaaagcactgaaaaaatactaaaggagattggctcgattggattgtgatatagattgagttatttgtgatattgatttggacacttgcatgtacaattggccactaataaatattgagttgggatttcatatttatataattttattcacttgtgtatcctaggcctagtagtcgtcaatcatatattaaccattattaataatgcttagaatcatacttgagcttcaatagtgaatactcaaagatagtctcggaacaaacattacaatgtgagcacatctttctttccctaactaacatttctgtttcatacaataataagagtatctagctatcactttcagagt

SEQ ID NO: 13819 - DNA, 506 bp, Cannabis sativa
ggtaccttatttgggacattaagtggaaacacaagagaggtgctacataagttcactgttgatttgccaaagaagcacggtagaggaggtcagtcagcacttcggtttgctcgtcttaggatggaaaagcgacataactatgttagaaagactgctgagcttgccacacagttctacatcaatcctgctactagtcagcctaatgtttctggtctaattcttgctggttcagcagatttcaagactgaactgagccaatctgatatgttcgatcctcgtttgcaggcaaagatattgaatgtggttgatgtttcttatgggggtgagaatggtttcaatcaagctattgagttatctgctgaaattttatccaatgtaaagtttattcaggagaaacgcttgattggaaagtatttcgaggagatcagtcaggacactggtaagtatgtctttggtgtagatgacacactgaaggcactcgaaatgggtgctgtagaaacccttat

SEQ ID NO: 13820 - DNA, 543 bp, Cannabis sativa
aaaagtttaaaagaggagcatatcgcgttcatattagtcaagacaacagtactaaattttatcagataaaagaaatataaaaaaaagtactattagatttccaattttatatagtcgatatttttaaaaagaagacaaaacaaaaatatataaaagggtgttgtgtactcaaactttattagctcggcaaattttatatcatctgacaggtaactgtgtaaacttattagttattttatgtagaaattaaaatagcaaaagcaaaaactgtttctaggttcttcgaggaaattaaagaaagggctagattgcattttaatgagtatagtgcataggaaacttacaggcacagactactttcaattttcaaatatatatttatatgtcctttttctatttctgtgtgtaattaatctcctgtgacgcattttctaatttctatagacgaattaagggaatcttcttttaagatccaaatctcatatgtaatactactcttaccattaaaaacaaaaacccaattgttaacaaaaatcattatta

SEQ ID NO: 13821 - DNA, 517 bp, Cannabis sativa
ttttttttacataaagggaacaaaattcattacacatatatatagatgtaaatgtatattgtgtatatgaaacattagagttagagagatataataaattttgtgtcatgagcaaagaaagagaaaatagagagagtgggagttgctggcaataataattaatatttatcattccatatgtaagtgtgtgatataagccaatagtgtctttttctgagcttatacaactccattattatgtacactatttaaaaagatcttttggtatatttttgagctacttggtgtatgttgtagatacttagtattataataaaacttatagtcttaatttgagttgattataaataaaaataattttaaattatagttaggaataattacataaaatgttaatttttgtaaaatttttatatttttaaatttttatttttttttatatttttacggtagctataaaaacataaaataacaagaaaacatacattaaaataatataaaaaattaacaataaaat

SEQ ID NO: 13822 - DNA, 698 bp, Cannabis sativa
aaaaaaactcacgtcaataccttttgtcttcccaaaaaaactaataccgaaaataaataaaagaaataaataaaaaagagactaattaaaataataataaaaaatattttgacaatttaattgcaataacaatgctacttaattttgtttttcaatattaattaattaatagtattttagataaaaaatatttattaataataataatagataataaaattaaaaataactataccattgtaaaaagttgttattttcgaatcttttaatgagatcatgagtatattttttccttttatttaataatatgcttgctaatcagattttcatttttttttctttttctttttggataatgaatggtgtgttttagtaatctaagaaaataattaatattgcttttattaaaaaattacaatttaaaaaagttaatttcttttaaccaaaatataattgtcattattattaataataattgtgcaccgtagttaatttacaaattacggtgtctttttattctcgtatttatttcctcgtattgttgaattttatatatctctttttctattagattgcattccatttattttttattctttaacacaaatacatacatatactatcacctccttataattattttcctttatataaatttattataaatacgataactatagtctcttagttcacttttt

SEQ ID NO: 13823 - DNA, 587 bp, Cannabis sativa
tgctcttaggagtttacacaccaccctcttgataccaaatttactattgatgtttaaagaaataataacacatgccaatattataggattctctattctttttctcagtgataatctctaattttcccatattgatgtcgtgctacaaatttctatatatcaatgttgttaattttagttattgatgagctattccttcttttaccaataaatattaatttcattgaaaatagtcatgaaacatatataaattacgtgatgctgttaaactctagttgatcttttcaactttttcaaatttgaaagagacaagaacaaaagacaagtgtacactgtcaagtctacaaattcctcattgtataaaattcgagcataagccaactgggacaagttgtcaagtctaccgtcaagcccggcccctttataaatgggtactaggcctagtggccaggcccaaaaccaaatttgtcctctagtgattttgatttttatcattaaaatgaaaaggtaggtagaaattcaaaccagccaagctatggggccggacaaaagcccaggaattaatggcatgtcagccatgttttacc

SEQ ID NO: 13824 - DNA, 1148 bp, Cannabis sativa
gccatggccaccccatacaataacgtagttccgccagtgtatgatatagtttttactttaatgatttttgtaattattttgcacaaatatattgtttgacatgtcttattttagttaaatttaaaacttaacttgagagtaagaatttaattaaactgcaaataatttttaacgatagagagttcttacgttcaaaattcaactatcacatctccatgattaagcaactataaacaaaatggaatattggaggcagtacgtacattgtgatataatggttaaagtacgcaccaatgccataattccatatgcatacagacaattaagtctctttgaataaacttcattattagggtcagaactatataatatgacttgaaatttaccaaatggcttgtttgctaaaactaaaacaaaacaaacaataaaactacaaaacctccaaacttgaagcccccaaacatccaacatccaatgttgcttttctctgtattaattattaactctttcttctctcatattacgtgtctatctgcacaaatgtgaacctaacaaatgcatttcatatagcccgtgctcttagaatttattacatttatattttagaggatattgccatgaaatacccaagttatgatatttgtaataggactgacaattcatattttttgtgttgtgtgtgcgtcgacacgattattaaacgtgttaaaaacacaaactcaaacacatcacgattcacgattaattagcaagttacacaatattatatatgataacatgattatcaagatagacatgcctataaaaaaaaaaatttatgaaacatatagtattaattcgtattatcgtgttgagacagttatcaaacttgtcgacatgctccaaatactaaaaatatagatgctttctaatagtatggacaaaagtgacaccctatactacaacaaatactaccattagcgttgattttaaactgaaggaaagcatatattctaccaacaaaatcctataagcatttgcgtagttttacactgactgacactaccatattattttgtgtcttgcactgacacaaatgaatatatatataatttttacaaaaatactgtcatacgggaatcttgtaaaaaatactgcgtttttataaa

SEQ ID NO: 13825 - DNA, 708 bp, Cannabis sativa
ataaacgagtgatgagtatgtgacaatagatctgtgagtggctgtaagtgtattcttgcctaagttccattttagggtattagaattagtttctttgattatatagttagttatattgtttgttaggatttagcttcactccctaaactgactatattccattgcttatatataaggctccaccaaacacagtttgcaaattaaacaaaagtatatatggcctaaagcaggccttaagacaatggtactcgaagctaagtacaactctatttcaagatggcttccatcaatccatgtctgacaactccctgtttataaaacaaacatcatctgattttttagccatccttgtgtatgttgatgacattattgttgccagcaacaatgcctccaacatcacacaattcactaattcacttgatcaaaaatttaaattcaaaaaccttagaacactttggtttcccttggctttgaaattggtagaacaaaataaggcagatcaataacccaacaaccattcacagttcagttgttaactgacacaagcaatctaggtgctaaaccagcctcaacaccaatgaaaacaaacttgaaacttagtaaagacaaaagagaaatactcactaacctgactgcctaccgcaatctcattagaaaattgatatacctcacaatcatgaggcatgatatttcatacgcagttaacca

SEQ ID NO: 13826 - DNA, 531 bp, Cannabis sativa
tcttacaaagcattaagtgaactcaagttgaaaagagaatttggaatctgtccatttaacttgttgaagctcaaatccctgtaatgaaaaaatgcaactaattcatagatagaatagagtacaagttgggtaattttgagtcccctaatgaacttacaactgtgtcaagtctttatgttcaccaatattcgaaggaatcgagccagtgatgctgatattccttaatactctgcaggttgtatcaaaaaattatactccacaataaaacaggagtactaataaagctattgtatgtatgattgtgttgaaaacatgttacttacaagaccgatagagatttcatattggcgatgaatgcaagagaagaactgccattagatatttcactcaatagcctacatataattcacacttaagattattattaacttaaaaaatgtgtagatgaatatgaaattctatattaagattactcacaactctgttagagaagttagattcgccaaagttgatggtataggtccttgaaaa

SEQ ID NO: 13827 - DNA, 798 bp, Cannabis sativa
aaaaaaaaaaaaaaagaactaaccagaacccacagaagggcccgtaaagctcatattatcccccaagaaaaaatagcactaaccaaaaagccgactgcactatctgagaagagtacagatcctgcaacaaaaacaacaacaaagtgcaaatgtagatttgttatctaaacaaacttttggaccaatcagagttcttgtaaaagaaggagttggttgtttaagcaacccagaaaagctaggagaccctctctagattaacccaacttgtgacaatagggagatgagcagagaaagatgcaaatatgtttagatgacatctctatttggggagttgggtaagtgaatagttcgttgttgatgcaaggaaatatgaaaatcaatttccacaatggctgttttggacagttggcaaacaaatacagcgaggataaaattttactcaaccaagatcacatttcccgcattctcttactacttctaaaaggaaacccaaaatgtaagtaatccaacaaagaacatacactaaatatgagaacaaaaaaacatccctttgggatttctctaacatgataacaccaagtccagacagtgttaaaagaaaatattgcaaagattattctttttttagtgtcgtgtaatggtattttacaatcaagttaatagcttcaacgtctagttcgaaacctctcctttttttcacatctccctcaccactaagctagccttactgactttattgtaaagattattcagttgggctggtaagaacattatccaatatcaaaaaaaaaaaaaaaa

SEQ ID NO: 13828 - DNA, 667 bp, Cannabis sativa
aaatatatttatatataatgtgattatttagcagtttttgttgatttaactaaatattttaagaatatacgaatatttggttaaatttaacagtgttagtaaaattaattttataaatatatataaatattgatattgtttgttttagagtggacaatgttaatatctcaatatacatatgatctctattgttagtaattatagggagaaatataacaagggccttgagacaactttgtaagaaaggttttaaactatatcgatatcaaaattaaaatccttaactaatatgactaaataatgaattttagacatattcatattttgactttatatggtttctcttgttgctgttgggagttgaattctggaggcggttgaagaagtacatttttattattagcataagagaaattttcataagtcacaatcctaaatgataataattagacaagttgctgtttctgtagttattggggtgaatgtgagatttgccataaattggacttgttgcattgcagcacctgctgccacactccataacagttggattgtattaactttttcaatccttaattaatgtttgtattgaatcttaaggttcaattagtattttttcaatagagaaaacaaaaacaccaaatttaatttgattaggtcattataa

SEQ ID NO: 13829 - DNA, 523 bp, Cannabis sativa
tgcccccccccctccgccgaggctacaccatatgatcctgaacccctcgagggtacaccatagggaccctattgggtcctccacttgaccaagagtcaaaccttttttttttgttcgagtcgagtatagctggagaaatttttaactaaatgtcttctgctccagggtaactcgggatagctttatgtatacctttattataaatacaccctctctatttgttgtgttccctatatcacactatgtactcttagtaaataatttaagtaacactaataaaatagtcaccatagaatttaccgtatgaggttgtctttatttttcattccaatttagatatgcaaattggtgtcgtctcgacactagtctcgacacttcttttatgttgaatgtactatgtatgccatatatgtgtgcctcatcttctcttttttaattattttttgtactattgggtgtgtctgtcatagatagcctactagcattatttggtgtattcacctccttgttttttttttttttt

SEQ ID NO: 13830 - DNA, 815 bp, Cannabis sativa
gtattgggcggctgcttcttggaacactttgtgtcagcccaaacagaggggaggattggggcttcggagattccaggatatcaattaggccctgttatccaaacttgcctgggagcttgcgaacaaagcgaatagacctaggtgtcatattttcaaagggaagtactttcctagagaatccttttggagtgtaaatgagaagaattcagacagctacatatgaagagggattttggctgctaggaagaccattcaagcggggacttgttcaatcatagcttctggtgaagatattgatgtttggtgccaaccgtggatttcctggctcgagtataatcagtttcctgatttgatagagtccattcggcataaagccccaagccttatttgcgtggctgacttgttataccgtagtatcaggagttggaattatggctatctgtgttttttattcggtgaagagattggtaaagagaattctgggatttagattgacaagaattcggcccatgattgccttatctggaaggactccaccaatggaaaattcagtgtcaaaggagcctattggcttgatcaaaagactagattccgtgctcacgaacctctgtggaaatggatttgggattccaaagtccatcctagaattagtatgatgatttggagagcttgtatgaatgtcctccccactggagacaagatgggatcctgtagggagtgtcctttttgtcactctgcgactgaaacacctgttcacttgtttgctcgctgcaattttgcttcggctctttggttttctaggcctttacctgtga

SEQ ID NO: 13831 - DNA, 570 bp, Cannabis sativa
cttctgatacttgacttagattgattatttctctcgtaatgtagatgaaaagtttttgagcatttttttttgggctccttcttgctcctcgctttggctatcggaaggtggtgttggaatttgattgttactgttattattagtgccattattcataataaaattaatccttattatttagattgtattattagagatgttattgtctattgtaataattttattggtattttttttatttactgtactagctctatccttgattgatcactatgtttggtgtgatctgatcaccctgattatatggcaattattttgtaagcactcttataattaatggtattatttaatactcttttcttttttgaggtttatcctacttattagtttactcatgaaattatatttttttgtatttagagaactttttaatccaattttattttataatcacatttaagattatagttgtttttttagaaaaaaatcaattaattttgtgtgttaaaaataaaatttaaaattatatattttttaaactcaaaattgtaactttatttctaaatagag

SEQ ID NO: 13832 - DNA, 551 bp, Cannabis sativa
cccaactgagcccctcaatagtgaagagattggccacttttgcattttgaagccccggatgtgaggaaataacccaaggatttgctttatccggcaaccaagggtctcctaaaacatcaatgttcttaccatcatcaaccgcccatcttactccactagcaaccagatgttgtgcctcaagtatgcttctccacacaaaactaggattagaaccaatttcagccgtaagaaacgtaccattcgagaagtaacgagctttgaaaattcgagctaccaaagaattgggtttggttagtaagcgccaaccttgcttcactaacattgccagattaaaatcccttaggttcctgaaacccatacctccttcggttttgtgatgacaaagtctctcccaggacatccaatggatgccggagttattattagccgaggtcctccaccagtattttgacatgagactctccatatctctaacaacctccataggtaataagaagacattcatagcataactgggaagtgattgagcaacagacttgataagaatctcc

SEQ ID NO: 13833 - DNA, 3669 bp, Cannabis sativa
attagagagactcatatttatattgtgtgaaaattaaatattatatattatatgtataaattactttttacattaccaattaaatttagatgaaatcgatgtatcttacaaatctaacattatgcttaaatagtaatataatattaaaaaatttaacactttttttgtctaatttaatcaatattaaaaattatattaaatttaacacaaaaataattattacattaaaatttacgcacaataaatctaacttcttaattataattttttttattaatatcattaatcataaatttcaatatataaattgtatagtagttgatttaaactttgaattcaacctatataaaaataaaaaaaattaaaaaaaaaaatattagtggtccgtttggatggattaatcttactaaatccactaatttcagcgggttactattttttttctcttaattgaatgaattgcacttaaatttttataactcgatcattatactgaattgagtaaaatataacataaaccaaccaaattcacacttttactctaataaaaaatgttgtaacacctttattattataaattatattataaagattgccatcattttatttaatttcttgttatagaaacttgaaaaatggataactcaaaaatctgacgtgtcatgtgaatgaaattaacaaaagggttattctgtaatttcacccctaaatgaaactcagagaaagatagaaagagagagagaagcagccttatccatttcgcacacccaaagcatcttttataaaagcccatcaaaatcctcattttacacaaacaacccaaacccaaacccttctctctccaaaaaaaaaaaaaaaaaaaaactctgtacaactcgagcttcaaaaatggcgacgagtaaaagctacttctcaaggcagaactaccgttttctctccagtgaccgtaacaccgccgtggtaacacccaccgattcatccacattcgaactcgacgagtcagacatgtacaactccagccgatccaagtctcccgagtttcgaaaaccgctcacaacttctcgtaagaagacttcctcgaagcgatcggggacagatctcggaggcgatcggactggcggaactccttcgtctcttccggttaatattcctgactggtctaagatccttagagatgagtacagagataatcggagaggctccgagcgcgtggatatcgacgacgacgacgattatgatttggacggcgattgtgatggcgattctagggttccgccgcatgagtttttggctaggcagatggcgaggacgagaatcgcctccttctcggtacacgaagggattggtaggactcttaagggaagagatctcagtagggttcgaaatgcaatttttgaaaaaactgggtttgaagattaaaaaaagagaaatttgaagagttaaaaatgaaaattttcaaaaataacagcgggaatttacggaatatattttctttttttttttttaattaggtaaaattttaatcctccaatatgggtaggctttaattttgtgatttttatttttatttttttaattttggaggagcatttttaattttccacgatttgtaattttctctaactcggagtattttaggattgtatttgggtataaattctatacttcaattttgcattattattattattattatgtttaataataattaaaggaatattagcattaatatttttgtgaattttgtgtgtggtttgatttcgatgttcaaagactgtaaatttggtatatttgaaaaagaaaaataaaaaatggttgaagaaggaagaagaagaaggtacaatggtggggccattttggtaattatataattgagagtagggtcattggtaaatgattggtggggtttttttttaatttattataaactaattattatttatttatttaatttaatttgggtggggttggtacgaaaaatgaaaagcagaggttaagaatcaacgatgatgacctctttttattttagaaattaaataaataaaattaattctatcatatcatatgataaaactggtcacaattaattttttttaaaaaaataatacttggttttggatgtttctcccaaataaaaaatattttgtaatatggagaattttctttgctaacaacttcatttaataatttcattttacataaatatttatatcaatttttctttattttttattctttgttcttatattttaaaaaaacacataaattaaaatcaaatatattttagatattaaataaataagagtaattggtcctaaaattctttttttttttgtggcaaaatttattttagtttatttttctttataaatttaaggcgttagttaattatcattagatactaacaggatgactgttgtgtatacatatgtatacataaaagtataattttaaagtcaatacagtaataattcaattaataataaaggaattgacaaaaaaaaaataaagagattaagtgaaaaaaatcaagacataataattttgttacatataactcaaaaaataaataaaattttattataatttttttacatcttttaaaaatatatatataaaaagaaaattaaaataattatttaaattgattttatgtttatttctacaaaaattgttttggtttaccataaaaagatatatgtaattttgagaattatttttttataattattaattggtgttggtgtggaaagtagagaagttagatgacaaagcaattgttgcttattggacgaaagccacgaggcaataaaagatagttccaatggggatgctttcttaaaaaactaaaaataattaattaattaaatgcaattttaatttttaataaaatactttagtagagtttcaattaattaattttaattattaattagatataggggcatcggatcttgtaaccaatagaatagtatatatatattattaagctagtttggcatagagtggataatttggttttgtgattaataaactaaatggaaaattatccaattgatggtgacaattaagaaattgttttagtctatatagcatattattactatagacaaatatatacaacttccatttgttataatataacatctcacaatcaaagtatcacatcaaattaaaagtctattgagtgatcaaccaactcaattattgttattattattattatttattattggtgttgatgttgttgatttaaaattagggagcttatacttctatatttatcaataaatatgtataaaaaattgtgagtcattggaaggaaattatatatatatttgttgcattaattagcaaaaaaatatttttaaaaagttaaaaaaaaaaaatacacaatttatgataaagataattaatttatcaaaatatggataacaatgtgtaatgattagggatgaacaattctcttataaattgagtttcacgggagctgtccatggggaaattattttccgacgactcgtttagtattttatttaatatttttaataatatttcataatttatatttgcatttatttagtatattagtatcatttttataaattttaagttgtattttggatagttattagtttattgagcaataattaatgtgtaatatcttta

SEQ ID NO: 13834 - DNA, 5406 bp, Cannabis sativa
aaaaaaataatatttcaaagaaatattaaactcagatcaattgtgtttcctttcaatgaacataagtagtatcaagttgtttttgaacaaacagtaataaaagtcagattagtataaggtgatttaccggaaagtaattagtttcataggttatcaagaagaatataacggtcataagagccagataagcaccaaggacaaccccagttgcaaaaatttcactgagcttccaactgtcaggaactggagatggctttactctgtcttttgatatggtcattatagtacctgtcatgaagcgtaaatgtaagcgacagttaagaaagaaacttgtggagataacataacaaatattttttcccaaaagaagaaagttgagtcaaactctgttaagtagatagaaaaagtataaggaaagcttaccatcattaagaatagcaatgacaagaaccatgaaaggagggaagtcaaatctccagaagactgtcagcaacataaatcctagctgtaatacaaaattcaagttccaagttatattagtattttggtaagagagattgtgagatatatatttccaactcatacattgttgtaatttggattgctaacttaccacaatacgtattgtgattgacacagcatatatctggaaatgggaaagaaaattagaaggcaaactctgcatttgttacatacacataccaacagaatattaagagttataatttgccttttccataaattttaccgtgtagtttttcattctttggaaaattgcacggcttgttaagacagcacttatgatgacactcaatcctggctcagttagaactatatcagaagcactacgagcagcatctgtggaatcatccacagcaattcctatgtcagctttctttaaggcaggtgcatcattcactccatcaccagtcattccacagatgtgttttctgtcttgcaatctccttacaatctcatatttgtgttctgaaataagagacacagttatgagcatcagaaacttagaatttaagagcacgaatgtaactaccaaagaatgatgtgacttctaaaaactgaccaggaaagacaccagcgaaaccatcagcattctcaatgagctcatctattggaagggtagcaagtccatccttgttttcacttaagagagaagaagaaggatacatgtttgtgcccatgccaagcctccttccagtttccttagcgatagctagttggtctcctgcaagttgaccaaacatgtaagttattatcaaagtgcacctcttctttcatatcaatttttattagtgttatgcaaagatagatgacaaattttatatggaaaaaagaaatttttacgggagaatagctccatcagcaatgaagcacacctgtgatcattttaacactcacaccaagatcaagagctcttctgattgtttcaccactgtcatggcgaggagggtcaaagagtgggagaagagcaacaaattcccagggaccaccaggactgtctttggttccctcaggtacttgctatagataagcattcaagttaatttcaccttaaaagtcttatgagaaaacatggcatatgggattaaaactaaaattaagtagagataatagacctggcgtgctattccaagggatcgcaatccacgttctgcaaatttatcaattattgcatgtaccctcttttcaatttctgatctattatgtgctagattgagaatctacatgacatttgtttgaaaaatatcagtttgattcttataaggcatttcttaaacttttcaagtcatccttacctgttctggtgcacctttgctgaccctgtgcattttcccactaccatcaatatacgtaagtgcagttcttttatcagttggattgaatggaaggaagtgaacctctgtaattccagctcgtgcctttacaatttaaaaatgaacatgtcaatatattatatatgtaacttcggtagttgacacatatgaaataagcacatagccatgcagttcaaaaattatataatatgtgatgtaatacctctttagggtctgccaacattgcaacaattgcagtgtcaatagcatcttgattttctagccttgatgctcttgctgccataagtacaaccatttccctgtcaacacctttggcaaatatctgtagtttcagtaatgatgtaaagcgatattagtctttcacaacaagaatataatatatttctaaagtatataaaagaaagatgattattttgctaacatgatgcatgatgcatcccatgtaaattcataaaagcaatagcaagggaactagagtaaacctcaatcatgcttttgtctacagtaagcttgttaagtgtcaatgtgcctgttttgtcactgcataggacatccattccagccatttcttcaatggcagtcattctctttgtgatggcaccctgcaagaaacatattatcaccattatcacccaatcatccctttaattgtcaaagctgtgtatattttcttttcttattttattcttcttattagcagcatttgatcaaaagataatcagcaacataaattatctgaactaaatttgttactattaatgaattttcatagacaactactaatttagttttggcatcacaaaacctgctgtgataaacgatgagatccaatagccattgtaacagaaagaacagttggcatggcaataggaatgccaccaattaggagcacaagtaggctgttgataccatcacggtatcctctatgttgcagaccatatatcactactatttcaatagccatcccaatagcaatcgaacaaatgcagaagtttccgattgatgttaggacctgaaacaccatcagtgaaagaaaacaaaccagtcaatcaaaagattattttgacaattaaatatgaaaaagtatgtgaaaatgaaacataagaataatgacatttaaaatattataattaaaccttctgaaaatggccaacatgtgttgtgttttccacaagatgagctgcctttccaaagaaagtgtgaactccagttgcaatgacaactgcttcgatttcaccttgcttgcaggttgaacctgagtaaaccccatcacctggattttttgatactggaagtgattctcctgtaagagcagactgagagcatagaagatgtcaaattcaacacagagtgaaacttaatcacggtttttagtcttccactacacatggtaagaagatttgggtgggaattcaactgttacatgaccatattagaaagtctctgatgcctagtatgctaatacatgtaggaaatcacatactcaacacagttatgaaaaccaattggtaaggtgcatgtggttctatctcaaaaccaattggtaataagaggagtgacacattcatctttccatatgcaggactaactagagatcggtcatgtaaaagatttttttttttttctcaattacctgatcaatctttaaaggatctccttcaagaaggcgtgcatcagcaggaatgatgtcaccaagtttaatactaactatgtctccaggaaccaacactgaagcatcctcctcactccatttcccatcacgcagtacctagtaattagaaacatagcacagagatcagaaaacgctttacaaatagcataaagtttctgaggtataggttcaagctttattggaatgatttatgaataggattatgacctttcctttcggtgctaaccgagccattagagcggctgcagcattaccagcattgttttcctcaataaaactaatggttgaattgataatgagcaaggctgtgattccaacaaaatctgggtaatctaagtcattgtctttctgccataacaaataaggttatatcaacaggcaggtaacttgcagtgtggaaaaactaattccaatagaaatgtttctaaattgaatttgattgttaaagcttaaatatttaaaaaatctttcaaatctaacaaatctaggaaagaaaaataagaaaaaaagagaaacacttttagaatgccatgttcttctttccagattctccttgatatagtatttttgagaaagtaatacaaacataccccaataggtgtaagagcaatggccattattgctgcagcttccatgacccatgacaatggattccacataaagcccaaaaacttcagtattttactttcctacgtattaacagtaacatgaaacaatcagtcaattaatttaagaaacaaaaaaacatattattgataatacaatgtcacgctgaaactctattgctaaccttcttttcttcaagcttattataaccaaacatatccaatcgcttttgaacttcatcagagctcagaccatcttttgtacatttaagatgctcgaaaacctcttctataggaatattctcctgtacattgaaactccaagtttaccaaatctgtcttgttacagctatttttgttttaacaaagatatattggacaagaacaaactttgatacatacaatgatcagagtgagtgtgctgctaagtacaagtaattgttcatatttagattactagagattcaatacatgttggaagctcatgacatgaatcattaggacataccaaatcaacagcttctttagcaatagcatcgagtccacctgggccatcaaccatcttggattcttcttttaaccacaaccttaattacttgcagaaaactgcaatatgttacacacacttaaaattaaactgcttattcatttcactatgaactttttgcttattcatttgagaagttgatgtagcaagagaagagaagaaaaatgatatctagcaccgtaaaacaaacaagtaagaaatcaggggtaactagacagttaaaacggccatttataaaaatgatttatacattgtgttcctgtaaatagtagtctagtctactccacaagtattgaccttattgattttatatattgtttgaaaaattataacatcttttttttaagaaaatagtttgcacctatttgacaaattccctgtaaagctccttagagagctcaagagtaacgcttttgggtagactggagagtcagagtgtaacaagaacgaaagtcagagttggaagatatagaggctaaaaggatagatgtcaacatcaaattgaaataaataatgtattggagtaaagtattttattaaatttatttaccatttatataaacttgaaataaatatatctctttccttgaaatcaattaagtaatttagttggttagataattatatattaaaattttttcaaaattataagctttatagtaaattttagggtaaatactattttggaccttgtgttttgtaaaagttacagattggaccctgtgtttt

SEQ ID NO: 13835 - DNA, 9417 bp, Cannabis sativa
tcttcttttatatgtatattgtgaggtttgggtttcccaatataaagaacaaagaataatgccttgcataccaattacaatgtttgacagggagttcaggtaacatctggttctgttggacatacagaagctcagagttcaaataccatggaagaaacttcactgggggaggaaaatgacaaagaaataactttaggtgatgcacttaaccaagctaaagagacatctcttgcatctgtggaggaactacataatcttgctggtggcgccgacatcaaggtgcctgatacttgtagtttacagtatttatatcccttgtgctatcatttatattcttcaccacaaaatttatattaagagcttttacacattactggtgcttaacattcatacattaccagttttcttttgttataatgaagttaccttttggcccctcaaaatcttgtctagggtttagaggctgtccttgacaaagctgtgcatattgaagatggtaaaaagataacacggtaagaatatgattttatactctatgattactgcttatttctatagcactgatacttgtttctagtaatgaggaaaaaatatactgatgtttgtttgccctaaatctattaaagtgggattgatcttgaaagcatgggcatagtccaacgtgatgctttgctggtattccgcaccctgtgcaaggtagatgacttgaacaaaaaaatcctgatgttttttaataacctctccaaattttttccctggtatttaattttctctgacttgaaaaatatattacttgcagatgggcatgaaggaagatagtgatgaagtcacatccaagactcgaatcttgtctctcgagcttctgcaggtccgactgctgtaaaatattctttcatgtgcacattttcatctgttgaggcttaacctttaaaactccgaattaaataattttaataatgaaataaaaataaaagaaagcagagtgtagacttatatgctttttgtaggcatataaacagttgatgaaatttttgactgaagcatgatgattaattacattgaactaatatcattatatgtggtattttacaattttcttaacacttatcctcctgttgaacacctacaatcttggatacagaaactatagcaaataactcgatagttccttagagaaattgaacttcatacctcacgaaagcaaactatgggcttttgaccaagggttgggggttacagtatttgagtatccaataaaaatcaaatgcatttatctacagtttacacattttgatcacctttttgtttctatacctatttatgcaaatacatatatagatatatatatatatatataatatctctgcaaattttttcttctcataaatgaaagaaactattttatctactatgttatgttgtatttcagggtttattagaaggagtaagccattcatttacaaggaacttccattttattgactcagtgaaagcctatctttcatatgctttgctgcgggcatcagtttcacagtcccctgtcatcttccaggtttacatgcaactaattgctgttaatgagattttttttactcttttgtgagatatttttgtcctcatcatgtttttcttttctgtcagtatgcaactggaattttcttggtgcttttgttgcgtttcagagaaagtcttaaagtatgtctatgaccttgataaactagttacataaacttctttctaaaatagtaaatttttaatttgctttcctttctcatgtatacaacgactacatttgcagggtgaaattggcatcttttttcctttgattgttttacgatcattggatggcttggaatgttctgctaaccaaaaaataagtgttctacggtatatttctctctgattactatatgccagctgttagatgttaacttttctttttctggggatgtttttctgctgatcagtattttataaggttgtttctattgtcctttgactactggtgatttttgcaggatgcttgagaaagtatgcaaggatcctcagatgcttgttgacatatttgtaaactatgattgtgatcttgagtcaccaaatttatttgaacgcacggtataactcccatatagtatttcaaaaaattgctgttcaggttttaataaaagtttttagtaatgtggctgcttaggcacacctaacgctctcacaatgcaatttattactggtgcaggttacttcgctatctaaaatatctcaagggactcaaagtacagaccctaatttaactgtgttgtcgcagacaacttcaattaaaggctcatcgcttcaggttggttcgttggtgtggattacaaaatgaaattaagggatatttaataattttttttctgcaacaacctactgtgttatttcagcagaaattgctggatgacaatttttcttccttcaccctttcagtgccttgtgagtgttctcaagtcactagttgattgggaaaatgctcgtagagaatcagaaagccagcataaaagtattcaatctcttgaacaagaagcttcaacgggagaatctgtggatgtgaaaaccagggatggtttgaccagtaactttgagaaggcaaaggcccacaaatcaacaatggaagctgtcattgctgaagtaaacgaaaattaacattttttttttaaaaaaacttttcttctaggttttgtttggaccttggattttactatggaaatttttatgaaggaaaacagtagggaaaaagagaatgttttacataaatttgattcgagacttttattaatataattatttttgtatataaattatactatactcaagttttaatttttctaaaaatagaaatcttaatttattgattcaatccaaacatgaataaatggaatcccttggatttcttttgttttccccttaaaattcaaggttcaaacaaggcttttaaatgttatactgtacttgggtttgtattgtcctgatgcccttttgggtgcaccaagcagtcagaggctcatgtatgtttctaattgaattgcagtttaacaggaaaccagtaaagggtgtagagtatttaatatcaaataagttggtggagaatacaccttcttcagtggcccaatttttgagaagtaatccaagtttggacaaggtctgttgtacttatgttctagaatgtgtttcctttttgtcatctttgatgacagcttcttattcttattccgaaatttcaggcaatgatcggggattatctgggccagcatgaagaatttcctcttgctgtgatgcattgttatgtggattccatgcagttttcaggaatgaagtttgattctgctatccgtgaatttcttaaaggatttcgacttccaggggaagcccaaaagatagatcgtataatggagaagtttgcagagcggtaattgattcgctatgtacattactcccattagtattttgtgcacactatttgcattctcaacatccctctcgcctgaaatgtggtttaatttcattttcatgcagacattttttcttagattttttgataagtcttttcataaacatattgatgattgaatttttttttttttgataactatccatgattgagattaaagtggagtagacacccttagcacttaggaaaaaaaactttggttttccctgaactggtcagatacaggaaccatatccatgcaagaaatttagaaagttacctacttttacactcatcggtgatttatgatgcatttcttatctcgtgcagatattgtgccgataatccaggtcttttcaaaaatgcggataccgcatatattcttgcatatgcagttataatgttaaacactgatgcccataatccaatggtgtggcctaaaatgtccaagtctgattttgtccgtatgaatgctgcaaatgatcctgaagaatctgctcctagagatctcttagaagatatctatgattccattgttaaagaagagattaagatgaaggatgaggcatttggagttgagaaaagtggcagaaataaaccagaaggtgaagagagaggccgcttggtcagcattcttaatttgggccttcccaaaaggcagtctacaactgatactaagtctgagagtgaagctataattaagcaaacacaggcaatatttcggaatcaaggaataaaaagaggggaatttcatacttctcagcagatagaacttgtaaggcctatggttgaagctgtgggatggcctttacttgcaactttttcggttactatggaagagggtgaaaataagtctagggttgctctttgcatggagggatttaaggctggaatacatatcacgcacgtgcttggaatggacaccatgcgctatgctttcctaacatcattggtcaggtataattgttaaactttttttatattaattggacctcccctccttttagcttaattaaacaattaccttaagttttcaaagggtacagaatcatcttcttaaattttagtttataagcaaatctacccatagtctaaaatagtaaaattagttaaaattaacatgcttttgtcaaaatccaaatttcaaacttaaaatttaacttgttaaatggaaataaaatttttaaagtccacaaaagaaaatgttttttttttcttaaaaaaatttcatttatattttgttttcaagttttgataagtgtacttttgttttaatttctacttgaattagatttatttgtaaatgtgaattctaaagagagaatttgatatttttgattttgtaaggtggattgtttaatctttattataatggaggggagattgttattatctcatactattgtatgtatggtgaaaaaaatgttttttactacaaaaaattaaatattgaatttgtatctcaggttcactttcttgcatgctccaaaggaaatgcgcagtaaaaatgtagaagctttgcggacactattgggtctttgtgacacagagactgacgcccttcaggacacatggaatgcaatattggagtgtgtttctcgtcttgaattcattacatcgactcctgccattgctgcttctgttatgcatggatcgaaccaaatttcaagagatgctgtgcttcaatccctgaaagagttggctgggaaacctgctgaacaagtatttgttaatagtgttaaacttcccagtgattctgtcgttgaattcttcaatgctctttgtggtgtatcagctgaagaattaaagcaaagtcctgctcgcgtgttcagcttacagaaacttgttgagatcagctactacaatatggcacgtatacgcatggtatgtctcatatataataaaaacactcttacatgctatcagatgtggtcccttgtcttaatttactttggggatctcttaaatctattggtattgttactacaagagatataaggtagtagatgtcatatcacgtgattggttaaaacatgtatatttgtgtcaatgcatggttatgtgctgtagccaattattcttatcagctatcatagcatattttgccaaggattttcagatttttggtattagttacggtgtctgccatccacatctgttatccatatcacgtattagttatttgtggcttcttggttattttcttacagaaacattttactgatttttcaggtctgggctagaatatggtctgtattggcaaatcatttcatttcagctgggagccaccccgaggagaaaattgctatgtatgccatagattctctacggcagcttggtatgaagtatttggagcgtgctgaacttgctaattttacattccaaaatgacattctcaaaccatttgttgtccttatgcgcaatagtcgaagtgaatccataaggagcctcattgttgattgcattgtccaagtatgtctatatgactaacttctactgaatcctcttttaaaagacattttttttccttgtgaacttcaactatttatatattgtttttatttgaagtttatattttctggtgactattgtagatgataaaatccaaagtggggaacattaagtctggatggcgtagtgtctttatgattttcacagctgctgcagatgatgatttggaatcaatagttgatagtgcatttgaaaatgttgaacagggtaaaactttctgtttttcattacttacaatgttttaactagatattagagtagtaattctttgcctattttattagtagtatatctaacttcggtggtatttgcagttatcttggagcactttgaccaagttgttggagactgttttatggattgcgtaaactgtcttatcaggtttgcgaataataaaacttcgcaccgaatcagtttgaaagctattgcacttttgcgtatatgcgaggatcgtttggcagaggtttgctgtttagtcttcagtcctgttttgtcttttgatttatgtttgatatagttttgatgtcttatatttttgggaggaccttgctttatcttggtgcaatacttttcctctggtgaattcactgaaagccactagatatgaatgatttgtgcaatttgttatttttactttgttagttctaccagacccttcaattgtgacacactgattgattggctgcctttacatagatatccagaatatattattatttatcatcataatcatcatcatcgttattcttcttcttattattattattataacaaagaaattcatgataggactctgattcatcatattgatggtatacttgtgactaccataaatcatcactatttatgcttgttttacttgaatattctttgtttacttagattgattttactaaggttgtatggactctgtgctctttctcaattttgagcctttttaacaaagttcggtaattttagggtcttatacctggtggtgctttgaagcccattgatgcaagtgtggatgaagctatggatgtgactgagcattattggtttccaatgcttgctggcttgtctgatctaacatcagatccaagaccagaggtcagaagctgtgcgcttgaagttttgtttgatttactagatgagaggggtaaaaagttttcaccatctttttgggagagcatattccatcgtgtattgtttcccatttttgatcacgtgagacatgctggaaaggaaaactcactttcttctgatgatgatttgctgcgtgaatcaagcattcactcgcttcaattgctctgcaaccttttcaatactttctataaggtacttttatgcttccttatcggctttttgtagtgtattatacttgctactagtatagacagatatagtgaaaaagaaatgaatattttactattgagcttatgatttggttctgatgctaggttacttgaaatttatggtttcaaaaatgaatgggagtttactgtctctttccaacaaaaagtttggcatattcaatttttaatgtagtgttgcactttaacatgtttgtatgaagtgtccaatcgagaattcaacctgcacttaacatccaggacattactgttgaactttctaaattatgtctttctatcggcaggaggtttgttttatgctgccaccacttctcagtttgttgttggattgtgccaaaaagacagaccagtcagtggtttcaatatcccttggtgcgttagtgcatctcatagaagttggagggcatcaattcagtgagagcgattgggataccttgttgaaaagcattaggtaagtataattcagcttacttgaacgtctttagtatgtttttcaaatacttatcttttctctgtttccattgtcagagacgcttcatacaccacacaaccgcttgagcttcttaatgctttgggattcgagaacaacaaaccattaattaaagatcaagagatcaattgggctgatagctcttccccacatgctgctgatattcatcagtttgatgccaatgacgatggaaaggtacctccattgacacccagcagtgtcgatggtgctggaagaactcataatgctgcagccttcactgaccataatcaacaatcagggctgcgtgtgaacttggatggttctgaaggttagatttataaatctaaagagaaaagtcagagcatttgtagtagttagttggtacttggtgtgtagatattaatagtgacaggataaacttagcaatggaatggacattatcaattatgttatcaaaatttaattcacggtgcctggagagttcacttgattctgatgccttgattagtggggctagttttgcatttgtatctgcacattaagaaagttgaacgaatgtcttcaatatcataaatatttatttaccatgcaattgcaggccttccctcaccgtctggaagaagtccaaaacctgctgaaggtggtagtctccaacggaatcagacgataggtcaaagaattatgggaaatatgatggataatcttttcctcagaaatcttacctcaaaaaagagcaatgtttctgaggcttcagtgccatcgtctccaattaaggtactactgtagaagatattttgtttcagatagcataattcagatggtagtttatgtatagcgtttactgttaaggtgacatatgcatttttaccattcacattttctcttgtatttgaaagattttgttttacctgatattgactacgtaaaacctctaatcattgcatatttgatcttctccatcccctttttcaacatttctttaggtacccgatgtagtggaacccgatgtcaaagatgaggaggagagtccactcatgagtaccattagaggaaaatgcatcactcagttattgcttcttggagccattgacaatatacaggttggtttgtattgtatgttcaactctctgtgtgcgcctataaatattttatttaattatctaagttcggtttgaaatccaatctagggaaccttttagcatttaatataagaattctgtcgcccttgaaagctacagtgcctggagtcaaactagtgctccaagcgtgttgttaagtttgttcatcaccatatataacaaggctgtaggggtaataacatagaaaataaacaatggagttcatagctcgagcaaatatcaccattttggcctttgaagggggctagggattattaaattgtctgtacactgtttaattaaatattattttaattgcagaaaaaatattggagcaaattgaaagtagcacagaagattgttataatggacatcttgctgtctctgttagagtttgctgcttcatataattcatataccagcctcagaacacgcatgcaccaactgcctgatgaaaggtatgacacgtgatgttgcataatttcttcttcttctctctctctc

SEQ ID NO: 13836 - DNA, 3439 bp, Cannabis sativa
taatattttgttacttgttttactgtatttgttacatgcgtgataaatatatgtttttttaaaattttatttttagcactataaattatttgaatattttataaaagtgattttgttggataacatattgtctagtaatgttagtgacattggataggttatttcctacaaaatttacagataataaatttaccatatccaccctttgggaaaaatttcctatattaattagttctaataatgcaaaaaagaaaaatataagagaaatgtgggtagttttgaaaaagcccaagaccaggcccaggcccaggcccatttccaaaattcaaaagtcatagcacaacttttctggttctctccgtttactcaaatctctcttctccccagcatcagtttacccaaggaagctgccttttctggctttcttccattctgtcactaaaccctagaaatattatcaacctcattcactaactgatcggacaccggacatcggagatcggacaagaggaattctcgttcactcattcgccgaataaagccattacttcactcacaacaggtattacttacggttaagttttgaggctgctaatgaagattaaatacaatgacaagaaggaaattttgtctggttgtttgagttctctcactagctcatcagcggtaccctagaaatgttatcaacctcgttcactactgaccggagatccgagatcggagggtaggaattccgtttcaatcaaatgccggataaacaattacttagctcacaacaggtaatgtatgtacttacggctttgttttgaggctgctaatggtatattcgtttgcatctcttcagcattgttgttagtatcaagaaattctgttagacaggcatttattatatagtttagttatatatagaaatatttggtttctcttgaccctgatgtttgtatggagcttggtgtgactttgaccgatgtaactacttactatctcatctgttaaagcatgtcaatttaggttatgcagagatagagagagtgacttttacttttttcaggtagtaatacaggaagaaacaatgccaaaccttgaggagttatcgctggctatagatgctctaaagaagcaggttgtatctaaccgttgtatttctatacaggtaaaattattatggtttctctacgttatagctgttactgttagtctcagattattgtttgcttagtttcttatggggaccattgttctatacgcagaaacgaatggaagaaaacaaaaagaaattagttgatgttacaaactatatgtataaattgtcaacagaaagatcaggccagtttgttgatgcttgtaaaagtgtagatttgttatcaattaggcagaaagatgcatttgatatgcaaaacggtacagatataggtaatggcaacaaggataaccttgaagaaaacgtccatgcatctacagctgttcttttgggaattaacgttgcagccaagaatgctgttcgtcctattaagctgttagaagtaaaaagattacctccttatactacatggatatttttggataggtatttggaatttaaaagtcttttttttaatttatttcttttgcttgaacaatgttctgtagtcagtgtgtggaaagttgtgaatgattttcttaatacttctgatgtagaaatcaaagaatgactgaggatcagtcagtacttggtcgacgaagaatttattatgatcaaactggaggtgaggctctaatatgcagtgatagcgaggaggaagcaatcgatgatgaagaagaaaagagagattttatagagtctgaagactatcttattcggtaaatatttttaagtgtctttttatttaaggcatatttattttaataatgcgcttaatatattaaatggtcattttgtctttttaatgtttacagttcgactataaaagaagttggtctctctgatactgtgctggactcacttgctcagtgtttttctaggacaccaagtgaagtcaaggtacaaactttcttcttatacctctcttctacgcttatcctacacatttattatctgaaggaaagttggtcagtgtaagctttggtgtaccagtttcccatttgctctctgctgactttacagagatatgaaacaccatcaaacatcttatacaggcaagatacgaaaatcttattaaggaagagaaagctgaggatgggagcaagattgctgaaattgaaaaaaatttacagattggacattctattcttgataaagatcttgatgctgctttggattcatttgataatctgttttgtcggcgatgtcttgtaagttctcatatcttgtgttattcctttgctgtttgttctttctttagtcatcggttttctttttttccttttgcaggtatttgattgcagattacatggatgttcccaggatcttgtcttccctgttagtaaagttattgtcttacaattatcaaatgtcataccaatcatgtaatagttgctaatatggaacgttgtcaggctgacaaacaatcttcatggaaccctccagatgatgaaaatgcaatatgtggtccacattgctatcgatcagtatgtcttgattaattattcatttggcatcaagatttaaatgtggggagttaccaaacaagaatttcaaattttctcgtgttaggtactgaagtcagaaagaattgctagaatcaactcttctgtgaatggtgattctgttgagaagacatttacaagatctgatggtaccagtgctcagatttcatctggaaagaaatcttctgggctgtctgctagaaaaaggaccaagtcctatcaaagtgaaagtgcttcatcaaatgcaaagaacatctcagaaagcagcgactctgactttggacccagaaatcccagtgtccatcttacatcaccctccaagaccaaggttgcaggaaagtgtggaattcgcaagcggaacagcaaacgagttgctgagcgggttttagcatgcatgcagaaaagacagaagaaattggtggcacctgattctgattctattgttaatggtggtcttatccctactgatatgaaacttagatctaattcttgtaaagaaaatgaagatactagctcttcttctcataagaatgtgaaatctcctgccactggaaggtctagacggaagggttcgcctaggaaggacattcacaaggacattcagagtgacgctccagatgattcatcaaatgagatgatcactgatccacctgttactagttgtgatgacaattcaaggaaagaagaatttgtagacgaaaacatatgtaaacaagaatcgactgatgataaatcttggaaaaccatagagaaaggtctttttgagaaaggcactgagatctttggccggaacaggtcagtatgatttgttatg

SEQ ID NO: 13837 - DNA, 5002 bp, Cannabis sativa
tttgtttggttagtggctcttgggaaagtaaatctgcatgatatcatgcaaaagaggtgacctttcctctatatttctccagggtggtgcgtttgctgtaagaattgtggagaagaagtggaacacctgttcctattatgcaatttttcttctagattatgggcaaaattgctggaggaatttgagctctactgggtattacctggaaatgttactcaaatgatagtgagtaaattatcaggaatcaagctcaaggttattttgtggaggaaagcttctttggcaactctatgggctatttggttggaaagaaatagcagaatttttgaaggtaatgaaaactcagcagaggttgttggggagaaaatcagattttggacagcaacttgggtttttaagaccaagcattttggaagagctgtcttttctagacttgtggagaatggaaatttccgatgtaaccagggctggaatgtatcttttgttttatttctgcactaagtttatggttttttttatctgtattttgactatactttacgtattgtttatcacggttttcctcctccataggtgagggtattaatacataacggaggaggccagtttaagacatgtggtctctttctcttttttcaaaaaaaaaaaaaaaaaaaaactaaattgctttttgcgtataacaccatctgctgatgtaaaagattgttaatttgtttcttcttgtaactttcttgctgttttgtatgcttaaactatgtgcttaccaaagttttcctctaccacaagtgaggctatttatacatatcgggaggaggccagtctaagacaagtggcctctttctctattcgaaaagaaaaatgtgatatacatacaacaccatcacataaagtgtgactgatatgtagtttctttttgggatgcaatcactaggtcctatttgtttttctgtgatgcaaccgcaaaaataaagaatggggtattgtaaatttttattgtctaatcttgcagagttagtttgggtagtatgttttctgtaatccaatgtactccttgtattatttttttctatactaatagcacaagtagtgttgttttgtttcacagctttaatataatcagtagcttttatgttcctgcaaagaaatcagtgatgaatctctatattgccgttatggattttatatattttatatgaatattgcctttatggcttatataattacatattatttattttttatattttatatgcacatttttcggatttacaggtgaccatggacattttagttcgtgttttccattcacattgctgtgatgttcacttaaatcatgggaacctattgaatgtgatatggtcttggattggagttaaggcggagtatagacaaaaagtggccgaggtacatcaaaatactctagcagttataacatttgggagtatggtcttgtttttatgtttctactttttttattctgttttaagtttttgtttaccaaggttttcatccgcccacaagtgacttattttttttaaaaataaaaaaaaaacatgtgggagtatgaactaacattcattttcttggttaagcttctatccatgatgggctccttgcgtcctcaatctactgaacggaaatcaaaatgggctgtcataaggcgtcagcttttacaagcaagtaacaataaaaattatgtctgatatatttatatatatatatcttgccaataattttgtttgcttggtatgcttacttttttttttcttgctaataattttgttttccttggtatgttttggggaaagaatctatgattttattttctccaagctgtcagttgttacagtggaatttgaatcggatgtgttctagggaattagcacacgttacaccctatccaagcgattgtggaatgtttatgtggaaacctttcattaaacttatttttctatttgtttttctttttattccaggaacttcatttaccagaagctgttgtaaataggttgcagactgtcgctttaaggttctgtggggcagcagatcaggcacttcctagattgaggggagcattaccatctggtacctttgttatattagacttatttttttttttctaaatgaaattttgttaatgaaaaggaaaaacttaattcttaaggaatacggaattctctatagaagatatatcaaaatcaaaataacaaagcatatgtattgttccaactctcatttggtgatggcggaatttaatttttatttgaaaaagagaaagggacctcttgtcttagacttagacaggacccttcccgctatgtatataatctacacatggtgcctctctcttgaaagatatgactgcagttttccatcataattacttgataaactgctagaaccacgcagttccatattataatttccatcttctcaaagccaattccaatgggattttccttatgaatggaaacacactaaattagggtcaaggaaagtatgataattattttgtggctaatttttgttgtagcaaactctgctaaggttcttgtaaccacggtttttctctgtcacaagtgaggctttcaatttataatgaggggaggtcagtctaaaacaagtggcctctttctcttttttgaaaaaaagaataaaaccctaactgaatcagaaaacaattttcttttgaagtccttaacatcatatgacgcgaggcatgtggtttgtgcctcaatgtatgagattcgagtctctcctaggtatttatatagcaatttttttagattcctgctccccaatcattgtaggctcaataatagcaataataatcgtccactaagaagagatctcacgtttgaatctcccctcttcgggtaaaagaaaacataataataaaaagctagtacaatgttggttaatgattgagactctttctacacacaatttgtgcacacaatgatgtgtcattattattaaccacctatgataagtgacacggtcctactcttaatgaattgtgtggttgaaaacattaccatatcattgtgttcactaatagtgagcgaaaagagtatctaggatcactattaatttatcccatataatctccaccaattcatctacatcttccgatatctttctacattactccagtcaaagagcctagcaaccttccatgactgttgtgtgtcatggtatctgtctcttcttgcttcctaaaatcagaaatcccaacaacttcaaaacaaaaatgtagcagaacccattgcaaatgaaattttgtaataatctcacccttatattttgtgaaaaggaatattgcaaaaacaagtggtctgctgttttattttatttctacataatacacactacctggtaggcaaaaattgtgcaggcatgcttctcttcagcgtgtcatgtacaatgaattgattccacaatagtagctgtacaaaggcttttgttttacctttgaatgtactacacttttctagaatatgttgaccttaggaatcccttagaagtaaattgttaatgacatttacaagtaaaagcctttaaattgtcccccagccatttacacctattgagttagaaattcctactatccacaatatgacagttactcaatcaactgcagcacctccctgtcattgaatttctcatgaaaaataggtttcatttcccaattattttaaacattgctgcactagtatcaataaaatcaccaactctgccatttacacctattgctctatcactttcaccaatttatcacctaatagtaacaatctcttaggccctaagattagtatgatgagctagaatatactaaataaaaaaggtatttgagtaattgttttgagggtgggtttgtgagtgagaagaggctctatatatatgtaagggaagaatttaggtatgcaatgtattgagtagtcactctttcaaatgataaggccctgatactccaaactcaagaacacaataaatcagtagccaaacagtaggaaatgaattatattgtttaagacgagaaaagtcaattacaagctatgggagcccttaggcccttttgatgcaaagagtgactactcaatacataatacattgcatacctcaattcttcccttacttaccaatatatagaacctattctcactcacaaacccaccctcaaaacaatgactcaaatatcctgtttatttagtatattctagctcaccttactaattctaaggcctaacacaatcagatctaaccattacatcctagctccattctcttccatgtctcttgaatatcccagagcattggcagcagtaaattcctatcagaagtctgcctatgtcggacatgacacaaggacccttactactacatcaatgccctggggactactatataaggggctctccactacacttgttgatgctttgaacagtgacttgtatattgttaaagatgagcttttgaaccaatgatgggccttttttcttttctttgaatacttgcaccatcaatagaagagaggagagggccctctaaaagagctttttgttaattcttcctttgtcctaattaccagtactattctcctatgtaattgtgtggtaataataataccaatatgctgggagttggtgatttgcttgaagaagaatgacaatttttaagagcaaattaatttcggctctttgtgggagttggctaagttcctaacttttcataataataatgaggttaaggatttgctaatttttactgttcttaactagaacacttagtgttgaagtagccgttctagttgtttctgtgagttttgttaattatttggatactatagtcctacttttgtaaatgttctgttttcattttgaaaaagagaaagagaccacttgccttagactggtcttcccccgttatgtactaatatcctcacttatggcagaggaaaaccgtggtaaacaaagcttaaaaatatagtcaaaacacaagt

SEQ ID NO: 13838 - DNA, 5602 bp, Cannabis sativa
tcaatatttatttaaaaaatttaaaacggaatctgtagtgacaaaattaaaagaaaattacagttttataaatattaggtacttatgccgctaaaaataaatattgagttcgtgccgcttacaaatttaaaaatttaggtacttatgccgttatttacccttaaaaaatccttttaggaatgtttagataaaaaaattaaaagtcccttttaatttaaaagttcttttggaataagctaaaatttgtagcttttcctaaacaaacttttaagaaactatttttaatattaaaataatttacataattcttaatttactcacaaaagatcttttttttaataatatgcaaacactttgaaagtcacttttcattaaaaaaaatatctttatataatagttattaaaacaataaaaataaatcaaaccttatacttatcttatacttctagctataaacaaaagtagaagcttagtcaaacagggtctaagcctatgtaggggttatataaatcgatcaaatttaattacaactgattgtcaaatattaaatatcaaattatgaatggattatggtgttatttactaatatctaattggatcgaatcgaaaattagagagggggtttaaaagttaaataaaatctaatttttaattgagataattaatatttttatttaatttaaataagtaattaaatttatattgctatactttaaaatatatatatgtatacacaaagattaggttgaaaattttactttttttttatgtactcgatccaataaatactaaatttaaaatattatctgattaaaaaatactaaatattaaacattagataaatacgaactaatccaatcaatatatgtttggaggttgaagttaattttttaattaaaaaaaaaaagtaaaaaaaaaaattgtctttgagttttttattgaaacatgtgttttcatgcctcataatttgtattattatggattttggaggttgaagttaattttttaattgaaaaaaaattaaatttatgttttttatttttgaaatttaaaaataaaagtgtttttgttttatgtttttaaaattaaaatagttattaaacactttaaaaataaaaattttactttaatttttttattaaaaaattaaaaaaataaagtgttactatcacctagaacatcattaaaaataaatagcaccatctcttttatgttttttagtttgtaaatgaggcattacaacaagatcattttctattgtcttttgttctgtttgttaattgtaatgtactttctaatttctttcatcaagatttgcagttgaatccctctaataaagtcatttttgtgatctccatagagttttggagtttcccaatgaaatttagctctttgtttctatttatactagaaactatggagtttgaatcatctttaacaagcttcttatcttcatgtatagatatctctaaacttatgtacctatatgcacctcattaaacaacatctaaaacaaatctgattcaagagtttgtatccacaaaatcactatgtaaaactcaattcattatacctcctaccaatacaaacttgttcggatgttttcccgttcttaaacctaagtaattcggaaccaatttcgcagacgggtctgtgtttgtgtttcaacttttcaacacgagtttcatatttccttaattcgaacactctttaaaagtttaactctacttttttcaagtccaactcacgtaacaaacaccccattagtgactatatccactccctaataaatttatatatttaatcttttagcactaccaaacaatcaatcaaataccaaggttaataatatgcatatttttttctcctatgaagtttgagaaaccataggaaggaattggctaagctactttgcatcaagaaagtatgaacttttaatttgacatattagtacaaaaagattggatttttatttggtaaaattaaagcaagacaacaagagaacgaagcacaactcaaataggtagcattcatattcaccaaaaacacaaaaaagggatcaatataacattcacttccccattattgaatatcaaaagtaataagagcaaacatcatcaatacaaccacaagatttggtttttttctttttctttgggggtttagggaagaagtactgtggtgggtttgtagtcaaaaacaacaactttgtctaaatttgaaaggaaaacatttgcaaattcaacatgggcaggatgagctacatactcagcaacaccctctgtgttctcaaaggttgattcaaatatgtgagtgaacccttgatgcagattctcaaagctcacatcttttcccctgtaaagtcaaccaaaaccacacaaaaaatcaaaatcaaaatttggtcaattcttttttctattccatgagctgatttaggatgtgggtattaaaaaagtttcaatctttaagcaagtaagtttggatcagagagagaaagaggaggaacacaaaccagtggaaggatttcatggatggaatgagattgaggagattggcatagcccttgataagttgttgaatctgatcatctgaagttccctctttgaactttgctaacaacacatgctttaccactcctttcgcttcttccattgctctctctctctctctctctctctctctctctacactgtatatgagtttataaaaatggtttatcgattaataacaacgagcactccggtcaacatctattttttaaaattatttttacataaatttatttttagaattttgtggtattttttttgttttttattttgtacttttaagaaaattcacataacaattaacaaaacaacttaaattgtgattaaaatttacataaaaactaccaaaataaccaaaactataaatttaaaaaattaaaataaaacatagtacataagataattgtattttcttataactaaaatttgtaactaaaccctccaaattttactttttataacaattaactccttaaacattttttttttgtctaaacatgtttaattacatttttatttgcagatttaattttgctataggatatatttacattagttcatataatataattatttaaattaaaaataaaatataaattatttaaacaaaatctttttttctccttctactcttcttctccctaaccatcattctttctccttttttaccaccaccaccactcatctaataacgctggtagtttctcccgagaaatctccggtccaagggtccgagatataataggagtgtggttaaaaaaatggcattgattacacgaaaaaaataggtcaaagataagttgggcatgcaagaactttttggatgaagataggtttttctctgtaattgtatatttcaaatgaggtgaaaaagaagacaatggtaaaaaactctttttatgttggaaaatggagaaccattgatcaggtttcaaatttagatcaagcagctagggcgcaagagaatatgaaaggatagttgaaaatcccattagttgaaaacatagtttaatgatggaataaactttctcgagatgatgaaaccgccaaagaaagtactcattgttgaaaaagaaattaccaaaatatccacttgtaacttttgtaaaaaaactcttttggtttcagaaataattttttttgggaacaattgttatgcccatatttcgaaccataaatatggacatgacacgtgggtaatcgaatacaaaaattaggagaaactcgttgcataataaataaattgtcttggatagataattaataacgagcaatattagtcttgcattacgcattggcagtaagacagcgagataagcaacacctggcgagatgataaagatataagtcttttcgggtgtagcatatcgaaactgtattgctggaaagggtagatattgagttctttaagagcttgaaactcattgacacacatactcgtaagtatgttgaaagattaagaaatataagcatagtacaacttatttcaaaatcttaaaagactaagtccaagagttgctgtgaaaaaccacttgagggtagctcaagtggccataggagggtgcgtgtgtgttggaggtcctgggttcgagtcccaaattatgtattgtgtaatatataaacgcttgaataaaaaaaaaaagagttgctgtgaaaagctaaagcaagaataaacatcttaattagcgtctcaaaatgctactagctattcttgaacacttttgagagatgcaagcaatacttagatcatgttacctcaacaacattttctttagattggagcatgtgtcatctagagaaaacacgaagtactagtatgggtataaaattctacatatttgtactttattaaaaagggtttggctgatgttttgtgaaagttataacaaatggtgcaacttaattaattataataactattgattgtaaacataatttgggaagttgggcttgaggttgaggggctcctgaagatggtgatttagaggaaataaattgcactgagtatattgtgccattaattgatccaccagcactatagctaccattgcctccaccactggcacagctgcaaaaattaataattacagcctttagttaggtcacatttttgaaacttttggaacatactttaattattttcacgatggaaaaagaagttaatgttgatagtatacatagttaatggccaccaccagtggaccttatactcttgtactaggtgtggtttaatatcaagaaattcaaagcaacatttgcatgcttttatctctcaggtggtgacatgtggtttattaaactagaatctgttagttaagtttagtctgttatttttcttccttgtaaactaactgttagcttcattctgttatgaccgttagttgttagcattaattagtttgtttttcttgagcttgtatctgattgtaaaggcatataaataaacatcaaagcaacccattttgggttaagcttttcttggcaatattgttttcttgctctgcatttgctctgcttcttccttttttggttttgccttgataaagtttctacagttcgagatttatatttttacttaaaatatcatgtttcttttatatttggagagttatatatatgatttggagacttattcaattttggtgtgctaactatcctttgtatccctttgtaatatggttttcttccgccataagcgaagtttattaatacatttttaggagggtcctgtctatgacttgcggactctctctcttttaaaaaaaaaagttttgagaaactattaatttgacacttactacaaaatatttgattgattgttgtgtttttttaaatgacaatttaaataaataatgtgtaatatttaaaacaaatatatataataatggattaaattaatattgtgagcttgattttgttcaaataatttttcaataagactaaatatgaaatcttttactactacaaaaatagtttttctcgacgtttttgaacagccgtttaaagtattcccgtcgtgtcgcctatacgatcgtcgtaaaacgggcaaaata

SEQ ID NO: 13839 - DNA, 3971 bp, Cannabis sativa
tcccctcttgccagatattctctgatgatgtaatacttcctctcaatgtgtttgcttcttttatggcttcgagactctttactgttggctatagcaccattactgtcacaaagtaaaaccagtggtttttccattccaggaacaacaccaagttttgagaagaactttcttagctagactagttccttagcagcctcagcgacatctatgtatttggcatccatggtagagtctgatgttacgatttgcttggcacttctccaaacaattgatgcaaatagtatatggagtaattccccaaaaagatataattattttattttattttacttttctaaaataatatataagagaaccaaataagtataatctaattaaatattctcatgtataattaagtttacagataatcatattctccttcctaatatttttaaacttcctatacccagcgcccccttatattaaattttgacaaaattacacatgaatttttatacaatatgtgcataaatatgatttttcaaaaaaaaaaaaggaaaattttttattttctgagggtaactagttacccccataattagttaccaccataattagttataatttaacttcttttaaaaataaattcccttaaaaataattttttctaaaaaaaagagtacatttttcgtaaattaatgcattaaaaaccatgaaaataaaaactccacaaatttataggattttgaaacaagcagtgcttgttcaataatggatcttggccccccatttgtttgggccataatgcaaagcccaacatacacctgccactctttttttcaccctattctgctgaactgctttcatactcgtctccaataacaaacaataactaaccagaaagcctgagaagaaatttcagagatggccactgaattgaccgtacaactggtcttcttcctcatgaccttaggaatgttcttcgttatactgaaatatccaaaacaagccttaaccaagttccgtgccaaaaacagaacaacggttcagtccggccgccacttagctcaagcaacgaacctattggatcgagcccgatccattccccacaaggcccaatcccaggcccacgcgaagaacgccctggccgaagcagagaaagccatctctctttccccgagagacccctccgctcatatcatcaaagccatggcttcggatctcatggaccgcagaagctcggctctgcgatctcttgatctggccctgtctcctccgtgcgtcaagtccctctccggaagggcgcgtcgagacgcgctgatcaagcgagccgagtttaattatgccacgaaccggaggcgtcgtatcgactcggcagtcgaggacctggtcgaggcaatccagttgtgcgatgacgacgccgacgcggagtccagggccttgtgtttattgggtcaatgttacgagtggaaaggactaaaggaaagtgcttgggagacttatgaaaaggcaataagaatcgaacccggtttggttatggcttctcaagggttggaaagattgagttcgtagcagctaccaactgaaattcaggggctttgctctgtacagattattttgcaatagataaccgtatttctcttcttattttattgtaaattaacttggcttggcttcccaattaatattttgtgattgtgttggtaataaaaaggttcataaaaatatttgacttgacaatgagagagattttcaaagaaaaattttctgaactagatatcctcctttcagccaatgtaccatctaaacaagttaaatattacaagatccagcttttcctactgtatcgagtagttatatagcctgcatacaaaaaagagaaaatcctcatagccttttcttctaactcctcaaggtcgagaggtgggattaaagggtcagatttttggtcagctggaaagggagccacttacagagggctttcggtaatggtgttagctgctaacattaaggggctggaaaaaaccactaactacttatttatatagcatcccatatcaataagtctggtgaggccatataaagaactcagcaggctgaggaatcattccccccatggcagggcttgaacccgcagtagtatcagagtttcccaagtaattagattgatagtgatggaagagattctgatgataaatagctgcagttgcagcgtcaaacgggattccacatgggattgttgaagccggctgcatagccgaaaagctgatgttattgctgttgctgctgccgccggtattgttgcattgattttgatggtcatgatggttaatacttggtttctcttcggcttcaagggagagctttaagcgcttagctgccccgcccactggaagagcacttttcgcaattgcttcaacatcatatcgattcatctcaaagttggtcactgcatttatacctctgaactttatagctgcaatgtcatatgcctcagctgcttcctcttcagtggctgtagggaaatgcgttaatttggtaatctcattaattaaccaattttataactaattcttaggccctaattggataagagtaaaagttatctatttaccaaaggttccaagatatagatctttgtttccggcaacacggccgattcttgcttgccatcgaccttgctgatgatgtctgtacagtagattaatggaccttgattactaatttttcaaatgaaatataaatctatacactaaatagtattttatttatttaggctacaaacaagtggaaatatataataaccttgttacaccccggtatattgaagcaccccttgagaaaccactactttttctgcaacaaaaatagattcgggttaataaattgttctaattagttgagtcaaaatgcaccacaaagtaaatagaaaattattaccttctgagggatgcaataaattcttgcttggtcacgtgtttcatttcttccaactccttactgtagttcgaaaccttgaaaaagaggaacaaccaagattgttcagtaacgtattaagaaattaagatactaatctgaacagcatttgtaagatacatgaaaatcttacaggaaagttggtagtagctgtagcgccccagtattttaaagcagccaaatcgtaagccctggcagctttttcttccttgtcatagccacctaaaacattaatgaagttacatttagggacttgctgcctaaaatttaatttgtgaaacttgaatatgagaatattgatttttaggtcctaatggggaaaggatatgagaggttcttacccaaatatactgcagaacacaatcaaatgttgaattgttgtcaatagcaatgattccgatttcatggaaagaaagagaaaaaaaaggttcaaacatcagtttacgtagtagtcagacattattgctgaaagagttccacaaaaaaatattttaataactaaaagtaatgatgaaataaaagacttttacttcatatttcacaaagcaactctttttcactatacaaagagaaaataatgctcggctaatcattattaccatctaacttttatagccattgtatatttatacattttttttaatatggtgtacaacttggattattattattcaagttacataatttccaaaagctaccaatctttgcaagaagtaaaagaacccgtacattcacattatttaaaagaacccaatgtgtatggacccaaagctaagcccactactctggatccacagagattttcaactagtttcggcgacaatagtggacaagaatttaataatgtcaaattttcaaataggtgctttggtcaaaccagactacctctgatgggatgaaagcaaaagcaaaagttaaagctaagctcagtaaatcagaccccattgatgtctgtaacatctggggttttgggtatgggtcgcatcaaaaccttgcacaatggtgggtacgga

SEQ ID NO: 13840 - DNA, 1803 bp, Cannabis sativa
  modified_base (34)..(38): a, c, t, g, unknown or other
gatgttaattcaacatacttgtttgtaaatctannnnntggtaaaatattcccaatagttttaggttcttctctcggtatatcattcagagggatatcctcaaattcttttggaacttcttcaatttctgggggatcctcttcctccaaaattcctgatttgtgctctccatcttagttgtgttgtttgtgcttcgatttccctcttagattctagttcttgaatcttgtgtgtgaatcttgaagttctagagttattgacataccaaacatgtgctctgatactactgtagggaaagttacctttctacctacaccaataactcacgatattaatcaatcacaaggtcaattttgatctttctactttagtaatgccacaaagaaaatgacacagcacacacacaaactacactggattttgataatactcatacaaaacacaacactcgcacaaaactaaatctcaaaacacaaaccctatatctaaaagctacaattcctagcatagagtgttcgagcttgaacaccactgatctaccttaaatctaagaaccacacaacacaaaacaattaccaaaaaagagataaatgaagaaacatgttagagtacaaacagagagcaaaaaggcacatgagattgatctcggagttcacctcaatcaagggctacgtcttcgtcaagctatcctcagagaagagcttgatttctactatcaacaatggtgcgaacacttggtacatccttggatttccagccattgaggtaagactggtaacccttaaatttctcttgatttctttccttttattttacacaaactcactttctcactaactctctttttctttcttttacatgaacacactagcacgaaggccctctatctttcctctttctctctctccagttgatgcagaataatcctcaggtagaaatctcagtctttttttttattaatagaaatcttagtcttgagtttagcttttataagcatatggtagagtagagctcagtctgagctaaagtaggtctgtaactgctttttgttgtgtttttgctagttgtgaccgaattggtagctataaactgttcggctaatctggcatgtaagtgaattcgagagtctttaagtctattgtaaattaattgagctgtaaaaataatttggtcttgagtcaggacagtttatattagaatttatccaacaacaattactgttatgtaaaagaaaaaattataattttctgaaaaacaaaaaaaaaaatacaagaaaaagttacatccatacctatgtagtaggtattactaaatggcaaaatcaaaatctaaactacttgtacgcatttcgtatgaatacattataaaacaaatgaaatttttgtagtacacactcctaaaggggtgttctggtagaccccctgtctgtttcagtattcaaaagaaaaaagtccatttttttttataatcgcgtacgttgtagctatttaggaccacctataaattttttaaaaatttcaaatagtttatagtgttgaaaataatgttcaaacagtcacttaacttgcgtataaggaaaaagagtcgcgcgtgaaacaaaatattcaaatcttatttttaacattgtaaactattcagaatttcttgaaattttacaaatagtcctaaataactacaacatacacaattatatattaaaaaaaaacaaactgaaaaaacctaaaaaatctcccgaatgacgaaacaaataggggtctactgaaacacccttttagggggtatgcttagggtgttcattggacc

SEQ ID NO: 13841 - DNA, 4608 bp, Cannabis sativa
tgctaatgaggttacttgtctttttcttgtgtagtaatttgaaaagagagaatgcgtttaactcttcaaaagttaaaagcaatgtagaccttgtggttcttgacacaaatgtatatgtagattgaacagaaaaagactgggaaaattagttctgttggtagagatgttactggataatgggattgaagatttgcatgacgatggcttcgaggggtctaaggttgagaggtgtatattcagagagattttctttagggatgacactggtagtagtactagtaagaagtgtgttgtgactggagtcattaactttgaatgtgagtctagtaagaacattgatacatcattttgttcaaacagtgaaaattccgctgcaacaagtaattattcctccaagaatacatgtgtggaggaactttctactgtgacagaagattttagggaggcctctgaactagtatattttccgaaacaggttgtttcgtctaacagagattgtgatgatgcgagtggtgaactaacaaaagattcagtttatgaggttccaaatagtgaatgtgatttgggaaaggtttctccagcaattcccagaaagaatgctacagagcccagctctgaagtggttacacttcgtttggtggaatcttccagtcagggagtaacatctagttgctatctgttaaagcaacatggacagatagtgagagcgtgcacagtgggcgatcctaatgtttccaagggcaggttaccaggtttggaagggattgcttcaaaggatgtaagtataggtaaagctattgcttcacctgtttctcaggagagctttgcatcgcgacttgtggctgcaagtccaactgtgaacgttcaagagagatctgaatgtccttcagatgctgaggaaagacctctagaaaaccgaaattgtgagttagaattatcaacttatgtagtggagacaagcttaactgatggtcctcatccgctactccagtcaaacaaggatcctcggccgcttatccagtaccatgctgttgagttacttaaagcagcgggatgggacactgagaagcgtaaaagaccaagtaggcaatatacggagacggtttatatatcaccaaagggaaggccagttcgcgaattccctaaagcttggagggcatgtggtgaacttttgaatgcagatggatatggttcggtggaggaaggtgttaagaaatggactaatatcagtcaattctattcagatttatctgatactattttagctcttgagaaagagaaaaatgcttcagaattgtcttatcaatggagaatgttagacccttttgtagttgttgtgtttgttgacagaaagattggtgctttgcgaaagggagagacagttaaagcaactcaaagcattttgattgacaggagtagcaagtcagatagattgttacccttggaaaaggctcatagtattaatcaccagattgcaaacagagatctaccaacatccatttgtgggtctactttggctgatgaaagtgcattggtagtttccgaggggaattcccatgactattttcagcaatttggacatgaagaatctggcaaacagatgaataacaaggtaatagagctttcgaagtgcacacaactttatccaaaaggtggtgtgctcgtggtcgagattggaaatcgatgtatagaattctctagtttgggtatgacttgcttacctgaaaatggaactgatagcactgttgtgccggctggtagcttgcacgatgtttctcttacttccataaactgttacaatgtgcttgggcaatctgtttttcttaatcaagatggcaatacaagtagtcaaatctctgtcaaacagagtgatgatgttaatattgagacaattaaggaagttatttcttcagaggataatgaacttcagggaggccgagtttcagatgtcaagcattctccactgagattacaagatgggtcggctattgaaaaagagccgggtgttgctaggcattctgtacaggttgaggaagatagtagacagcagcatgaagcctcgaaactcacagtggatgatacatgttctccagacattacttcgaagaagaaggcacgcaggaagtctaaaagaatatctgaaattgaacagagcgcactcgaacaaagtggcaatctaggttcagcttctatagatatggctgacttactgtgtgttaatggtaatgaagacctggatcaggatcagggagacattatagctgatggaagtaatgaagaaactgctaagagcgcgtcttcactgaactcgaaaaagaggagttgttctgattacactgagtctaaaattgtgaagaagaaatcaagatgtcgtattaaagatgatgacttgctggtttcagctatcattaagaaaaaaaaatttagtgcaagcacgacgaaagatccttctggtaagaaaaactacaaatcaaaagcctggaaaaagcttaaaagccaaaagcgtagctgcagattgcttccgagcctcgttaatgggggaaagcactttaaggatgggaagtggtattctgttggagtaagaacagttttgtcttggatgattgatagtggggttgtatctttaaaagatgtaatacaatatcgaaatcctaaggatgattctgttatcaaagatggtcaaataaccagggatggcattttttgtaagtgttgcagcaaggtacttacagttttagagttcaaaattcatgctgggttcaaacttaaccgtccgtgcttgaatcttttcatggaatctggtaagccattcaccttatgtcaactccaagcctggtcagctgaatacaagacaaggaaaggaggtggcgcagtggttcgtcttgatgaggatgaccgaaatgatgattcatgtgggatctgcggcgatggaggcgaattaatttgctgtgatagctgtccttcaactttccaccaggcttgtatgtctacacaggttcgcctttcggattctgcatcttatttttctaattttcttgcttggaaggcaaaaataaaagaagggtttaattatttttatttaaaaaatagaatgcggatatgtttgtatagagaagataggcagctatcaaatctgatctagtcctcttatcatgatttacaattaaaataaattaaaagcctaaaactaggaattttctaaaatatgcattccgttacatctctccattaatttagtaatcagaaatggaatagattaatggagagatgtaacggaaggcgcattttagaatttagtaatcagaattggaataaattaattaagagatgtaacggaaagcgtattttagaatttagtaataagaatcggaataaattaatggagagatgtaatggaagacatattttagaaaattcctagttttaggcatttaatttatttctgctctaaattactgctctaatgccacaacacttttttattataatttcttaaatgtaatactcattgatcataggaattgaaatgtgccatttttcattggcctgccatgttgagtattgaaaacaagaacaataggtcctttaaacaaaaccaacatcaaattggcctgccctagtgttagctaatttctataaaaaaaacagtatgtccaaacattaattatctgcctaaattcttcaaaactacgtatacttgattgcacttcctccttatgataggttataaatacagaataaatcagaaagagattaggagaattgggaaatggtgtgtaaattgcaaggatgaacatgctgacctgtgtatagagattgcaattccaatttgttgtctatgtttcagtggttttctaatcactctcctattcttgtattttcccattattaatatgagtttatattctgttaaagaaaaaaaaaatgaaagcatgcatgacatggacatgaggagagacttggtaacttgatggattttataaccaataatctttcgaataacttagacttgtggaaagagtattaaggccctttttggactttttattagtatttagatgtttatgagattttgtataaatccacttggctgtcataataatccttggatcttttgttttgtactctaggaactccctgaaggcagttggtattgcccgaactgcacttgttggatatgtgactctttggtggatgacaaaaatgcttcaagtgcttctgatgcattaaaatgttcacagtgcgagcacaaatgtaattattctttttaaatgaaatttatgaacctttctgtgaagctggcagattggtgtcttgttaaatatatggaagtttaaaggagaatacgtttgtaaagaaagaagttagcttgattataaaatgatattgtgagctgtaatcctatgctcacttactaaatgcaaatattaatttgactcattaacatatttgctaacttcctataaattgatttacattaagtaagtacattatgaaagaatgtgatagtctgaattgtgatttgttagcgtaaatgttaacctttgtatcttctgatttttccttctctcttgttattgaaaacctgtaaatagataatataaatgc

SEQ ID NO: 13842 - DNA, 5145 bp, Cannabis sativa
attttcgtagttctggaatttatatgttttgattttgttggtttaggtgaatatgtcttcgctgagggattgaccactgcattggtttctagtcagatcgtttcagctggtacaactaaatcatgtaagacattactgctttcgacgttctttctttggttttgagtgaatggttcagtaatttagaggtttgatgatagtttatgctaattgttatgcattcatgtttggattggtcgtagcgctatttggttttgtgggagattttgattagtgtttgtatacccgtcctatgaatttgtatatttcaataggaatattgtaattgaagttccaacgaccctgcattgtaaggaagaacaaaggccaagacatttatacaaagtacatggactgttatgactttggaaagaaaatggaattgccttcatttcttctgttttttgcaatgagcacaattaataataaactaagaaaaaggacaaccttttattttagctaaaactacaaccttggcattagaaatcctaaagacatttgcaagtaagagcaaagagaagctttggtggatgtttctttaaataacaggaatcatataatggaatgcattttttagtcaatactttcttctttcttggttaccttaagcagtaatcatgttaccattttaataagtatacttatcacgtgacagagatgtaaggcaaatctttgctagaagctagacattctgtctctaggtgatcaccagtgagcttacgaagctacctatcattttaggtgtttctactagttactaatataacctgtgattttccttttaaactgtgccatgtgttttgcgccttgttccttaatttttattctgaactgcgtgataagaatagcatactttcacttaggtatcatatatctgagtcttgctatagcatttatcgttataaccaaagtcaactgattatgtaaaatgtttatttcacagatgtagtgagaacattgctaccaaatattattccaccttcatacaagggtgctacaattcgctacttgtattatgttaggagtacaatatgtgggcaatggttgatattggaaaatcctcattctcgtggagagtcagtaaaagatattactgaattggtttgttttctttgacttcataatttgatgctacaatattttttattgttgctagattgttttattgccatattatataggtcttgctttcactactgtccatttcataacttcaactttttgaaggatttttctcttcccccgaattctgtatttttttttcttttgcattaaggatattatatttatggattcatggctggcaaacattcaggaagctcgtgttccattacaagtacgtgtcactcagaaaaacaatggcttgccaatagaggaaggtcaaggtgatggtgagtttttttttttttttaatttattttatttcagggggggtttgtttcttttcactctggttgctaatttccttacatctttgtttattccattccttggattacagtcatgaaagatgaaatttccatttcttggattacatagtcgtgaaagttgaaactaccattttctgaaactgtggaaattttcacttatgatgcgttcataaatagacaacattcctcaagactgctacagtgattcttaagagttttgctggcattataatcttgttatgttggccttgaaatctgatgtacatattgagataaaagatgagggttattttttcctcttttcacttttatgacgttcatatttagactgttaggagtacttgggggacaaattgctcttgaatgaaatggttatttaacttggaacaattaggatcccaggtgtatgaataagagttaaaaatacaattaggttgatgatctaggttgtttttaaaacatgattagcttgttactcctatcagaagtcaccatggatatgttctggttatagaagacacaatattgattgtgtgatctaaatttacggtcctactagcttgttctagaatattgtttccatagtttgctgttgttgttattgttgttttaagtgatgtagcactaaagtgccataatactaatattagcatgcatgaaactccctaattgatgtgctctgttttgttgttgggattcttgctctttcatctaactctagtttttagtgggggctgtagctagtgttggaagactaggataatatacgtttggttatgtttgatcagttttctccattttacttgaccatcctaaatcctgaagttggcttaatgcaattctgattactgatattcataagatttcaaatgtctttacttttgtaaatgcaaaaaggttgcctgcaatatccttttaaatattctcagggattgttccttcgacaactgtccaaatggatttatattggaaagacgtagatggagattctgactgggtaagtacacctttacttcatttttcttgatctctttttgaatggcatctagaggtgctttggattatttttatttaattattttttcagaaattgggtttatttttcttttataagcaaaggacttcacttttctataacattagtataaagttgagttaccttcttacaggttagagcaaatgatatttatgatggtgttgaagaaggatatgaaagctccaaggatgagatatcttctgtttcttcgtacaatcctacaaaagatggtatcaatagaacctttggaagttctttttcattgcaatcatatgcagcaaggttgtcctttaaagatagtggatatcttgaaggagatcgtacaagtttgtcttcaaatcttgcagttcctcggctctctgcggctgaagtcatgtatgattctgggaatggtgagtcgtttttagtggctttatggttgagtagttttttattttccaagttctagaatgatgtttgtgaagccttttggcctttggcactaggggctatcattgcaattttaaatttttcttcacagaacaggacttcattttccatttttgtatgaggttgaacagcagtgttattgagtggcatgttttctttgcaacagatttgttatccccaaagtcatcttcccttgtctctccaagccagcagcagaagctgacgaggtcactttctgcagatgacgacacgggggcatcttcatcaccagctgccagagctgttgagcctctagcatgtattcttacacacttgtattctcttcaaatgttttgttaggacttattagatctttaaccctaatggtttctgctgtctagactctagaatcttcaaaagctaattttctgcaaacatttcctgcagcagaaggctttattcgaggaagatcctataacatccggatggacgaccgtgttatgcttagattttcccctaagaattctgactcaatttattattttagtgatatggtacacaatcttctgcttatacttaattcagcccccttcaatcactcttgatttattcttcatccttggcaaattattgttaaacagattggtggaacccttactttcttccatgaagaaggagctagaagatgccttgaggtagttatggtatttgtgttgctaattattcactaacagaatccaaacaattgtacctcttaatatgatgctctattaagggattgctgttttccaggtttcaataacattggagacttcagagaccataggtcgaagacatgttcatccttctcgaaggaattccccaacaattacaaaggttttacttctgagcctacaacataattttggaagacatgatggttccattcattgatgattatcattcctattttggatttcttgaacatctgttgggcactatcttgtaggttcagagcgatcattacgaggtggttgccgatttggtgcaaacaagctttctcttctccattcccatggatgggcctatgtctttttccactccccatgtttctgtgcaatgggtccttagatttgaattctttaccaccccaaaaaatatagattggaccaggtattgtttgcattcatttgaatggacccttgaaaaatacctacccttttcaatactatatgacacatatgactgcatagattatagttcaaacatttttaagagctatgtttggagtatttttcttctgtcatctgaaaatggattttgccttggcttcagatacgaacatcctcttcttgtagagggtagagacaaaagtgagtgggttcttcccattacagtacatgcacctccaccagtggcctccgctcctcataaccgaaatgacaagcttttctccttggaacccatgtgggtgcataactgaactgatttaaggtaaacaacttaaaaaatctcattggaaacatttctgttctcttccaatttttgtgtttgtatgtatgacattttccactcagttcaagaacaacagcaatgaaatgaatataaacattggttttagttatagtgaaaaattactaataataccagctgtagtctcactactcgctctctgaataatatattatatttgatatgatacaggtttttgtgtaggacaaaaggtccaaaagaagaacagctaaattccagaccagagctcatagaaactattttcagaaagaaaagaaaaagaaaattgtctcgagtgtaaaagcagaattttgtttagtatttgatgcggtggctctggaatggaaataatttttccttgattaaaggtctaatcattatgtacattctccttctcctcaattacaattatgttttttttttcttttctttttaattatgattatttaatttgagtgaagcttctcaattgacacataatacagttgcagaattttgtacataacgatccccttggatgggaaattatgctttaagactgctcggctatttgatttttggttattcaataagaaaagaaatatacagacggtagtgtaaacaaattaattttggtttattctgacaataataattttgatttattgatcataatattaaaatcacgttaaattaataaatttataccaaaataaaaaataaaaggatctggaattttcgatctcactatgaaaataaaat

SEQ ID NO: 13843 - DNA, 2448 bp, Cannabis sativa
aaaaaaaaaaataaagaagctaatctcaaagggtattcctcttttttctttttaaaatgttgtttttcattctattcttgacttgtatgactatcacactcaacataattcatacccaaatcatgtgttatatcgtttttcatgtacaattacaccatagttatcggatacagcgtcaattatgtataattttatatatttattattgcaaatggatcacttgaaaatgactcatttgttctttaaaaaataatgactcattcgattagtccaatttttctttttctacacaattttgatgagatatatgacctatttatggttaaataaactgtttatttgtggtaatttataaatgtaacttagttcttctcaatataagctcattcagtccacattgacaagttattgaaaatatatttattggaaaagtttactatatcaatatcaagaaaagcatatatatctaaagacttgttctatgttatatatttatgaaaaaaaatcattaataccacatacaagttaggtacaaaactatagatgcaaatgcaattcatatatcttaattatatgcaaagctaaaaaaccttcttaaacacgaggacttcaaagaaattttgttaaccatttttattgtaatatgtactacatgtatgtatatatgcatatttattcatgttaaatatgatttgggctaaacaaagatgagttgacatttgagtttttagtcaactcacatcatgttctcatatgatctcaactacatatactaagattcaatttcttaacataaccaagtacacgtgaatctggctttctacgtaaagttccaatcccagctctttctttctttcttcttttctttttttttttttaaaaaaaaaaacttaataataataataataataacaataataattctatcatgtctctaggagaggtgttgatattcacatgcttatttgtccgagacagaatcaatgaagatgtaacatagcgtacccgccaagcccatgttctctcttttttattttcttccccactaatctaatcaacaagaccattatgtgtttatataaatatatatatatatgtacacatatataatcatatatgatgacgagttatgctgtagtattctaacaataaaaggagtataacaaataacccagaaacttcatggaaagtggaataattccactagcttaattagcagtggaccatgtgcaagagttgagatcacttgttcaataatttcactaatagagtccaactaagatatagagcaatatattttcttccatatattaataatatggcatattaatcatgataaaagatgattaggttctagtcactaacttgtagtgcaagaagaaccaatgggttaagattggagtggacaaagaagaatgccgtacatcaaaagtcatcaagtgaacagctgaagcactattattcattacattgtcccacattctacaatactaagaatgattgtttttcaaatcacggccaagtgtgtacacataatttatcataacagaacagatcatggaactctaccaaacataggacaccaattttttcttagagataatggagatatgccaaatatacttattaaatgataatactgcaagtaaagatggcaacaatcactactacattccattacattccttgctttttattctcttctttgaagtaactaatacaaaagattgagaattcaattagaattgaaaaagctaagggcctataggagttataactcatatggggtcccttgaattcatctttagtattctggggtttcatttcattcttattatcatgtgtgtgctgacagagtcatcaaaaatatcagtttcaaaacttgtgaaacagaaaagagaaataatacaaatatgatggattcaaccttaaagagtatctatgagttgaaagtctatctaatgagatgaaaattgactttagaagttttgagactgaactttgcattacaacaccactcagcaatagcacaatttagagacagaaaaatcacagcacaaaagctgaaacagaaaatattaccaaatagcaagagtttgtgtatcagtctatcaaacactaagagccgtagtcaaagattgtgcggtccatgcatgagttgcagcagaaaattcttgcgctcttcaacagggcaaccaaagaatgctctcacctttgatgcattttgagtgagaaaggtgtatgctttatatctcagccttttatcaacaccaagattcactaactctgcaaaaacttcttcctctctataaacttgaacttgactccttttagcaatagcatttgcttcccttattgcttctgccacactgtgaatcgcttctcttatactttcaaactctctcctgcatacattgtctcctggtgcatttcgttttttccctgtca

SEQ ID NO: 13844 - DNA, 3471 bp, Cannabis sativa
agcaaagaactatccaatcaacccaagttttaataaaaccaataaaatttaatgtaagcccaaataaaagtctaacattataagctagcctaaatttaaatacaaagtcattttagatcatcacgtacgagattgtattctccaaaataaataacataatctaaattcaaattaaaatggtgataagatatactaataatgaaatatagaattaattcattaattataaaattaattaagtaatacttcccactataataaaataaaatacatagagtcaaggtctcaagatacaccaatggtattaattataaaagggtaaaaattggtcaaaaccaataatggaccacaaacttggagttttacaccgaaacattaacacaattaagaagaacacaattgggataataattgtgaataagcaactattaacactattttttgatgatgaagatgatgccttatctgattttgttcttctcttttccatggatgccctctttgatttcttggctagttgaagttgcacaatctctctcaccaactttcgatcataagcatctaatgctggccctagtggaggcctcggcggcctctttgaattgattttactatttttgttcttatgacacgaacattcttgatcaccaccatatatacttgtgtctttctcaattattttcttattaatgttatctattactaactcgaccttctcatatttgttaaccttacaatagccagattttgccaaattggtacgtaaattgatcagcctatttcgacgattatagattgatccaataacaaagctcaaaacaccacgtagaacttttgaaaatataattgctttcatattttgatgatcttcatatgatgaggttgttcttcttccactttcgagatcaatttcaagatgatgatctttgtctctttgtgccatatggtcagtttcacttataggattactttattccctgcttatagaatttaaaacacgtgaaaaattaagagcttgttctctcacaaaactatgtcatacttctcaataaaaataaggttatatatagaagagttcagagtttagaaacctgatcatcaccattcgtgtgcagctgtgtgagttagtcataattaactggatataataaccaaaaagaccaaaagacaatgaaaaagaaagccatgataaaaacggtgaaaaccaccatatggtcttatcaaataactaacggaaaatgatatatatttgcttataattaaaaagctaatccttaaaaaccgttttgttttaaacacgtgagctagctataatatttgtaaagataatctattctctcatgcacaatgttgtgtggcaatatatctgttttttttttcttttttaagacttttggtttatttgtggcaagtaaaacaaatgtgtcagcctgacatggtttgaccaactaaaatatttgttaactattgtcaaaacaataaaattgtatttatcaaaaaaaaaaaattgtaaaaaagtattatcatataagaaacgctaaaagaaaccaatacctagcattttctatgtgtcaatattaatattgattaaataaaaattaaattttatataatttaatataataacttttaagaaatattattagttaatcgtaaagcgatatatctaaaagtaataagcactattaatgtctaataacaatactcttattgtattagtcctgaactaatataccgcatatatatgtaccaatttgatattcaaaagttcaattttatatccttaaaacttctagttaattatggtcctagcaaacaatttctagttaattttttttcaagtcctatatttattgtaaataaataaaaaaaaaaaaaatctgtcattatcatcggaatgtatagagaaatttgaaatatatatatataaatatatatatatctgcataatctaaatttgtaacattgaagctactaaaattgatactttaaataaagatcagtttaatagagtaaaagacgacccttggaatcgatcaaatcagaaacgtacatttagatttccttaattagcttgtgaccaattctataggaaacataaacatcaatacaagcactcttaacaatctccttctcaagcttcaaagactcaaaatcaagagttgaataaacaacattattattcttacgttgtttggacctaggaagcttgaccaattgataagcaagtgttttgaggccaatccactccgatcttccaccaaagctaaaagggtaacgttctttagccaaactacgcacatcaataatcaccctcttcattaacatctcatcttcatcatcacaacataaaattccatactcatgttgtagattagaaacgacatcttcaactccaattcccacaaagatgttgttggaaccggtcatgaaaaacctcttcaaaattcgagtaatgacgaaagtgtttatgtggttgagttggagaaggagacacttggtgcctacacagaactgcataatagaaattttgtggctttttgggttaatgttattaagaccccatttgcagttgagacctataatcttttgtggtttgggatcaatattaatggagtcaaggacattgatgttccaccagtattcgattatggaagccccgttggtgactgttgcttctatggtctgatcagagtatgaaactaagtacactgccaccaccatctttgtaattgtcgattaatctctcaagtctcacctatcgtattgattcaaagcggtgttgaataaagattaatgatatgtttatatatttgatttagtactgtgggaattcaagaagtcagaagaataagtttgtataattatcatgttgaaaaaggcagagacgctttggaagttgttgcgccgtatactctcgctagtggcagtgggtcactgaagtggtttttgtagtaactaaataaacaaaatgagagatttttgatattaaatggatgagaaatgctaaagggtatctatgatacctaacatttttaaatgtgtaatattaaattatacagaattgttaattaattatatgacatcacttcatagtaatactatatactttagtgctctataataatggtctaaatagatatattatacaggcgcagtcttagataattattttaattttttaaggtttgttaaatttttgcatcgatgtagtgtgagaattatgagtgtttatgcatccaattgtaatcactaatatcacaaagtgtacatgtataacaaaaattgtctatttcaagcaataactataagagtaaatataattttgaaatcttgttttaacaaaagttagtgattggaatctatatttacttatttagttaaatagcaattcatgcaatatatttttttcaaaatagaacattattgttaatacaatgatacggtgaaaagaagaacaaaaatcaacat

SEQ ID NO: 13845 - DNA, 2137 bp, Cannabis sativa
tcttttcaggtatttaatgtggttcgaaagcaagactggtacaaggctgatgtttttatgtacaaagacttgattattgcactagcaaggagtaagaaaatggatgaagttatgcagctatgggagagcatgaaaaatgaagaactatttcccgattctcaaacgtattcagaagttattagaggttttctgagcattggttctcctggagatgcaatgaacatatacgaggacatgaagaaatctccagaccctccagaagagttgccctttaggattttattgaagggtctcttgccacaccctcttttgagaaacagagttaagcaagactttgaggagctttttcctgaaaaacatatgtatgatccaccagaagagatatttggcgcacactgaggtttgcatttctctctaaacttattccctctcacatacgagtggtatttctcgtagtttttatttccttttgactaatgctattgcatcatcatgcaatcaaacctggaagaatccatatgaaaccagaagtttggatcatagaatgtagattacataatcatctgttaatctttgtgttattatcatctaaaaatattagaattttttcaggtttttgctgtaactgaaaatctaaaagacaaaatctttgttttacatgtagaagaaaaaagacacgaaaacaggaagttggtcaagacagaaaaccatctacattttttcctcctcagctaaacaatattaggatattttttctttgcttatcattttagagaggtagattaaggtattagaagtttcatatgatttttgttctcctcagtcctcatatggtccatagccgattgtatattgaagcttatgaacataatataaacatggaatcaaccgttcttcctttttagaaactattgaagtgaagatcttctagagagtgaaattttgagctgcctaacttttggtgtgaagaaagaggctggtatcatcaccatttttttctttaacttgatgtcaactaacagttcagttcacactaccaacggcaaaatgtcatcagtagagtcaaggttgttattgttatagcttctaagacgagaagatagctaaaaagaaatgaagattgttttgatgggttttttaataaaacatagttggagaaaaatgttaatttgaattggaagaatttgaaaagaaagttaaaaggactcagaatggaatgattattcaagaataaacgtgtaatggaattgtaattccaaaagaattttcatccatttgttttgaaatgaaaatcatcaaaggaatggttgttctcattaaacccaacttccccacatatatgttaaaaaagagcaacccatagaatagataaaaaatggcacttgttaaataataattacaaagtgtattttatcacttttctggtgtctcatacgccatacctgtccaacaacaaacatgtagcagcaagagaaaaacagagtgagattcctctccatcctcacacaccagacagtccctagaagtcgagatgccaaattggtgcagcctgtcatggaggaagcctgtttttcaaggctagccaactgataaaatgatgtttagctatgcaaaatttgtcccaaatcacagcaaactgccatctttccatgaaccaatgctgcattttgtatgaacaactctcttccaataccaactatcatcattaatagggacctcatagccccacctatcattttgcttatacacaggggtgcacacgggtcggattttcgggtttttggggtttcgaattcgggtattcgggtatcgggtagtggaaatgtacaaccaaacccggtgttcgggtttgcgggtgtatcgggttcgggtcggttatgttcgggttgggtttaaccgggttcgggtcctattgggctgagctcgaatttttagtttatgggccgactgtcgactgttgaggccgaggcaatgccactgctgtgggatgggactccgccggcgaagagaaccagtcgccgactggtgtgggtgagtcggacgagtcgactgggacggtggatggtgggtgtggtgtgggacgatgagtcttgtgggtgtggccgtcggacggggggggaggggactgggtgtggcc

SEQ ID NO: 13846 - DNA, 4105 bp, Cannabis sativa
aataataataataataatatccatatttcgtgtattttttattttattaaatcgtataaaaatttgaacagaacaaaaattaagagagcataattatttgcgtgtcactttaaagtgctactctcactaactatcgtaagtcttaactaaccaaataacgacaaatctacccaaagaaaaaacaaactaccatttttctctcgtttcgagactccaaaccttaattgacacctgtaaaatctgttaacatctgcttggctgctgagaaaattggggtaggaaattttcaattttggtttcatttcccgtttactttcccagtatctggtctacttttttctgcgctgtatatagttttggaaaaacggagaagttgagattcaaaattccctattttcggtctgcgtaatcgtctttgagatgagtttaatcctaaactgttgcggaagctatggaattcattctcttagaatttcaagcctcaagcgggctcacaaaagcacttgtggtgagtctgtttggtctctactttcctaccatctactgtttttgagttttactagggttttatactctctatggaaacaacgttctcagctttaagtaatctaccattttttttggttcatgttctaaaaaaattttaattgaaaatattagtgtttgcagaatttcgggatctgttttaattaactttaataaacacttatggttactattgtttttttgaagaatttcattgagctgtatcgacaggagtggtttccaattttctgtaatggaaatattatgtactgagaggtttttgtgtatctgtgatccagtgggattgcttgtacgaatattatataaaattttacaatatttattttcaaggtatccatatgaggccaatcacattagtgaaaaaatcatcttccatagatgaggatgatcattgccgagatcttgcaccattgtcaaagatcaatgtaaacagcagcttgagctttatggcagctatgaatggcatggccggtaagtctttatccttcgcttaacatgacatgttttacaatacttcgttttctttcatttgttcactcttttcaaagaggtttattagatatttgttgtcccatttctatatcgtattgcattatgttatcataattttttttgttttcacttgggtggggaatgttgttttgatggctttgaaactattcatctccttaacttactcttaagcaccctacacacgatttacacatgtggtttgcatttgcatgttttatttttgttcttccttacagattcacttatgtcctttttcttgtctcatagttttatcctatgagcatttcattacttttaaatgcttgcactgtaatcagtttcctctgtttataatgttttcagtagcaaatttggctgcagtcgacctagcaaaggcagtgagtacaataaattttctttagaagtgtcctttgcttcctagtttatcaaatctctctttatactttgtatccattacaagtttgctaatgtgaaaaaagctttgaaaacttaacataatcatatttagttgctgttttcaagaaatatagttctgaaattttttacaaaggatatttctttatgttgttatgaatctcttcattctagttgtgtttgtatatatgtctaggaacttgaattaatttactttctcaggaaaccgtaaccgctgcttcagtgtacactttgtctgatgggggccttggagattggtttggtggctttcttttttctgctggtcaaacggctaatgacgctgttcaggaccaattagcagcactaagtttcactaggttcagctccacttattcccctcaatttcaaggagaatctgtgaacatacaagtcagcatttgcttgtttctttattttaacgtgtattatttttttgcagtgtggcagtaatttttggagcaggacttgtaaccagcctttcaccttgtactcttagtgttttgccactcacccttggttacattggtaagcagtttgtgcttcaaatttacggcaatggtatctgtctttggctatatccttttgtaacttttttacatataaccatcgcatatactgattgatcatttgtttacaggtgcatttggctctgggaaaagcagatcagaggtaaatgtttgctaaccgagttattttcatccaaatgttcctttattattttacattgctgaactggtgagcaatagaaccctagggtcactgtgggcgtttgctaaactatattaaaaaaccaataaaatgaggactaccatttttgccagtgttggttctttacgagtatagaaaaactacttgtagctatatgtatgtaaatgaaggtcacatactaaagtgtttctttgcaaattgcatcatagaccgcacgtgaatttgttttatgaatttcaatatatttcctggccaggttattgggaattcaatttcattcgctttgggattggcaactacgctagcagtattagggatagcagcctcatttgctggaaaggcatatgggcagatagggcaagggttacctttggctgcttcaggattagctgttgttatgggcctgaatcttcttgaggtatcatgttgctataagagaatgtgctggcttcatttattctgagaattattttgtctgactaatcttcatgtaaactttgcagataattgaattgcagcttccatctttcttcgacaattttgatccccgtgctgctgccgctaatttgccatcaagtaattggcatttttcttctcattctagtttttactgctctttgtatttgtataaagtttggtatcctgaaagtcttacaagcttctatttttgggacaatttgataggtgtgcaagcatatctagctggccttacatttgctttagctgcctcaccgtgcagtacaccagtactcgccagcttgttagcatatgtagctacttccaaggtattttaaatatttgttaaattctgttggattcattccgactggatttatatactagctgattgtgttaattttttgcggtgacacagcagctctcaaatatacttaaaccacaaatatgttaatttcagagatgcattctagctcattcatggtatgacattgcctagctagttaacatttttcgccctggtgacaggatccaattattgggggaagcctattgctgacctatacaactggttatgttgctcctctgctcattgctgcttcttttgctggcgcattgcaggtatgcggttcttcatccatcacttattttaactttgacattgtctaaattgcaaaataaaatgctattctgcattccaattttttgggtggttgaagtcaggttactgctttgctccctaactaatctactcaatgtatttgactcatgctatgtgcagagcctgctttcatttcgcaaattttcagcttggatcaacccagtgaggtgattcttcatctttcatttgatctcttctaactattgaataggccacctttgcactctctcgttactcgtatcatggcagctcatctttctcttaaaccaactttttttatacgagattccccacactcaaatctctaattatgcttactttttctcgttctctttctttatgtatttatttatttttgcagtggtgccctactgttaggagggggtgtatatactttccttgatagacttttcccagcctcaacaatgtctatgtaaatattgttccccgtatatatataaaatataaggtcaaacaacacaaaagggcagctgaaagttatagtctcgaacggggattttgcttcatctaaatctgtgtagcaagaacgtgtacaagaaaattcagcaaaagaaaaagaacgtgtacaagaaaagataggaaagagcaatagaaatgtgtaattgtgtatttagttatggtcatccaattctaataaactgtgattcaaaattgtcaattctaatgtgacttctttctttattatatttatataaaactgcatgacacgtttacaacgccgcaaaatttatttaagcaatttttatccagaaagtgatgtgtctt

SEQ ID NO: 13847 - DNA, 1358 bp, Cannabis sativa
  modified_base (1328)..(1333): a, c, t, g, unknown or other
aaatatctttttatcatgtcacgcgttatgatcataaaacacatctttttataatatcgtgtgttacaaataaaatcataaaacatgatatcctttgatgatatctcatttcataataaaattttagaacatattgcgtagcacatttactacgacattttgtgttgcacatttactacggcatgttgtgcttcacattttccccagaagttattacacggcacataattaattacacctcttaatcgtcttatattcaatattcatattgttaaattttttgttttcacaaaggaaaatcaaacacctgaaacccagatatatgatattacacaaatcctttgtatactaactacacatacatattgcaaaaaaaaacaaaaagaaaactatacatacacatacacgaaatttttttcaaaagaaaaagagaacgagacaacaaaatatgttgagcagtatgataaaatgagatgattcgttaaaataaaacaataaatccaggtgtgattgaagttaaccaatatcaagttttaggaagtgtttggctaattttttttttaaaaaaatacttgagttttaaaaaaaaactaaaatcagaaaacatcaatatgttattttttattttcaaaatcaacttttattttttgtctaacatatttgttttttatagtttctctcacatactcgagtctaggttggagttcgggtctgggttccgagtctgggtcaggtctaagtctggagtccaagtcaagatctgtggtccgagtccgggttcggggtctaggtctcagtttggggttcgggtccgggtatgaggcttgagtcccaggtaaggatgcacataaactccatgggaacggggacccgccccattaggggtggggattccccaacttagcggggattagggccggggacagggcttaattcatgtcccgagttggaggcagggcaggatcgggaaatgtactatccacccctgtatatctcaattatataaaattatatatatttatctactatttgttatgtaaagtagaacctcttcttaagaatagtcttttcaagaataatttttaaattataattagttatacattttggatagagactttttaagttttgtatatagacagatagtaaatgaaccgaaatgaatgcatatttttttcattaattatttaaaataataaaaaatataagaaaataaataaatatttataaatttattaaaaaaattaaaaaataaagagataattaaagaaaaaataaataggagaaaatgacataattgttataaaataatataaaatagatgagannnnnnaagaagaagatgaagagagaaagag

SEQ ID NO: 13848 - DNA, 7143 bp, Cannabis sativa
atgttttttaaaaatattttcacttttctacttttaaaaacagaaaactgattaaaaagtgttaccaaacaccaccataactttttttaaaagtgattttagctttttaagaagctccccaaacgggacctttgtctctctctctctctcttttttttaaaaaaaaaaaattgaaacttgtttccttcttcaatgaaaattcccatttcctaaggaaaatatgaaaaatattaggactgaagtgccaaaagaaaaacaaattaaggactcaagtgcaataatactaaatgatcagacacaaaccgcccactatatttacatagagaaaggcttccaagtccaccgcaaatctcatttgttccattacaagtttacagcgatacttttctttttctctcttccgatttaccttctcacttctcacaccgtccgtacatcaatggctaccgaagcggagaaggcaagcgaccatactccttccattgaaccccttaccaagaccgccgacccactacccccactacaagatcccaaactcgatgatgtccccgaaaaggagcttgacgatggctccaagccttatccagctgactcctccgccgccgagaacgctactgcgcctcccttctccgatatcgagaagaagatccggagagccgagcgttttgggataactgtgcaactatctgaggtagagaggcgcaactctcgagctgaaaggtactcttcttttatcgttagttttttttttttttttttcatttagggtttttatgttcttctttattcctctttggttttcttccaagaaattgacttgaaagataattacatttagtgcagtgggagcttgggcttaagatgacatcccttagaattttcaagattttcatgaatttgttgttttctacgggagttagggtttataagcttttgttatcgtgactgtatttttttttattcattgtgttggatgagaaagtagtgaaaatgataacgaaaataagtctcatgctttactcgtttaagatttatttcatgcttaaacctttattttaggatttttcgtgtacttaatagaattcttggtgaccatatgggttatggttttctagggttgcttacatgctgaaattagcgagaaaatatagttgattttttgtacaaggattcgtagagatattgctgggtggtatagcaggttttgttgggctatgagctttaatggggaacgttacttcctagatatggacaagctggcaatgtccttgatttattggcctcttccacagttttacttcccctttccttgagagaaaattcaaacatttgttgatctttttgcaggtttggcactgtcgcaggctctgcttccccaaccccatctgctgccgctggatcagaggtgtcgaagaaatcggaggagcttaaaagaaaagctagagcagagaggttcttttcaatctttttcaagacacctgtagttgttatatgtcgtactatctaataaccttcttaacaatttttttctagctgtataactgtaatgcttgttttattttctatattattcaggtttggcattcctagtccgacagtaacttctgatgaggagagcaagaagaaggtaacttctgaccaggaggccaagaaaaaagctcgccttgcaaggtttgcacctgcctccaaaactgaccctatagaagacgacaaaagaaaagcaagggctctcaggtgaggatatctgctagctatgtctccaaagtaccatttagataattttgtaatagaggatgtgtttattatatttatttgtgattattgattttaaaaaaggttctatgtttttatgttgtcaggttttcaaccaccccatcaaattctgttcctcaagtgaatggaaagtccaacattgagaaggtcaggtttctttaatttgtggtgttgatgcaaacttatgttgtgaagtcaaagccaatactgtgatgttttttacttttgttatatgcttagagagtgctgatattttcttatttccactgcagagtgcagctattgctggcgaggctgggggagattgaacatcaatatcttccttagatagtaagatgacttgttcattgcaagttttggtagttagtgaccctagtctatgggttatctaatcttattgtcactacgtatgtaactggattttatcagctttgttttaattaaattttgtttctttatgacaggtctaggtcctaacagtctggattccctcatttttttctcgtttactatgtgtcttgtctgcttcccgttatatggatactcatgtgcagcctttccgttgttggataccttcaccaaagtaaatttaacaggatctcggccgcaataggagttttctctcagttgaatatgcctgtcacttttacccagtgaggtcttgaatttagtaacacctacataaagttagcttatcttgcaatctattaagaatatcagaaattcagaaattaacagtaggacaagttgtgtcaattttagctactattttggttagcttactctttatttttggttcacctcattcatattattcacgtgcatatcatcttcggcaacatgtcagtgcttcatagttcatttagattcatatccatgatgctgtgtggtgaatgatattgctaagtttgctttggttgcagttgatcaaagaatatatatgtcctgaggtttactggattgcttcaattaggtgtttcatgttgctagtttagttaccctttatcaatttggtggagtaaaaaaaaagctcagtttttactttaattagaagcaattttcttgcttccttgcatccttgcattgttcatgctatctcctcaaattttctaactgtttaagaatgagtcaatccatcttataaaccctcttactctcaatctagtaggaaaaggttttaaaaaacaaagagaaaaaaggaagacatggaaaagcaggaaaaaatatcacattgtttctggtaagaccaaagagtatacaaggctgtaccattatgttgactgatatatgtctgaaggttgtgctaacaagaactgactattattattatgttattattaatatttttatttttactattatagtgttgatgtgcatttcatttgtttcatttgcatagatgccatttcaaattgtattagaaaaaaaattgctttgccatgatacaagcatgtcaaaattggtttggctggctaatgtgtttgtcagatgaaataacctgtttgaacttattattggcatttgtttgaatctttttgtgctttggtagttgttagttatggaatttctgatagtcttagttggttagttgggataagtgaactctttggaggtgttggttacttttctcggcttactgggtgaattattcaaatcttgaaagacaggagagttgaattcaattatggtatatctaagctgagttgattttgtagttttttttttatttgtatatgaagatttcttcattgcagaatttcacaaatatataccgttctgtatcagaattcttgtgttattcttttatatcatgtaatgggtgaaaagaccagactactttaatgtgagggaatgaaacattaaactttattctactgccttttatttgtctttgtttttcatgcctctgtgatgtgactaattcatccagtggtcctgaatttttcacactgccataggtaataacttttttttttttttttggtaacttatgattcgaatttgggtgaaagaaagctcaaagcattatatgtacatgctaatgttaaaaaacaataaaaatataaataaactttattttaataatgtaatctttttttctatatgtttcttatttttatttcaatataattttatatatttccttctattattttttttaggctaattataattttttcttttcaaattttaatatgtattaaattatgtcttttgaattttttttgctattaaaaatttcttactattgagattgttttgtctaatttcattcaatatactgttttagtgattatttatatattaaattatgctctccaaactttgatatataccaaatcatgtttatcaaattttaatatgtattaaatcatgcctatgaacttttatccatactagaatttttttattaaaattagacaattaaatctaacaatttcaataatttaggagaatttttaacggcagaaaaaatttaaggggtatgatttgatacatgttcagagaaaaaattctaattagtctttctttaaatactattaaaaattaatataaattaaaaatatatattttatatgaaataaaaataataaaattgctagtatagtttcttaggtacaattataactaaaaataaaagagagttgataaaaggctattggtgccactctctttgttgtcataccgcctagggtatggaagatgttggcactttgtccaataatattaaattttattttaatggctagatttaaagataaactacggtagcaaatttgatactctttggctaaacttttcatttttacctctttctaaaattcaacatttatagtaacttcatttttagtggattttcgttctttatggatctgaattttaggaaaattttactacctcacattgttatgtagattcaacaaatgtattatttgagcttaaattaatctagtttttgtatttgtgctctaaaacataaggtgcaaattaattataatagtttgttattcaaatttttattgacgtggcatccacttaggtgacacgtgacagaatttatcacctgggtagaagattcttctcctgataaactgtgtaggaagatttaatacttgaagtcatagaaagaagttggaatattcgagcagagcatgcaaggacacccgaccagcttccatcaagaaggaaacttgcatatctaaactagggaatgcgagttagacaattttagagatttatcctcaagtttgtaaggcacgacactatccctaaatccatgagataaattcctagtattgaagtagaaaggaaacctacctagtttcctattctaattattgtaattatagaaagtaattagatttctcattttgttctttattgattttgagaaaccaatttaatgcaatcaattcctataaatagtgcactcatctcactgttcagggatacgaaattcattctgagaaaacacacaagaaaaatctagattcaatagtgaaatactcagagatcatggtaagaactttagagagagatcaaggctttcttgttcatctactcacaagttaatacaactaaatgggagtaggctattaccatcatcaagggatcaaacctctataattttggtattttctttactctatattattcatatttgttatatcaattatgctttaatcactttaatttgactcactgtcgttggctaaaattgtgctttcattgagagcaaagaaatacaagtctttgttttaagtctttttcaggacacaagatggttgtagaaacacggaggggaaatcaaaatgacactacgaatccaatggttacagatttaaacgtacagacacatgccgatcccagagatcaagttaggacggactccaatccgactaatccttaggcacccacaggtccacaaatagtagggcaaggagtgactacccctctggctagtttcacttcgggcgtgcaagaaactgaaaccactagtacttggaccgagcagactgctcctagtactagaatcccgtctgctaaaaatactcaaaagtcaattggtgatgacaccaaactccagaattctcaagctacattagagcaaatacaaggccataacaacactcttcattacaattaacaagatactcaagcagctataaatcttgcttttgctgaacaaagatgccattttgaagagtggagggattgagagtttcaatcacttgttacatgatagaactttcaaagaccaaacatgaaatgaaaacttcttcttttattcagatacttcctaaactgaggcatacatggaaattgaatactaatataaaaagtaaagaaaacaaaaaggaacctgaccactcacagtttactgatagtatctgtgaggtggtcagcattccatgatcttggagttcttgttccatttagtctttttaaatggtaggttccatcactaattttgtctataacttcatatgcaccttcccagtttggtcttaagacctccactctgggctcctaagaggctggaaatgcccttctcaaaataaggtcgccaatttcaaatcttttacttttgactttagagttaaaattcctagcaattttgtttttgtacatctggagttagacatgtgattactctcgaatttgtaaatcaacaatcatagcctcgtgctaagcttcattgttggaagctttgaactcaaaacaaaatccacttttgagttggaggttttgtggagagattaaaattattccgaccccggaaccgttttatgtttgatgctccgtctacatatatcttccagacttctctctttgggactgacgtttcaggatcgtcatttatccatgtgcactccacaatgaagtcatctaaggcttgacctttcattaaaattctcggctgatgttgtatatcaaattggctcaatttcattgcccacttcaagagtcttcctgacaactctgatttctgtaccacttgacggagagggtggttggtaagtaccctaatggcgtgagcctaaaagtatgatcttatcttatgagaagcaattcgtaagcaaaaagaaagcttctggatcataggatatttggactccgagcccaatagtcttttgcttacgtaatatactaaaagttgtacctttccttcttctcgtactaaggtgacacttatagatgatctgacactgccaggtacaggaaaaatgattctccattaattggtttagacagtactgggtcctgttgggaatattttaccaggatctagatttactaacaggtatgttgaattaacatcctaaatatgaatatctctaaaacaataaaaataaacacataagagtt

SEQ ID NO: 13849 - DNA, 9091 bp, Cannabis sativa
cccggtgtcctccttacctgacaatatattttgtaacgaccgagaggtctaactcttgatttatgatataaacgctttttctcaacagaagagtattaatattaatatattatatatcattttttaagaaaataaataagtaataaatattttaggattgacttttttattagaattagttagaaatattttctttaattagtaaataacttgttttttattagtaaagtaaacaaccggttgtttttttctcaattaataattaattaaaaaataagcaataaatatcattggattgatttttattaaagttatatagattgaattaatatctattataaattattgatttttatacgtcattaattaataattataaatgatttttttttcataattaattaataataactgcttttttttttaaaaaaaaaaagaacgtaaaaaaaattaatatataggaaacaaacactcttttactatttatttttctcaatgcaaaatgaagtatagagttagcacatataatatagaaaataaaacataattaactaaacaaaaaattacaaactaataaaaaaatatttttgattcttatatatacaacttgtgaataaatattatcccctaaacgtagctatataagaagaatattatttatatatataaaaattaacattaattttttttttattattaattgcaagatttcttccttacttcattttattaacacaaaataatatttttataaaaaaatcaatatattttaaggaataattttccgaacaaggaaatttgactgtttctaataaaaaaaaaaatccaatcaagatattatttggacaaaaattatttacacgatttttttgtaaaagacctttttattataaaatgcactttactaaaaacgacatgccgttttactaaaaacggtgtcgtttacgaaacaaacgacaaatggaatttccattacatatttggtcaactcaacactataaaatctccgaagaaaaatcaaatttatataatgaaaaaacaaatctaagctaacaaaaacatactacacacagaaaaattcaaagaagttgaactggaaaaaatggtgagctcaagggctttctgtgctatcggaaccctagctttactctttctctcttcggtttccgccgatgatgtcgttgttcttaccgatagtaattttgagaaggaggtcggccaagatcgcgccgctctcgttgagttttacgctccttggtacgtcatatttcccctttttttgtttgattttagatgttatgaccaagaaatgatttttatttcaagtttctcttagtatctttgtgtttgcgtgtagtgtggtgtatgatgatagctagtgattgaatatgtttgatttgatctgttttgattggatctattgtaactggagctgtgaaattagatctatttatggcaccgatcgaagcaagaaaattatgctaattttgttccattttcgtgataagttgattctgggtagttattccgtacttgtttcgcatcgggttatatacggatttttgataaattcgagatatgttgtaaagagataatgtttgaggagggtcgcattgatagttataactaagtatagtatatactaggatcttgaagttctactataatcagcttcaattttaagggttttagtagtttatgttgatttcattttcacgtggaaggatttgctgtgtgctttattatgattataacctcagtgtggcatttgtgctaattttgattggaatgacaggtgtgggcattgtaaaaaacttgcacctgaatatgagaagcttggagcaagttttaagaaagcaaaatctgttctaattggaaaggtcagttctcatttttgtatccttgttaatatactatatgattaccgtttaattttataagtaaggattttcaggtggttttttatctcatttattgatacgattgttccatatgtcattttattgaattttggttactagttctggatccgttttatttctttctgttaagttatctaatctaatttaagctatcttcctctgtttcatgttcagtacaagtggttactttattgcagtttcttttgtattttagttcatgccattgttttaatttataatgagtatgttttgatgctttgtggtaggtggactgtgatgagcacaagagtgtttgcagtaagtacggtgtttctggatatcccactctccagtggtttccaaaagggtcccttgaacccaaaaagtgagtgcattcctctttccatcacattatagtattttcgtaagttctagttagaaagattgaccgcaatgtcaggctagcagtttgtgaacatattatttatgatatgtgagtgctgaggtctaggttcatcaccaaagtagaaaaaccaacaccaaaacaataataaagatagagattacatattccctgtacttttaatctgcagactgtattagataaagctttttctcttttgctctctttataataataatttttatatattctgattagattttacatgatttaggtatgaaggcccgcgtactgcagaagctcttgcagaatttgtcaacaaggaaggaggtattagtttaattgtattacttacttcacttcaatagctgttttttgagtgacagtgctaatgcaagtgcacttttttatattgattcttttttcacttttggtaaatcaactctaatcttgctttttcaaaataatatcttttgcaaacctgttatacttgataagccctagcaactttcttttgtggaaagtggaatattgaccatgttaatttacaaatatttgtcttcttgtttcgttttagtttttctctggtaccatatatcatacactttctcgatgtttttgtttgttttctggaatttttaatgaactcccaaatcccaaatcccaatttctcttcttttttttttgctggcgggaaactaattctacttgcttttagttacctaatctgtaggtagaaaaatgattaatatttgtgttaatttgcaagcagggaccaatgtgaagatagctgcagtcccatccagtgttgtggtactttcatcagataactttgatgaagttgtccttaacaatgaaaaggacgttctagtggagttctatgcaccttggtgagaaaaagacatatatattatttccagaaaaatatctaatgtgttgttagttagagcaagacagtgaaagagaatcgggtcaaaaagaaaagagaaggttaaaatattaccccataagaattgttacatatcaataattttgagtttttattttttttatttcaggtgcggccactgcaaatcccttgctcctgtaagtataatcccctaaaaatataattttagaactaagtcttttatgctgtacaaaatagcatctctaattatatttgtttttgtctgctgtcttatttatagatttatgagaaggttgcatcagcatttaagttggatgaagatgtagtgattgcaaatcttgatgctgacaaatacagagacttggctgaaaagtgagtaaaattattcatggtatatgtttattagtttataggtagtagtctgttgtataatcttctatcaaaattcatatttagtatcttaaatgagtaaacaagaatgcactctgtcaacattcgcaaaagagaagttgcctgatgtaaacatgttgtattatgcaggtacggaataagtgggtttccaacattgaaatttttccccaaaggcaacaaggctggcgaagattatgacggtggcagagatgtagatgattttgtaacctttattaacgagaaatgtggtactagtagagatggaaaaggacaacttacttccaaagtcagtaagcaatatatggaatctttaagatactacttcatttatattttatcttatttgtttctttgttattacttttttctttatgtaggctggtatagttgaatctttggaaaacaaggtgaaggaatttgtgaaagccagcaatgatgagaagaaggcaatcttcgcaaagatagaggaggaagttgagcagcttaagggttcctctgcaaggttaatgcaaccacttgtgaattgaaactacttgatctatgcccgtttggcactacgggaaatatctatctttaatgtggaagttcttacgctttgccttatactttttttcctcatcaggtatggtaagatctacttgaaagctgccaaaagcagtctggagaaaggtgctgattatgccaagaaagaaattcagcgtcttgaacgcatgcttgaaaaggtatgtatcttgtatgcgtgttttatttttcttgaatctatgtcttctatagtacttgaatctctaatcctgtgtctacacaaagaattggttttctgttaaattcgatttcaagttaaaaaaaaatgtaagtttcgaaaaaaaatagagatataaagtacatgctttgtgagatattagacgacccttttgaaaaataaaataaaaaagtataaataacctcatttgttgaaacacctatctcaacctgcaaacagttttgggctcttgaattacattagacgaccctttttcatttatagtagaacacctacctcaacccacagacattttactggcatattacagcaaggtcatgtctgaaacttacatcagttacctctgcattctgaaagagtaaccacttctatataaccagctagctatcactatagctccagttaccataattgtgcttgttaataattataatgttagtaagaaaaaaggttcataaattttttgtcttctctagtaaaacaaaaaaaaaaacaaagtctgtgcagtagtaccaaaacataaatgtcttgcaacacatttaactgttcttttccccttgtttctgttgtaacagtcaatcagcccagccaaggcagatgagttcactctcaagaagaacattctatcttcctacatctcttctcaatgagtaaacccagtccaaccattaatgatcccttgatcggtgcacgcagggaggtcttttagtagtatcgaattcataaatttctactaagattcttcttctaatcttgcttgagagagaatataatgttttccttgtacacccttcatgcaaatcagttactaatctttttgtcttttcaagtggaacttatttttttggattaacaaaggcaaaacatgaggattgatatagttataaaataattcttgttcttcttcttcttcttctataatttaccttgttcttatagaatagaacctgtaaaaattttaaggtacctaggattctcttcactgcaagatatcacatgatcacaattcacaaccacccttataataacatatatcattgagaaagtggtgctcactcactgttaggcccacaatggcagagtaggactgaaattactgtagactttgttgaagattcatgtgggcattattcgttaatgggaaacagacaatgagattctatccatatatctgaagctactgcttcattagatgtgactctatatataaaaaaagaaaactaaaacttcatggggttctgttttctgctacaaatttatgagacacttcagcttgtcctttttttttttttttttcccatacttgattatggtaagttactcattcacagttatacatatagataaaggcaagcaataaattattaaacctttttaatttctggtttctatataccactacagttatttattgatgaatttatggcagaagtgatatctggtgggttgtgatttttactttacctaccaaaatgtgaaaattaagtggctgtaccggaaaagttattatgtttgatctatatatgtattactttaaaaataacacgaaataatttaaaccggttgtagttcaaaagaaaagagttaactaaatgtgtgatcatgtaatatataattaaattaaatttacttagtggcaaagggcctactgttttaccttcagtttagaggttcgattcttgtttatcttattttttaaaattttatagagaataaattaaaaaaaaaacagtgttcggaaatcaaaccaaggtgagcagcagccaagagaacttcaaatgaatgaactattttttcggggcctcggttgggtaggggccctaggcgcgtgcaactctggctatccttaaaatcgactctggtgtgtatgtatagtgagaacttgattctttttttttttaatgattgaaaggattatgttcatggttttgaggtttacattttacactcatttgtttagtctcatatatagttaattactcattgcatggttatgggaccaaaagaggaaaatggatatatttttttggctgaattgggtgaaactgaattaaaaatgaaaattgatttagtggactatagtgtgtgtggagatataactatatgttgttataacttttgagcaagaacttggaagtttacattgagagtgatagaacaatgtgttagaatcttgaaacatattctctcctgtaaagttggtgatttggataaataaatgaaatatataaatatgaggctacataaacaataatggagatatatatatggggaccatgtataattttctctaggctaaaataacttattaacaagtccccaccacaattgcagattgatggagtaagggtccctcttattgttgttggatagtagaattagtcaacaacaaagttcaccaaacttaaagaaaaaacatcaaacaataatttttagtatttcggtagactatctatctcttttggtatttaggagaatttttaagtttaatttttgagtaatttgcagcgtaaataattaagtttaactcttggttatagataaatacttaaatttaatttttatttttatttaagttaatttttaaataaaaagtaaaaatttaattgtccaataaaagactgtcacgtgacaatttagttgacacttaacaaagtatttacaacgctaaaaattaaagttaagtatttatttgtaactgagagtttaacttaagtatttattttacaaattacttttaattttttttattattattttttttaatggtgtatgttgtaattatttttagttgataaattattctaattttttaaaaaatgtataagtgacccaaaacaatttataaaatcataataagaaaatgtatacaatcataacaactacaaataccctaaccatagtactatagacatttccaataatagttactttcttgaattttatatttcttgagaatgattatgaaaaagaatgtcgaggagtgaggaataatatattaattaccaattgtttcaactttgaagctttctatttcaattttttgtcttgttaatttgttttttattttattttttttacatggtgaaagaatttaatgagtgaaacacgtaattccagttataaaaggaaaaggggaaaaaagtgaaaacatcaatgaaagagacaaaacaacaatataatttatttattttttgactgcaaagtagaacaaaaatcaccttcacaatatcaaatctcaatctaataataactttatttttttggtacaatttaataataacttcttcctatcaaatctaaggataaaatataacatataagataagattttatccaaactttacaaaaataaaaaaaataaaaaattctatctcaatcttcttcgttaattggttgcgattgtgaaatgatggctataactttaaactaagtgattatataaagaattattcttttaaaaaaagtgattatataaagaagtttctaattcctcttacacgtgttaaacacaataattacaatgctaattttcatttatcttttagaattgctaagatggcatccatttttaatattttttaattaatatttactattagaatgaaaaataatgtaataaaagaatattatacaatagcatttattatatttttattattattattttattataagtaataaaattagtttatttaatatatattaaataataatatataattattttaataatttttaaagatgtttactattaaattattttagaacaaaatgtggcaaaaataatatagaagagagacaaaataaaataatatatttttaagtgatgtggaaattttttacactcttaaagaatgttattattagtgtctaacacatttcttggtattatagcgctattggtgtaataaaatatcgagtcctatataacttaataaaatgacttttagagaatatggctaactaattataaagtgtcatatataaaaaatactagacactattgatgctcaataaaaatactgtttaatatttttttttcgacacttaatagtatcgtatataattggatagtaacatactacatacatattacaatactatatttactatccaacaacaattattattataattattatttttgaataacaagaaaaaattatgtattgtaacaaattaaaactacacaaaaaatattttagtataatctcaaaaggatcattttcgtatactcgatatttagtatatctataatttttttaagattgcatcactaatttagaacgccattgaagttgctattaaatctactttagttctaggcaaaatcattataatccttatctaagcatctcttcttttatctttgatttttttacgaatcatatgaaaagtttaattatatttcctctctatatatatgtgtaaaaataaaaacctatggtgcaaatcatacctaagaaaaaaaaaatagttaataaagcacaagagcattgaataaataaataaataataaattgcgatataagtacctaaagttctaagtttataaatgatataaactcaatatttatttttagtgtgataaatatcctatatttataaaactgtaattttttttttttaattttatcagtacaaattctgttattttcataaacaagtcactagggctgtacatcggtcggtttagtcggttt

SEQ ID NO: 13850 - DNA, 4281 bp, Cannabis sativa
tagtatgcataaataatcaaatttcctattataaatcatacattaacggcaaaaaaagtattgtcctcctcagtcattttgagtcaagttttcgagattatatgtatttatctattttattggttgtctaaaaagatatcggcatttcttccaaattttgaaaattaaagttgtctagctgtaatgttggcttgtcgaacgttaatatctgcaaagcatgaaaagaaaatcatctttttatactgacttacatcactattcaatcaaagtgtaggacatagagaaaaatggataacttattgattaaataaaatttcaactaaatggctgggtgacaacaaaatcactacaatgaggccagaatatatttccctatctaaatgaagggtctgatgtatgtttcccaaatgtgatacaataagtgatagagtagttgaaacatgaagcaataatatactaaaccaaaacgaaatgaatataatttaataaaaacttgagcatggtagttagtgttttgtaggccttaagttgggtcatgcaataagccttctctcatcattaccaactcatttccttgtgtaattagttaatttctttcctctaaatctttttaaaatcaatcgataaatatatcattattattcctttagggaaacaaatactactcgatcttaggactactactcattcatgtacaatcaatcaaaagcatcatcatacttctaaggaaacgacataagatcgagtttatactttttcaggcttttccaacaagttggagaagacttgtcatttttccttttacatctatattgggaacaactggattttcttttacaaatttgtttacgtatagtacttttccatttctagtccaaagttatagagtagttgaaacatgtaagaatatagaaatcccaagcgagcgaaaaacttcaaggtagttaaggttacaaacgccacactcttaggtcatgcaatatgctctcattcattataactaacttaatatatatttatatacttttttataatgaattctttcctcctaaaatatttgcttatataatcttccataacaagaaaagttagatataataataatattagttattgtatatgaaaatttctccttctttcatgcttaggctgcagttcacctaccgatataagtagctcccaacctcaaaaaaagaaaaaaaacttataaaagggtctaaagttgttttatttttattgttattgttattttagtttctttcttattggatgagatgggtactttggtatgaggtggggggagctgtcttagcttaaacttggtgcaactatatcagtttctgtcacctgatcagtttgtatggagattttcctttgtattttctgctgccttgtagttttgcttcttccaccctgcttatgttttttcatatgaatacttaaattcagtcaaaagtgttaagcatatttatcttgagaacaacacaaggcattgctatctctcttggtacttgtgagtgtcataataagattagcattttagtaataaagaaaagaagaagaaaaagaaaaagggattctttagattttgaagtgtttgcatttttctcaattattttgcaggtaatatggacctgataatgcagtatctgatggagagggttagagctctagtgggctcgaaaggatgggattattgtgttctctggaaactaagtgaagatcaaaggttagagaaattgtccatgactaactaaattaaatgatacgtgtctgtgtgtctattttcatgttactttttgggatttgttataggtttattgagtggatgagatgctgttgtgctgggactgaaagcacacaaaatggtggagaagaagagctgatttttccagtttctccagtccttccatgcagggataccatatgtcaacacccaagagttaattcctgtgaacttcttgcccaattgccaacttcaatgccttcagattcagggtactaaccatttcttttgtttagctttttactataaatgattttttttttctggtatttatgttatgaatcctaaaactatacttaacacaaggttatgaacagaatttatgcacaaaccttggtctccaatcaaccaagctggttaaacttttcaactgtcacatgctcacatgctctcgaggtaagttgtttttgaaactaaacccttctctaattttcaaccattttctaaaagctatattaacttgcaggaatctattgggaccagggttttgattccattgccagttgcattggtagagctttttgtgaataaacaggtatgagtattgtcttttcaaataatcattttctcttgtcttcactccaagtaagtattataatagagtttcttttgacagatatcagaagatcagaatgtggtagacttcatcacaactcaatacaatattttgatggagcaggaagccctgattaacacaaacaatatggacacaagcttttgtgtcaacattaatgtaatgaatgaaagccaatcaaggccattttcgggcaatgaaactgacaaaatggattccaacaataatctgccggcacctaattccacagcatttgagaacctgaacatgtcttatgatgtatctgttgatcgaactcgtctatgcaattccccaatgagcttgcagcaatttggttacaattctgaaagtaggaccaggaacgatgctgcctttcctgaatgttctcatgatccatcggtacatccagataagcatttggattcttcaatggatgccatgcagccatccatgatgaatgacacaaccaatacacatatgcaatttatggaacaagtaacagaaaacaaggagcagcatggtaatgaaaaggactcgaacaaacaggaagaaggaagatcaaattcagtctcggattgtagtgatcagattgatgatgaggataatggaaagtataggagaaaatcaggaaaatcagatcagtgcaagaacctttttgctgagagaagaagaaggaagaagcttaatgaaaggctctatactcttcggtctttggttcccaaaatttctaaggtaacagatatttaatgctttttttaattggaactagtagttgtaaaatctaaggtcttcatctcatttttgttccacagttggacagagcctccatacttggggatgcaattgagtatgtaaaagacttacagagtcaggcaaaagagcttcaagatgagctagaggagcaatcagacaatgatggcctaaactccaacattaatggtaaaagaaacaatgttctgtctgagactttgagtcgcgacgacactaatttcaggtctaggcctgagcatgaaaaagttcaaaatgaatttcatttggaaacatcaaggagtggaagcatctcaaagcagaaccaagactcagatacaactaatgacaaggcaccacagatggaggtaacataagttcttctactcttcttaacgttctgatatatttgtgttttaagcttcataataacatgtttgaaacaaatttagccgcaagtggaagtggctcaaatagatggaaatgagttctttgtgaaggtattctgtgagcacaagcctggaagatttgtgagattgatggaggctttgaattctctagctcttgaagtaactaatgccaacgttactacatttcgaaaccttgtttccaatgttcttaaagtagaggtagaatgcttctaatcaattttttttttcttagcaagatctttcacatctacatatataaactactatttgttgcttaaaatttttggattcagaagaaggacagtaaaatagtagtccaagctgatcacttgagagacttcttgctggagctgacaaggaatccttctagaggtttgtctgagatgtctaaagtttcagataatagcagcagcattgactatcagcaccatcttcacaaccagccctcttattgatttcataattaagttacagttcttcaaatgagataagaactcaattcacttcaagcttaaaaacataatgttttaaatggaagcaggatttctactgaataatctattaattttcaatatgtcatatatatttagtactctagtgtaactcagcaaagtgtatcagatttgatgctgagaatctgtttttgtttggtccacagaaatagaaaaagcacattatatgtttaaatgcttagtgtgccacttgtgctctttgctaataatcttgatcattacacaaaaatt

SEQ ID NO: 13851 - DNA, 2013 bp, Cannabis sativa
ggttcacagtttcaaccaccggagttgttccagttgccaaacttattctttatgaggcattacatgcacttagtttgtgattttataactaaacatcacacaggaatattagtcctcaatttgaactttatattgaagcttttagatccttatgttctatatttaaaatttatgtacaataagctcagaaaatattacaaaaattgatgtttagtctttgaaaaatctagacttacaatgggtcttcaattacatcctttttttcttcaacatatcttattttgttcgtacaagttcaaggggcaaagtctccattgctgtctggagtatacaaagaacagttaggatgccgaaatgttaccaattgatttcatttatttaagataactcttactattttaaaaataatgttatctgtgtaatgttttagtgtatattttgtgtgtatatatcatcgatacactgatatgatgcttacccacaatcttggagttctgggatcagactttgagtgtaatttggagagctctgactgaaaggttatgactattgaagctttgaactcaactgagaatggactgcagaagtgattcaatccgaaattagccaatacttattatgttaaacatgaaaacagagctcacatgagatggtaaaataagatgcatcgcaaatttgcaagttacgttattgaagcaaagtttgagaaaaatacgcgagcctaacttacatgaacagaaggcgtgttgcatgttgcgattgataaagtgaagttcgtaaaaaaaaaaaaagaaacaaattaagaacaatatgcatatttggcaacctattagttaatagtaacttaccctgctaagattgttggacatgttaaaaggcggggaagtaaaacgtaaatgggcaaagtcagattccggcatacatctccgtctgctatctaaaaagaaacaaaaacatatattcagttatatgtgatttcagaatatatgtgatttcagtttaagttcctttgaagaaagtgttgcatacctgagtagtccgaataagagatgtttcggtaataattttttcaccaagaagaattgactctacacgaagcaactgtatatcaatggatttaatgggaactgcagatgattccactgttagttcaccagtaatggcatctgacaaagaacactgagtagacattcttccagtcacccgaaatccacctgttaagtgcgaccacttgtcagcggtgcggtaggattatctacttaaaattttttataacaaatatgaactacctattcttacaagatgaaacataatatgatggaggtaagaaacaaaccagattttaattcgggaagaagcgggtgtctttgagtgtcttgagtaacgtaaaagattaccatctcaggagcaactggtcctgctagaagatcatctaacaaagtttccgaaaaaaaaaggatctttcagttatttggatgaaaacaaattatcaagatgaaaaaattaaatcataagtgcagccaaaaactacctttgtcactttcaataatgaactctgctgttgtagataatgatttatgaaggtatcctctcatcaaatctgcagttaataaatactttaaaagattttttagtcgtcattaattaatgaggtaaaacagtgaagaattgcacttctcaatattcacctgaatgctaatatcggcgccatggaaggtctcgtagaatctttctaagttcttttctcctgccttcttgaggtacagagaaaatggtatctgccattgagatgtacaacgaacaacataaataatatgaggagaatttacaatcaactcgaaacagcatcaagtttatgaaaggaatggggagtttgcagccaccgtgattttagtatctattaaagaaaggtgagaataaatgcaatgacatcaagatcaagtacgttggtttaaaacaagatgcgacgaaccaaatatcatacaaagaaatgttatttcttgctaactacaa

SEQ ID NO: 13852 - DNA, 3975 bp, Cannabis sativa
agtgtatacttgttttgtttttacaaagtgtttcatcttttaaactaagtttgggttttttacatatatgctgctgtacttaatcaatcttactatagggtttgattatgcctgtagtcacgatcagttatatctatctctatataatggggaagcaacgtagttgtcttatttggtcgattaaagacgacacatgtaagtatttgcttcagtaatttgaatagccttttccgaacaggccaaaagtttgaatagcaacaaggtaaaaattgacaatcccttaattaaagacaaggctacaagagttaaaaaaaccattctaaatatgtatattttgtattaacatggcgtgttgtcaatcatcaaacgcagttacttaaacatgagtaaatatcaccgcatgccatttataatgttgacaaatctagtcaaactaaatactttacaacacaaggaaatttcctccacaagcctctctatgcattttctatatatctgttgcctaaactcagaaaatataacttttatagagaacaagtgacatttaatcaatttggagcaacaagtgacacaacgcccattgatgtacttaccctgaaggagagaaatatcacatagatcattatgagaccaactcctaacatcttactggggcgcatattattcctgggaagcacaacgagtgcccaaataagccccatcataagaaatcccattgtgaaaaacaaactactatctcttggaactatgtatgatccaggtctcttgttcaaggctccgagcaacagtgagatccctaaaccagctagagtgttgaacataggaccagcatagcatcctgacattgctatctgtacaccatctcctccattaattgcaagtgcagtatttgacattagatcacccattgagtttccccatgccaagacagtcaatccaaggattgaagggttaattccaaaaattacacccaaggccaccagcaaagcgacaagctcattagcaacaatgtagaaccagacaatgctcataaagaatccgccaaaaacccatggaaataaaaacctacgcgggggctgatcagctctggtgtgtagatatgcaagcacaccaaatatgccaccaagaacagcacctgtgacatatgcaatatctctactcaggtttccaatattttcttgggtgctccataacaaagccagaagaaggggtgctaatgaagcactggcaacagcatatccttttgaccatcgctcttcctcaacaacaggaattgtcaatcgccttgggattgtcaatggcattgacaggataaataataacttggaacaagaaagtttcttctcatttacaacttcctcctcttcattccatccccacaaagaccttggactatctggattagccctaatagcctgatttgaataaattgcaacatttgaagcccacatccactgtggcaacttattaggaagatgtggtacatcactttcagcattggattcaagtagtgaagcatatacagagtcatcctcttcacttccatcggaaaatatacttcctctgacaggaagcaatggtgttacagcatccagtcttaatttccgagcatgttttctcaaaagctcattggcagcaacaacaaatgcataaaccacataaatggaaataaaaactattgctcccgcaacagaaactttgccaaccatcaagatgatggcaagcgacaaaagtgtaagtagaaagaaacaaatgtctctgatgaagcatttcttatcaatttgaacccctttctctgccacacaaagagatatgatacccacgactatacaagtaacgaaaacagcaccacccaagacactattaaggcctacttctccagcatcctttccaacaaacgaagcaatgctagcaaacacatcaggagctccattcccaagtggaagcagagaaactccggccacagttgccggcaacttcagcagacaggagagcttttctaaagaacaacaaaaatagtcagctgccgtatttcccagcaggtagaacaaagcagccatccaaatcatcaacacaccatatcctaaaatgctaaatttttcacaatcacaataaaagaaagcaatgtaattgaaaaaaccccctgaagtacattctggatgggcagtcaagtattcacagtggctaccataacctttgtgatttaacaagccagcacacaatttgatatcactgagcaatagagcattggtatctgatgcattgctggcgacactgtaattcgacgaagctccctcaacttgggaaattctcctacgtataacctcataccggccaccctgatcgtgtaaaccacctcctctgaagctccgttgagaaggaaaagaggaatacgagttacccagaaaattaatcggggtgaaactgtcatgcgtatagaataagaaaaacaacgcaagagcacaaatgccattgaagaccccacgaactcgagaattcatgacacccaaaatcattttcagcccaatcccggcactcagccgccggcccctctctccagccctaaatttcttgaactgattggaaactcaagttggtcgagaatcaagaaccgcggagtaataaatagccagaaattgaaaccctagtaccaaaatatccttagcttttcaaaatcaaaattcgaaattcgagagggacaactgaaaaatttggttggttgtgcccaaaaatgatcacgagagggccaaattgaaaagatatcagcacaagtcgtgttgtgtaagtaccttgaaagagaaagaagaaaacaaaagaggagctgcttctgggtagcttcttcaatttgcttttgtttgttttgaactgccattacccgtccaacaattctaaattggtaatcaccaactatctgaaacagacctaacactacatacaaaataaataaatataacagaatattatctctattcaattcgaaagatatgtaaatttttgttgcagaaaaaacaaaattaatcaaaaggaaagagaagagaactgaccaagtacgtgatccagggccgtagcttttgagatgagagttctacacagtcacacatcttctgcttcttcttccgctccggctccacaggcagaaaacaaaaccttttaagctttagaaattctgagactaaagacgagctatgacaaaatccccaattttggagaagaacttctcaattaagaaacggcttcgttcacgtcgattgtataataatgtagatgtagtaaataaaaggctaatttcatatttgaccgtcacactttaatttgttattgggctagaaacgacaccgttttaataagaaagaagagaatgaaacgacgtcgttagtggaaagtgaaagaaaagggtatagtgagccgagaagagcgcgaaaatgaatcggagcgggagtggtaacggagaaggcttgaaaaaggggacgaattagcagagtgaccagaagagacgagagaatcttcgaagctgtcgttggaagatgatgaagaagtctccattgccattgcagagctcatcgagtcggaggaacgacaaccatatttacggcaaagaagctctggtgaagctcttgcgctggcatttcggatatgcggattttagaggcaagcaattggacgccattcaagctattttgtcaggtctgtaattcactgttcctcattcacatgcgtgcttaaccttttcctatttattgtggaattttggtacccatattatgttttctctttacctactgtagtatttgtaacatgatgatgatgatatatggtactcacccagaaagtagtttagtgaataatgatatggtttttataaattttttgaaatgtgaacttttttcttttacattgatattgtagggagagattgcttctgtctgatgccaactggagggggaaaatccatgtgttatcaaatccctgcactgg

SEQ ID NO: 13853 - DNA, 5613 bp, Cannabis sativa
taataataataattatgccacaaatccaatttctcagaccaattaatcacatgtacgtatcagccataattcttttcttcttaactaatcatcattctaacatgtttttctttacaacttggtgacaattatggcatggttttcaacaagtaacgaatccaatgacacaacatatttataacactaagctcttgttgtttacattcccagttgacattatcaccaacatcaataataacgaggaacaatctacattagttgactaaattaagtaattaactccttactttcacaatgctgatgttatttttcacctgagaacaaattgtcatttccatgaagttaaggaaaaaagaatgaaaaaaactatgtacagatacattacatagattagaggaacctttttctagctcattggctttcggtgtcgcctgagcaacgcttgttccaaacaaccgagccagctttccgctcccctctcttccttttacttctggggaaatggacatcagaagctagacacgatttcagagttgattgctcgtgaggagcaatgccattcaacaccgggtcaggttgttctgatggtggaattgaactagaaggattcatgggttcttgtttacatattaaaagtggttcaagttttggccttaggaaagtgcttctctctccttccgctgcctcttcatgtatcaggacgttatccacaatctgcatattacgacaatgtaagacacaaatggctggtgaatgtggttgagaaaggtaaattagtcctagtttcgatattggctagggggaaacaaattaaacaaatggagttgagttcagctgctaatgatatggttcactatcagcaagacttaattagtgtcccttcaaatctatatgtgacactgccaaagatgcatggataagagtttggtgcatgctgttgatactttcccaaaatttgagtttgttgtgttgtttatcgagttaaaaaaacttagacataaagaaatgagactaaaggattgataaggtatgtaacacttacatcttcacttgagtctccaaattgtggctgatgaagggtgacatcagcagaagacagcagtcctacagtgctttcaataatatcaggaacagagacagcttctccgaaacttgacacaacactttcgggaagaactagatcgccaatatcatagtccgttatatgttggttttcagtgtacataggcccagcagatactgcatctgcattgccagtagaaaatgcaggactgtgagctgagctggtctgaacatctaaaggtgcaagaaggctcaagttctctgatgaagagaacttaggagcattcttggacatcaccgtgtctatttgacccttcaacttctgaacccaagcgtgcactttctcaatattagaaagaacttgctccatggaagcatcactatctctgaactcaaacgatgcccaatcatcactggtaccaagtttgtcattgcaatcaacattctgctcagtggtcactgcctcatagaaagactaatttaaatgagaaatacttgaacaatactgactagtgactaatattgaaaaataataggaaatgttgatgcatgataaaatgtaaaaattggaaaatcagaaataatttttttatttataataaaggtcttttgataggatacagataataatactttcagaacttgaatattagaaaaatattacctgcattaccgaattcttcagccaaagagctgctatcaggatctgacctcttattttctgcatcaagtcacaaaggggagtcataaattgggggggaaagtaaaagaggggaataaaaaaaattaaaagtattgaaaccattgtataagtcttaccaagataagagaaaagattatgttgtgacatgtatgatgttgcatcagtgtcttcaactttcttccgcttcctcctcttcatagcctttcttctgccatatggacgcgaatatggcaatgactttgaacaaaacccatctgtcgtcgtaatttgttctgatcccaaatgtttaccctcatcatatgctgcaagatctcttgcatactttgacacttgagaatcaatttctttgatccttaattccgtccatttgcaacgccacatcacagggcgtatgaagctcctccaatgatttgtcaatttcttcttcctgaaaaggtaaccaattgagatgagtatatcaagaatgagaagttcaccataatcatgtgagacaaacaatattgacacacctcatatgaaatacgctaccaaatgcattaaatgaagatccaaatccattatctccgaaaaattgtgattccacttcgccttcactgaacccggaacaattgtcagcttcagaagcagtgtcttgaaatgagcttgaatattcagtagcatcagggtcatctctctcagctaatctcatgtcagaattatttttccattcagttatgtcaacctctacctccctggcagccgccttattttggctattgataaaatcttcaaatccaatcatattgtcctcacaattactactgcaacctatgcccttcatagctaatcttgctgccaaacccttatttctcttttcaggtgcaaaaacatttggtttacggtttgctcctccaatattcattaatggttgagcaggagacatcccaaagaacctagtcttgctagttacaaatacttcaaagaaattcctttatatatttagtctgaagccaaaatacactatattgaggaaaatcagcataatgataagaagatttggaaaaaaaaaccaaaacaaaaaacaaaaattgatgcaattgaaaaccaaataaacatgagtaagtcacattatgcttttttcttaaacaacaactcattggtaattaagaacatcctatgagcagagttgagctatgaagggtctaaattggttttaatatacattttattggtttcagctcagcctagtcttattagttacaaatacttcaaagaaatccctttattatttagcctgaaactaaaatacactatattgaagaaaattggaataaagaaacaaccccaatattttaagctgaaagaagatttgaaaattgatgcaattacagacccaataaacatgaaaacagtcacatcatgtttttcttaaacaacaactaattggtaattaagaacatcccatgaccagaggtgtagctatgaaaggtccagtgggggcatatgattgtataaattgttttaatataaattttatattaatttcaaaaaccaataaaaagcaaaataatccatataatcttggaagcgtagcaaatagataaccttatcattcatccccttgggaaatcaactctaccaaaacaaaagccaaaaacttcacttttagtacagagaatggtaaccaacgaggaattgatttagacttagaagaatcaaagttcagtaagtgtgtgtgtgttctacattgtaaattttcaagggaaaatatttgtagaattgaagaatgaagaaagagtgagatgagatacctgataaagggtagagagccggagacgagggttggccggagaagacaactggagcggcggcacagagaaagtttagggtttactgcgtgaatttgaggaaaaaataaaaacactacctttgccggagttaacactcgtctctcataacacttaattataaaaataattattatttataactaacttttttttttatgttgacaaaaaaataataaattgattgattgattttaattataaataacttaatatgtaattttcatttttccaaaaaaaaaaatggtaatttttgtccaaaattcccatcttttttgtcttctaaagggtgaaaattacattttatttatttattcacttagttataaaaaaaataactaaatactacaaatgtaatttttatccataaaattctaaaaagttgctaaattttcgtttagtgtgttcatcttcattccattttattttagtattaaatcactctttgtgtgagtcccacttagaatgaaaagtgtataaaaaatataaatgttaaatctttttataaatatttgtcttgatcttagttgtcttcatgttcaaggaaattcactgaacatgtttcatgttctcttcataaacaatttttgttttttttttatttttagggtttattgggacttttgttacttaatattatttgtaatataaaaattcatcaatttattgaacttattaaatgatataagtgacataggtcaattgtaatatttactttaaatattgtaattttatgtggaatcacaattgaaattaatgaccttgaacttgattgttttatgtatatagagtcgtgtatatattaagattgaattaaataaattaatggtatgtggacgtgcaaattgcaatgcattaagattgttgctgctgattttggtagttggtttatcaaattttgcaaaagtgcaatatggataagtatgaggaggttgttattttgtgttggggttatagaagactcgaaattagttagtttggaactaaaagtatgttacaatggatgatgttcttactttatctatgagttgtcttgtacaatggaagtcagttcaaaatagacgttcagatgtttttttttttttcaatttttaaagttagtgatagagctgaatttcgagttaagtcataggagaatacaattaaggtaattgttgatgctgtcatttttcgtgattgagctgagtttggttatggcataatccttcgatactctcaaggagaattagtgatgaataagtcagggaattttgctagtacgaatttggctgaaacaattggtataaaggaagtgttaaacttgatcaaaactcaattatggcgaaaagtaaagttggagtcaaattacttagtggtagtctaaactattcgaaatttattatctatgttttttcttttgggttattatagaagagtatgacaaattttttgcattttataacaacattttttttattaaactatttgtcaatataattgctcataattttgttataacattttgttcttttttgttcaacaaaagtgatatgtacaattttattttctatgtttgcttaaaaaaaaaaagaaaaaagaaaaagtataaagagatctatttagtattttaggaatatgcctcccacattgtgtaggatataaaaaagtttacaaccgcaaccacactattaaacgacatcatttggggaaaacgacactatttttgaacaaacgacattgaactacaaaaattgtgtttgagaaagaaaacacttgttgctcccaatactttgtcctatgtatgtgttggttttatgtttaaatattttttatatatatttttaaagtgttctctaataactacaaaataatataaaaataatatataaataacacaaatttaataataaaataaaaaaaatacaacatagtaaatattaaaatactgtattttttataaataaaaattttaaaattgtaaaaatatttaaaattttatatgactttatctttttaaaaattttgttgtttttatgtatttat

SEQ ID NO: 13854 - DNA, 2506 bp, Cannabis sativa
gttgcttgatgatctagttgagcccatttgagcggctttttggagaagagctgtggctgacattggagcaataacatgcttcgatgatgataatgatgaagagttgttaagcactcgatttgcttcttcttttaatcctaccaaacttgacattgaagaagaacaagagccaaagagagtagtactactagtagttgatcctatgaccagctcttgcacactactacttctattatagacataatccataggattattgtcattattattaatgttattactattatgcgatgaattatttgcttggttaagccaatgtgagaatcttgacttgctgagatgatgattgaagtgatcttgttgaagctgaaaaccatgactagtacttgtagtaccactcataataccgagtccatgtaatatatggtccatattaaccatagtggtagtacttgaactaggactactagtagtaatagcattagtatgatcatcaacattattattacgattaccgaagctgagattgctggatacaaccgaagtaagcctagcactctcttctgctagggcatcacaaaacgctctatgtgtaatgaagctatctttcctggtatacatcataagaagaaatactttataaatatatatatatgtctatataattaataatgttatttcgcaagaacagctatgatcatttatatgtttataaaacatcaatgcaatgctatattttcaaatgatactgagaattattataaaagagatcgtgggggaattctatatgtttatatatatatatataggtacctggaaaagagggttccacaatcacatttgtattctctagtaccacaagtcttggaatgagctttccagtcagattgaactgcatattttttagaacacttatcacacttccacttcttctcaccgtgttttcgactaaagtgcttcttgattccggtgaggtcacccaaggctcgaccagggtcatggtggacacaactcttttcagggcatatatacaccttcttcttcagctgatctttgttagtcctttgcctaagcttccatggaaggttgtgacctcttctgtgaagctgcaagttctggtctctctggaaccctttgttgcatatttcacatacgaatctgtttgtagccataagtgtttttggagataaagcaacaacctccgcatctggatctgtaattaatgtatatatacttagtacaatttacacatatgtataattagtaaaaattattaacataaatatataaataatttgcctggtgttcctgggagatttctcttctttttggtagcagcagcagtagtagggtttggttttgggtttggttcttgattaccatgatgaagaatatgagcagtagtagtgccaaaccagccattcatattggaagaaaacctttcagtactacgagccataatatgcatctaataataaagagttttatatgatacgtagtactagctacaagagtataaacaaaacaaagctctataaagctctcgacatatagagttataataagtctttagtatatatgtgtgtagtatgtgtgtttataagtatatatatatactacacatatatatctacaaaacacatgtatatcccaaacgactctaaggcaaaacgacagagatgaaaagaaaaagaaaaagaaaaggagaacgaatgaaagttcaaacttgaataaagggatcttgagtctaaataatatacttaattaataacctccttgggtggtggagagagagatctggctaagtgtttttttgttttcagcttgttttgtttcgggttttgaaaatatgaaaaaaccaaaaactgtgtttgatgaccaaagacagagaataatctacttatatataaatattttcttcactctcaagtgaatgtattttttatttcttttcttttccttcatatatatcttcatagttggtcagccatagtagatttggatgggccaccaccctttttttttcttttcttttctttttcttcttcttctttaattattatctttctatctcagagagagagacagagaagtactcatagtcttatatgaatgatcgctgtaaatgacagtagtgctttgagaaatttctctctcttattttcttgaggtttgtgagaaaataacttttaaagctcaaactccaattatgtataaataaatattgtattgctattgggcagtatattttttaagtgatattttaccattgatttgtaatattttctaaaatttattattttaatttatgtaagatttgatacttaactacatcacatcaataatagtgtgataccaaaaatatgtactaagcaacagtaatataaatcaaaatggtagctttagagtatgtatacgtgtagagtaggttgtagatttaagagaaagagaaggtacccatgctgcctcatactatagggaggtgtaatatctcttcaatataata

SEQ ID NO: 13855 - DNA, 1815 bp, Cannabis sativa
tgagaaaagcttgtcgagagtagaagcgcttgccgggacaatttccattagtggccttattcataatatcattgaagaattgttgtgtgacaatattagcaaccgaaacactattttttgtgcaacggcctgctcggcaattggcaccacaatagtcattgtctgtgccacaatacccaaatttgctacaacactcgttgtcgccacatgtgcccgatccacatggtattgtaccaacaacacttgcagctacaattgccaacaatgttaggtttagtaatagtatatttctcacttttaggatacccattttagagaaatagtagtaattgatgatgaaacttagcttatgttgagctcaatttatagcacaaaaatttgaaattattttatgccctatggtgcaacaatgcctaacacagcttgtagtaaaaaaaaaaaaagtaaaaaaaatgattttctagaaaagagattgacttgacctagactttatgaattacatgttatgtaactccattgacttggcaaagaaaaattggtctatgtccactctctccttcaaaaaaattggtaatatttttccatggctattggcaacaatatttttttttaatagattgagtggagaacacagggataaaattttgattttccaatcaaaaaggaaatgactgtgtgtacattttccacaatcacagataattggattggacttttcaaaaaaatattagtgcttatcaagtttcttaataatgccatttttttcaaatgctagtggtattagtgctcatagtaagcccactcgattattatttttctaaaattttatagttttttttttaatattctagtttttgtccttataattttttttctcataattttttattgttgccctcataaaaaattatatatttggtttagcttccacaaaattaattttacctctataataattttttatttagcttcctattaatgccaagatttatcattaatgggatacattcaagaagatactttttcatgggatatcattttttacattaaaagtggtagaaatccaatttccaacattaaaatttagtgggctgctgaagagggcccatctaatgatggcatatgtgaaatttgaccaaggaatccaatataagaacaagcagtggaactgtggattggactttaagtttttttttttttgagaagttattcttaaaattaataatttacttacaatttttttctattaacaatattcaaatactatgaaaataactttcattacctatatataatagttatacaaaaatgaaaaaaaatatatatttattttatacttttagctataaacgaaagtaaaaacttagttgaatagaaacaaaaaaatccaaccttcccttagcagactgagaattaacttatgaatgatcttaagttggattagtcattgttgtttgttatagatatagttttgaatttatgatgaatctttcttttactgttctaaaatattaagattgctctaagaaaacaacttttataatgaaatgtgtcttgatttttatttatgttatttattttatgttttgtcttaaagccaattatgtttccatttagcgcccaagtgctagaatgcattgaatttatgttcatttttgttgaaaggattattatttattacattaaggaattctatacttgtttgatcattttttttaaatttctgaagtttagtcttgaaaaataacatagctagaaaagtttaaatattaagtcccttattgatttctccaaagataaaaaaaaaaaaaaaaa

SEQ ID NO: 13856 - DNA, 8600 bp, Cannabis sativa
aaaaaaaaaaaaaaactcagataactcaataaccacaatctagcattctgaatctcaagtagagtaatattttcaagaaattatgtcattccactgaaaattattcgtcccttgaaaaaagaaaacaaaaaatgaagcctaaaactaggttaaagaatacagcataagaatgatctgtatatgctcgctctacgtcaaaactgacgaacaattgttgctcagctaaatacgttacatgataccagacgagcttaaggtttcagatccgaaactttctataaatttaaggccatctggaaagtatacactagacttcattaccgcatacgcctgtctagaaagtgaaggctgctttcacgtcttctgttcaggcattgcatcattctattcaggacgacaaggtttgatgacaacagagcagccaagatatattagcaattataaaacaagaattctagtgactccattgggaaacgctacgaccataaccattcgtatcagcttggttgtgtctccaacgttttttcttgactaaatcttttctagagccactttctcgatgtctggaactgcccccatctgtctcttttactttcttagcacgtttatccttcttagaagaggatttcctcttcttaccagaggaatgctcaaaaaactcaccagcaccatcacctccccgtggcaggggttcttcgtcgtctaattgccaattgcacaaaatctcctggtgatcatactgggagtgtaatggctccccagctcccggaagcaagctagtaaaagtcatttgtccattggatcctcccttgcgttctagcaagactgcatctggtctaattatggtacctagaatgctcctgttggaggctaggcccaagacgaccttaggatttgtcaaggttgtgaaggccattgcaaaagctgacctaatctgtaaacatataatttagacactcaacgcttcatgaaatgatgtaaaatgatgtcaatttttactacactgcagaatttatagataacaattcaaaatgaaaatggtggtagagcagttcatagcaggttgacccagtgaggcagtttcttcaatgtggaacataaaatgaatgaagatactaagatatatatctctagttaatgatactaaagtctaccccacacacacagaaaaaaagaaaccctaaagtcaccaatcccataatgtagcaaaagacatgtcataaaaaagctaccaggaagcgaagaaacaggagtgatagtcagcgtaagatcacaagtgcaaaatgatgaactattaagtactcaaaaccaacagccatgcaaaaagaaagccaagataaacaaacctgaaaatagttaaatgagctcttcccaatgtcattctctggagcctagagatcatcagcaaaacagaaacattgctcagtaacaagaaatagaacagaaaccattagagaggcaaagtatcttccttattttcctaattctatccgatctgtttatacaccttacaaacttatacatcaaatttgtaaataataacaaaatcatcgactttgcatgtttccaaaggatttttctctcccagaaaatcattgtcaaattgtgacaaacatttcagaagaggtatttgtttaccataaaaatacaagtttttgtttcaagaaaatgcatgttcaatcaaaggatgaatacagctgtaacttataagtacgagcaaattatggcaacaaacctgaggatcctcaatggatataagaaaaggtcgtcctctatttaagaaactgaaagaaaaggcaagtaaataacttcagaaacatataaataaacagatgtatgatatcataaatgtcattacactcttcattgaaaaagtcccacaaaaatcctataagtttttgtggctagattacacagtccatcttagatgtctacaaaaatgacaaatttcattgcaagattgatcaaatgatgactgaggtgcaagtatgcctaagtatcaaagagaacaaaacagaaaagtcaacccatttaagtatattgatgactgagatgcataacaagcaacaatgaaaaggaacaagaagcttctgtttaccctctatcattctttgagtaaaaggtgcctccaccattgcaagatacaccaacatctggtgtgttcaatttacgtccataaaagtcaaaaaagtttacctattttccacaacaaaaaagaagtacaaatatataaattcatgcgtacacaaaaacttctctacatagacaaattttaatctcacaaaacaccaaattttatcatagaaaccacaataacattctacagcacaatctgaagtaaaatcagcagtaacaacagcccacccctagtagttagattccatgtgaactgactttaatatttgaaaacaatggagcaatgaaagaaagctttaatgcgtttgcttaagaaacacttaccaaaagaattcctaagttagcttctgattctcgtaggctctgcagtgtgaaaatgtgttagattgatagctaaggcaaaattagtgaaaaaaaagttaagaatgtaaatggatttggctctaatgtatgatactgataagtgatatgtatcaaaagccatcatccctgggccagtctccctacctcattcccaaaacccacaaaataagttgacaatgaggtcaaggcatatataaaagacacagcaccaaccagatcagcataaatgtagagaactgtcttctccaatgcatttaactttaaaaaccaattcttaaaactttatcatatggagtcataaaagaaccaaaaagatctaaaaggctgcataatacttataggtggtccagtcatacatataaataacacagagtaaaggtaaaagactgtattttcttttcactgtattcagctgtactgaaaacaattgctaaacattgaccatatagggagcaaaaaaggacaaattgtcccaaaggattcatcaagcttctaagtcataggtatactcttgtcattctaatatgaagatgtcccagaattgctttttctttaaacaaattacaacatttctccctatgacaatatacactaccacagaatattgaaagataagtggtagtagattattacgtttataaaatggtagtaagattctaatacttcagataagattaaataaaataaaagcaaaaaaaaaaaaagcagcatagattcaagttatgagggcgtttccaacaatgaaggaactcaaggcacactatcattttataaaaatactccacgataaaagctaatatacttgttttggttactggtttttttccccacgttttcttttgtcagtgtaggagggggaaaagtttagtggcaccaaaaaaagaagaaacagttcatattttaagtagttttgacattggatcctccccctgacttggacaattttggggaggtaggaaacataagctagtgactaggtaggtctcattcatgaagaaacctcatgagagcaaagtatagaccacatccgtcacatattcccatagattatttatttgtttatactaacgattctatgtttctcctccgcatctttgcttacttaattgtacaattaacaagttctgcagggaatacacaggtcctacagagtacagactatacgtatatatgcaatcacagatcaacttttaaatgaacttataaagaatcacttgcctgcaacattgccatgagcatggtgagaagagcataagaacctaatccgccagagtagaccttaataatatgttcaaatattgaattaggaaactggagtgatatactttacaggtaaaaataatgccatattaatttgattgaacttggtgtataagaacatacctcattaagctccctctgttgcaaaaacacttttaaaatcaaacacaaaggccgtataggaggcaatcttgaaactgcattctgaaattgtaacatgtgtgatgtagcaacaagataaaagtaaaatgagttctccaacttacacaattagactcagtggacaaagtagtgtgtatcttacaacaaaccaattcaatcttggaataaaggagtaaaagcaaagacaattataatataaaatcgaaaaattcacacaaccattaaacacaggcctcaaattttcataatcaaaaagttaaaaagagatgattgaccaaaaagatttttcaatcacaggaacgtctttgctcaatgtgaccaatagaacattaagattaccacatctactatttttatttcactgctatatgagataggaaagctttagtttttaattttagttgtgtatgctattcaaaatgatacactgacttctaacgcagcagttttaccttttaataaaacgcctacacatttggaaattttataacttgcctgtagaggcgttaaccaatggtcatctttgtctagcaacaaaagacaccaaacaccagtgttctattcaaccatcataaagaagtcaaagttgtgtgtttacatcatcagtcttataaaaagttgcgtatccacattcacatttcaaattattacaaattattatattcacaacttttaaaaaaaaagtaagcataccatctttttcttctttctaaatataattatatgaagatgaggtaacaaaccttaataaactcagcagctactggaccattctgtagatcaaaactgttacaaaaaaacaaaaattaaatcaaccaaggctaatgacacagaacatacttaatatgaaaatgcttttgcaatggcttctaagcacaaaatcaaaagttcgacactagctttcaatttccttgttcaaaatataaattcagtagtctatttgtcagaaataaatagtgcaaaacctcatcttgcaaaaactctacaggtactaatggttatctgattatatgataaatgatttcttagttcaagatttgtggggggttacattaaaaattgcagccatttgtggaattctgaagtacaggctagtgaggagttgtaaagtgctggctgttatgtggggagtttggttagaggacattattgatttttttagataatgtaagtcttctggaaacattgtgaggaaggatcaagttttgggttcccctgtgaaataaatgcaagtaattgtttggtcatttttgttttctgtaagttaatgagaacttttattgtaattgagtggggttatgtctgttctttattctggttgagtacggtttttgttccacttttttatgaaagaaatataatcttccttctcttttgtttgtaattttcattttgacgaacaaagtacagttgcttcattgagaaaaagactatactacagctcagcaaacaaaactgaataaaatgatgcatgtataaagcagccaacctacagttaggtaatgatcaagtgaccaacagttgccacctggtttaatttcgctaatttgttataagaattccacttaatgcaaatccactttggtcccacagattaaaacatgattactaaaatttaattatacaacaaaaactacatcaaaagatttctaaattgtgaaaaattaagacagtaaacaatacaaaagtaaaccatctacgatatcaggattgattccaagtcaaacattaaacattttaaactgttgcaaaagagtttttgacgaaccttatatcaaatgcaacaccacttctcttctctataaatttaataattggcacacgagcctttgcaatcacctgaagaatggatagccaaaagtaagaaagaaaactctctgttgacagaaaagtgatgattataaataaaaaaaaaaatagcacctgtatcttttttgcaatgctcttctgtgacaatgcccgagaaagagcttgcaaaccttgctgtggtttctggattcctgagcctaggatcacaacctatcattggcaggaatcagtgaaaagcattaattggaaaaaaaaaaatgatgggccatcatcatttaagaaaaacaccagcaatcttcaattcttagctaataagtatgaaagggggaaaaaaactacacacacacattatttatttaatttcttgaaaatgtcatggccaaaaatcaattattgcttcaaaatcacttcagtatccaacaaaataacttcaaatcagacttcatagcatggttactaatctataattttataaattgtaaatgaaaatattttggaaaggaatgggaaagagaacatagatctattgttgtgtgacatttagcatttcaactgttataaaattggaatccaaataaacctaattctctttccagtgattacttgccgaggtaaatgaagtgaagtgcttcagtaagtaacatactgttagatggaagtgagttatcaaatagagacactagagaaacaaatttattttgtaaggacataaaactcattagccaagtgttattttgattctttcctgattggtgtaatcatgttgggccacaaaaacatgtttcaacctttgtaagaaaatccattactaatttgaaatgataaacactccttattctattccccaacatggacggaactaacaaaagagacattagtttaaagatagaaaaagtggtcataactagttcatcaaagagggcaacaaataaaaattagaaaaaatgcacaataattatgagaaaacaataagtaattaatagtggtctactgcaacagcaccacaacttcatatataacaaagaagatggagggcgacatacttacatcaatgtcactgcttggaagataaagccctgtcctgaacgacccaaaaacttctacctacaaagttgccacaagtagaagtcatcataattaagcttctaaggaacttgtggtaatataatccacataaaactaactcttagttaagaattttcaatttaaatgaaagtttgttaagttttgttagcaaccatctttccctcttgttctttgggttttatttgggttaactcttataaaaggcttgagccttaatcactagtaaacgttaagtcattttagggggagaattgggaaacacttttgaaagggctttgtaaggggttgaaaaagaaagttttgaggcttcagttttgcaaagttcaaggagaatcttgtatagattgtctcttcggggacatccgataagaatcttgtatagattgaaatggttgctataggttgtaatagaactattttatcatataattcaaattggaactccatgggagaagacaggaagtagaccactctattgggtcgacctagtatataagttgcttgtgttctttacagcgtttccattcatattttggtttcctgttttctggtttagattgtttttcttactggcggtttgatcttaatataggatgtgctttgagtcctgtgttgtacagagtttacaacagaactcatgccccaaatagagggaaagaatcagattatacctcgcagttaggccaaatatacttgataacatcagaaacacgttcaatagctgcattacgggaatctttctcttctggagttggagagagaaattcgcagaaatccactatttctgcaaaaataaataaataaataataattaaacatccagtatctcatgaattgaaccgctttctacttcaaaaccagtagtacctttatggagctgaagcatagggctcttgaatttactattgccacgaaaccagctgctctcaaggcgccgctcgtcctcaacaggagccggtgtcttcggctcggctccacgagagcgagcgggggattctggaaccgggagggagaagtgttcatctgcggcagcatcgagggagaagtaatcaggggcggcggcggctgcttcggcgtcgaaggatggcaaaggaatagtggatagtgaaatctcgtttcggtagacagaatagggttcacggtgatcggacggtgacgattggtcggaggaagggaaggatagagtggttagggtttcgtagatgaaagattgcgattgcgattgcgattgcgaggcctcctccattggagaggaggaataataattaagagtgacagcctaagtttaggatgggccgcagcattaggtttcccaatccttgattatatcacttacttgggtttctggcgccaacaatttttatcttttttacactggactcaactggaggagactggagaggttccctacgtttttatctcattattttttttaaaaaaaaataacattttaattcgaaagtttaaactctttattaatttattaaaaattatcttgattatataatttttttaattaataattttattatttatataccgtatattaattttatttaataattatatgtatactatttatatttatatatatatatatatttttgactaaaataattaacattattaattttagtacaataatttatcttatgtaattgtttttattatatactaaggaactaagccgcgtttcgcgcggtgttgttcaacttttacaattttttattatataaatatattatacttgttgagtgatatgatttaaaatatagtatttttat

SEQ ID NO: 13857 - DNA, 1629 bp, Cannabis sativa
tatatatatatatattttgatattgatttgaaatttatcctatctatttcattatgtttgcatatggagacttcgttaaattttgaaacttattataaattgttatattcataccttaaaccatgatatctcttttcgaatctgtagtgttcctccaagtttatgatcgagtttacttggaggtggcaatgttgcagccatgtgtaatatgttgttattatcatcatcttgatatgttatgatgacatccttaactgagccaatctcatgtattaaattgaatatttttgagtgtcgattcaagacagcaatatggaatatggttctatttttctcatccacatcccataccaaatctggttgtgcgtgaataagctcagccaaaaacttaaagttgcctaattcagccgcctcgaataataagcttgatggtttgttaattagattgtttaccttcgactctggtaaacgtactaaaatttcattccaaaggcttctaacaagttgaagggcttgatttttcagactctttctgaatgaaggaaccagacctgaaataacatatatatatatatatataaatacatagctgtacatgtttacttaactatttatgaatataatgtttggtgtttttgtaataaaatgactatctcttaaatgaatatttattaatttttatggaaagacatacttgaggtgatgtcgctggagctcttccatgtccatagtctaggagtttggtaacagaggatataggtttttctagctaaaatatgcaaagcagtatcattattcacatctcgagctattgctagttcactgtcatcttcaagcattttcaatgcaagacctgtttagtatattaatcacagtaaggggtattagatttgtttaggatattgagaagtgttacacgtatatttgtgtcaattgtgtgatagtgtgtgtaaaattattattatatattttgtaagatatatgttcccttaccgaacaaatcagaattgatacacgtgaagaaaattccaatccattcgccctgctcaagaatcttctttgtaataggatagagaaaccatgacattttattatggccaaacaaagtagccatgtaaagtggtgtcatgccttggccacctcgaataagtggcaaattcttatttttgttcataagaatcatggcaatatctatgcttccgctgatagtagcataacaaaacgcagtgtttcctttgcaatcctgcaaagctagatcgttttcttccatcaatttcaccaactccttcacaagttggacgtgttttgctccagccgcaatgtgaagaacagtttcttctgctcttgtgattgcggtacgtaacaatgcgctattattctttatgattttcagtacagttctagtgtcattcttcaagatagcatagtaaagacgaggaaccgtttcttgaaattcttgtcttgcttctcctacaaaagaaattttgaacatactcataactaacttgtattgtggttgtgaatatatataaatacataaatataatataatatatataattaaaaaaattaatatatgcaataaagcagtacccccttcgtccccttctctgtaaagcccgcttagtt

SEQ ID NO: 13858 - DNA, 1297 bp, Cannabis sativa
aggaactggagagtgaagaaaaatgtaaattgcttttggctatttgatataaaagatattaaggatatgattctatttttgtatattgtgggattggggttttatgatgtagttttgttttactgtgctcttgctgtccacagttaaacttgctctcgaccctttttattcatacaaagtattgttttctttgataagataaacagattaaaagaatagacaagctcactgtataattctgtttatatgcagatctggtggaaggcacactaatgttttcttgagaggagcagtttttcggatatttagcatcaactttttcacgtatggctttccggtatatattcttttgcaacattttgttgtttccattcaaaggttgatatgtatttttattgctacaaaaagagaaaaaaagttttttatgtttttttatttgttaatatgatgagtttgaggttttgttataaaaaaaataagaacaaaagttgtcagtataggtcattaatttcatttgtcaccattagggatcctattagtcagatgaagataaatcttcaacatattttgtgtctaaagctgtattgaactcaatttatgatttaataagttcattttatggaatgaatacttacattaactagtataagcacgatgtaaatcattgtttgcttattccctaactattgatttttatcaatagaataaattaacgatttgcagttctgtttgcattttgaactaattatttgctatatgaatcatttggtgtgaatttggcaggtgtccttgtttgctctttccttttggagttttcattttgcaagtatatgtgcattcggcttacttgcatatgttggttacatcttgtatgtcttcccgtcattgttccatttgcatcggttgaacgggctgcttcttgtcttcattctgttatgggccgtcagcacatatgttttcaatgtggcattcacattattgaattcaaaactggggaaggtatcctctcttttgagatgagttcctgtttattaattgaaaatactcacaattttaaactgggaccttttttttttctattttttttatacgtgtaggacatggctatatgggaaatggttggcttgtggcattatcctgtacctggattttttttgcttgcacaattttgtcttggaatattggtcgccctgggtaatcttgttaacaactcagtttttctctacttgtctgatgaagataggcgatcttcgaatgataacaatgttgtggaaggtagtggtatttattagcaatt

SEQ ID NO: 13859 - DNA, 13062 bp, Cannabis sativa
  modified_base (52)..(55): a, c, t, g, unknown or other
  modified_base (12363)..(12369): a, c, t, g, unknown or other
tgtaatcacgattttcctccgccacaagtgaggttatctatatataacgggnnnngggtcagtcttagacaaaggcctctttctctttttcaaaaaagaaataagctgaacaaagggattccattgtaggtaattgggaccaataaatgtaaagccagtaatctgaagtgaaaggttgttttcgatgatggcagtgggaatgattttataggtatgctgatatgcatgagaaccaggacctcttcccaaaccattgggatccatttgattttcttcaactgaaaaaaaatacttctctgatgcctctaaggcattttttttttcaaggaaaagcatttaaaatcaagaagagaacaataatacactgctgaagtgtacttgaatattattaagcgaataatcttttcaatgtacatagaacgatacaacatagatatttagaacagaagaaaacaaaacacctaacgttctaatatctaggaacctctctaactaaagatgattaatggattaattgaataattcaacaaactcaaaaggtcatatttgccgttttgaatctttaatttccttctttaaacagtattgaagtaaccatgtgcatttcattactttgttctccatacatttatgtccacttctaatgcaacttttttccccctctaatattaaactaaatgaggattgcattgccatacaaagaattttttgttcactttcccaggataattgagtttacttttgttaacctttggatatgattgtatttttatcataaaattatatggtcatctgatgggtgttactttttcaatatttgtttgcgcttccgtggaggttatagagttgtaattttggcacaaggaaacgggaacttattgcatctctcctttcttcgtataaagacaacgaactatggtatataattattctctatttataattataaaattatagttgtttcttgttcacaaatcattcaactttttcctttcctgtcatgtttgtgattgttatttgcagctcaacattaccgagtatgattttggagagaacaggtacctgtgtgaagatatcttccaaggctgaattgcttttgtggcgtgctgaggttgtcttctattgctcatccaaagtgcaccagcacccaagcaattgttttcgatgcattctaaattctttactgcatttgtggtctatgtagaggcttttctttctgaatggagagcaggatctgtcatcttttttattggctgatttgggaattattaagtatccaacttacaactgtgtaattacagaacagatcttctcaaacagaaatgctctgcttgcttatgaggaggtggtgctcttttttctttcaagtccttttgtaattttatttaataaaaaagaaatatggtaatttttagttccctttatgacacatgggtatactttcaggccattgaagtggcacaaatgattgatcaagctcttgatgaaaatgacaatgaattggttttgagatgcataaagatatctgaatcacgtatgtgcaatgcaaaagcaacggagacctcaatgtctgaaacgatggttacccctcttacatgtttttctgcatcattggtttactctaaagttcttaccctaggaacttcctttcttgagcgtgagcgtaggtataaatttgggaattcaaatctccctattttatgattgcattcctttgtaagttagcatttttctcattgttttggcaaggatagctattagactttactaacttggttgtaatgtttgatttatcatctgtgggtagacatgataaatgtactatctcagttacaattacttataaggtttctcatcatgttcaccaattatgcagctgaaatctttttgaaacatgtgccattcatctagttttctagctccagtttggttcttctgttgaatgctaagagaattatttgttctggtcacaggtataatgaagcaataaatttactaaaacggttgctagaatgttttacttgtgatggtagaaggggatattggatcctgagattgtcaattgacttggagcatataggatatcatgacgagagcctttcagttgctgaaagtggattgttagatacttgggtgcgtgctggatcaagaatggcattgcagaggcgggtccttcggttagggaagccaccaagaagatggaaaactcctagttttgcaaatttggtgaagaggaaaatcgacgaggtaatatcttagctgtggtatgcattttaaatctgatacctagatatgaagtggttaccttctaatctttgacttcattctttggcatacaagttaggttcatgttcaagggaggcctttgaattctgtaattggactgaagagcaggttctatggagaagatgacaagcaatgtggggtggagcagcttgccctccaatattatgctggagaaggaggtggatggcatggcatacatacagaaagtggcatatggctgactatatttggactacttatgtgggatgttatgttttctgatgtaccaaatgtcttccgcaatagatttcaggtaaattttctatgtttgctattcagctcttgatttggatgccaagtaagggttcacgtctctttcttttttaagctcttatttgaaattagttatggtatttcagatgacaagtgatctctatcttcattttttttttttgtttcagaaaaataataataataattagttatggtattatattgtattagactagaaaatgcaaccaacataagcgcattgtcttctattgagatagtattgaaaaaagaaagaggccacttgtcttggattgctcccccggttatgtattgaaaatcctcacttgtggctagggatgcacacagagcggggaattggcggggagtgctctcccgtccctattcccgtttagaattttaatcctcatcccatccccgcttattctctgtcccacggcgagaaatctcctaatgtgaaaataaatgttatttaaaaaacttacatgtacaaaaatattaaattacataaaaattaaaatattgcatattatttattatttaatatcaattattatacaaaatacaacttaacaaattatgggatctctatgcacaagcttgagggaggggtgatattggtgtttagtctatcactcggtatcctatcaattaggaaaccactgtgtacagattgtattgtttctatgtttagtttatttgataggctgtgtattatatttgtcattaccaaaatcttcagtgtttatttaccaatatttcctttttccgtacagtacctatttaaaggtattctctcattgcataaaattataagtgaataaccttacaaaaaaaataaaaattataagtgaataatttccacaatattctcttgtattttattgaattataatgcacaaatatacaaactatacaattatatccctagaattaagctaattagcatctatatacaccccattacattctattaaccaaaaaaaaacaccccattacattctgtaacaatccccagcaaaaaaatgaaataaattaatccatattttctcctactcttaccgaaccatcaaccacaacagaaaacaggaagtaaaactaaagcaagtaactatgtaattataaaatgccatatgcatagtaaaattataaaaataaccattaaattatgaatgcatttgtatatttataattctactgtctctgtctccgaacataaaaacaagcacaagttagctcaaaatttttgtggtacagctggttgcaagtttttcgatgtgttcttgaagtggagtttgaaattgaaaaggaaagttgttctagacatgtaattattctgttaatcttgctactgatagatacttgaaattatttaaagtgttaatcgatttggttttgatctaaatttacgtataaatagtttttggttgaaatctatgaaaaccaattttgattttttgctgtcacacctgttagttgtcgattatatctttttatttaatattgacatttgcttgatagttttatcttgttgatacaagcattttaataggtttttgatattgcatctattttttaatcggtgactagcacaatttagaattttattcagatgtaaacttagaataatatgtcctaataattttgactgatgtgtagtgaaaggagaattgaaacggacaaacagtgactcgttattgcttttatcaatttcatcatgttcactatgattcaattgccacgtgcttatggttttatgttgtgctttactcgatgaaaatgagaaattcagatggattaaaactgttattgcagactgctccgttggacctggagactgatagcttttatctagtgagaaagagcagcatagagtctcatcttcaaaaaattcatgatggcatggctgaggaattcctcatcacatcatgggaattacacactggaacagcttgcagaggagtaaactggaataggcatactctatctgagctccgagcagctgttgtatgtattggtggcccttgtttagctttactctgtagacatcttgcacaagattaccaaagctggtcacgtggaatgccagatttgttgctttggcgatttaacggagatttcacaggtgaagccaagcttgttgaggttaaaggccctagggacaaactttccgaacagcaacgagcatggctattgcttctaatggattgcggtttcaacacagaggtttgtaaagtcagccctgaaccaacaacttcttaatgcatgctgcagcttcaaatttaagctcccacatcctaggaaaaatcatggtgagaggctttcaggctattatgctttagactatttttagtgattttggtaggcaatccaagcggagggtttcgcaagaaaagttcaggtctcaagcaaattcaactttataataattgcatgccgaaaacgtcaaaggatataattgacactacaaccaacccaaatatttgattgatgtgtatagttgagtaacattatttttacgattattcaggtggaaaatagaaagacattgatgtcatatacgaccatcactgttgtatttatttactgtcaaacttgctataattttgccaatattattcttctgtatatgattttagctcttgatttttagagtttagtatagcataattttgccaacattatattcatgatttcgtacagatgtgcaacacaatagctttggaataacgtggtgtcttaattgaagcttttgaggattgatgaaacgaaacaattattataattcacatgctattattgattgaaacggaatgattatctagagatcaacacaagaaagttataacaaagtttaaggcctcacacaaaataataaaagctatacaaatagtttacaaccattttttcctttcaccaggattagtaaagtacatatatatatatatatatatataattgtgaaaaaaaaatattacgctgtataattaacttttgtcatttattttctcttgtagagtttatgcgcttgtggtttttgactttgttttgaaggaagcttttgtggtttttgacatgggttagttttgattaacctcattgaaacacttgaaacgtttggttgagagtttaatggattaggacattagcaaatttctttctaagcatttatttcggtactttaaaaagctcatctcatacaccttttatcattcatggctcgtttaataagcggggttgtattgtattaaataataaataatactgtttgaataaaacattgtattgtgttaataattacgattataaattttaatacaatgtgagtcgtattatttaatacataacaaatgactcgtattagtttgtattataatgttgataaaggatatgggatcaacctcggtctcgactctagccccacacctcgaactcggaccccagacccagactctaaaccttggatcacagtcctgactaggttgtggtcgaggttgagtttattgtaaagaatatataattttatacatcatattagtacaatagaacataatatctcacggtgtaccaaacgagccctcaaataattgaagttgctcaacaagagagcagttggggctaaagttgccatcatagaaacaaatagcttgtttggcacagcttttggaaaagctaaaaacgacttttttaaaaaagttgtataaaaaaaaatatttagtaagcagttaaaaaacaacttattgaaaaaattattaagaagttagagctaaagttgatagaacctaactttaagaaaaatttgtttttgattaaaagcctttataataaattattttgcactaaaattatttaaatattcattatatattacaaaaaataaaaatatttttttgaaggaaaataatatttaattttttaattttattttaaaaaatattttatatttatattattaacaaaccacatcaacttagaatttcttataaactataatttcttacaagtgataaaaatataataaattattttttataaaatacatataaatttgtactatggaaaaaaataattaaaagtatatagaaaataaaaattttatataacataattttttataaatatttgtgattataatgaactagattataacattatcattattataatattatcttaacaatttgcaatactctaaaatttataatttaccacacgtctaactttttttttacagttctattataattgatttttctaagagcacagttataactacttttgcctaaagtgatatttcatcttttgaatagtttacctataacatggcttactttggtaaaatagtaattaaaaccattagtggcaaagggagaaatagtttattttattactgatctatttggttcaaatcaagagggaaaagagaagttacataagggaatcggttgagaaagacaataataagagttgaaaacctcaactatgtcgaggcaagagtttgaaattgtacacaatctatacaaatagtcataaagtaggctccctcacgactaatcaaattgagcaattccatacgcatgccattaccatacaaatgaccatacattagaaaaggtatttctacacaaagcaaaaaagaaaaaattatttaagtaatgacccaattagaaaactgagcatcaattgtgaaaaatagacaaaaagaaagttagaaagataattgttggggtcttttaatggaagagttgaaatagtgatcattgtcaatgtcatgtggaagagaaaccaaacatgggtttacttattgaaattctattttgtatacaaattttttaggaacacttttgttttggctgagtcgttctagaaagtgggagcatgcatgcttttccattactacaatacaatgattcgaaaggaaaatgatgtatagtattttcaataatatagaattatttgctttttggagtatacaagtagctgtaataatgcccattacagaactaaaaccaaaaccacttaattacaagtttgctttatgcatgaaatttcaaagtttgtagctgacacttcattatgctgtattgctaggccagccatactttgttttctatatcccaatttattattattgttgttgttatttgttattattattagttttaaaggaaacgattttatttgcttttgtctcttacccattaaaaaaattggaatattgctagattatataatattttggatatgatattttcctgatcttcataaaataattgtacattgagttattggatgactaagactaataccgtatagatactactaatataatatttactggaatagaaataaaacgatacattgtcgcattattcaatgcatctttacatgattccccaaataaaacaaacaaacaaataatataatatttaacttctcttacctatataagtcatgatgtattccatacaattaccatatattttcttcttattagttatgaaattaaatcaaagatatgagtgctcaaacttattatattgattctgaaaagaaaatcttttgttattgattaatgcggaatctcaatctacatttttgatattgatattgactgacataataattgtgagctattttttcttatcaattgatgctattactttagttgttattatcggtaattaattatctaatttcttatattttaatttaataattattaatatagtaaaacatcacctcttaataattatggaaattactagtgtctaatatcaatgcacataagtaaagctatattaattggatgatctactcctacatttgtctactcctaaatctgtctcgcaccaccttagaaattgagtcctagattcttaaagactataactctcatgagttagttaactaagcaaaaatacccaactgaaaatatagagtaatttaatgattggaaaactagcttactattgtgaggtgcatttcattatatagttatacgacacttagaaaggtatagagtaccaatacaggtcatacacgtagcaaaaggaatattatactaaatacaagcaataacaagtcactaagactagcttagtgatgagggaggaatgagaaaaatgagaggtcatgggttcgaacccaagacctttaagctgcaagttattaattgattctaaaataccattacgctacactcaaaaaaaaaaaaaatacaagcaataacaaaaatttgttatgacaaaaatgattaggaaatttgtcttgagatcctctcattcaatcatgctttgctctgccacgtcaccagtgaattccaattctctaacaccacccctcaaacgatatggtgattgagtcacattgagtttgtccaccaaaaaatgaaaatgtcttggtgtaaggccctttgtgagacaatctacaatttgatcatgagaagggacatatttgatcttgaatttcttctctataactttgtctctcacatgatgcacatcaagttctatgtactttactctggtatggtaaattggatttgaagccagtgcactcgcacttaagttatcacatcagataacagtcattgatgagaaattgaactttaattcattgagaagttcttgtaactaagacagttctactgcaagttgagctaatactctatatttagattttgtgctcgatctagcaacaacaatttatttctttgcaactgacttgcgatcatcaagaaaacacgcccaattagcatctgaaaaaccaataagtgttaagttatcactaggaggtatatgaataccatgatacaaggtccttttaagatatttgagaatcctcttagctgctccccaatgaacatttgttggtttcttgagaaattgattgagcttgttgacaacaaataaaatgtcaagtcttgtgtgacaggtactgtaaagctcctattacacttttatatgtggttagttgagtcaggagttttccatctgtaaaggaaaatggcttttccgttgtcatgggagtgacactcagttttgtattctccatttgcactttttgcatgacttagtaatgtatttaccttgtgagagatagattcttgtgttatccttgaagacctctatatcaaggaaataatgaagtggcatgagatcttttaaggagaaacttttgtttaatttggtaatgaatttgtttagttcacctgagttattacccgtcacaactatatcatctacataaattaatgctattataacaaacttagcttgtttgaaaataaagaatgaggggtcagctcttgagttttcaaaaccacattgaataagtgttgttttcaattggtcataccaggcctgagggacctgttttaggccataaatatatttttgtaacttataaacaaagtttgggtgttgagtattttaaaaccgggaggttgagacataaacacatctttattaagaactctatttaaaaatgcattgttaatgtcgacctgcctgacctctcaatcataagccacatctaaagttagcacaaccggaacagtaacaccctttaccacaggactaaaggtttcaccaaagtcaagggcaagtctttaatgaaaaccttttgctaccaaacaagctttaaacctttgaaagcttccatcgacattgaatttctctttaaagatctacttacacccaaccacattgtaagcttcagacctaggaactaagacccagatatcattcttttttaaggccataaacttatttgtcatggctcgattccacccctcatgttgaagggcaatgtcaaccaatatatcctcaccctcaacagggggaggttgcaatctttggttatctgagttgttgggctgattaggctggtttggctcgttcccttgtcacttcacatactatctgaaatatctacgcaagatcaggctctctatctcgtcttttagttaccgacactcttcggttgtatgccatatgtctttatgaaatcgacaaaattttgttgaatctcgtttatgtctcgcatgtctcattggttcaggcttgcggaatgtaaccttgtgctcatttacgagaaaaatgttttcacgaattttatttaactcggtgtacacggtataaatcagaacatatttgtcgtgctttttctgtttcttcttatttttagatgattctctcgagtcatcttttcttttggtgtttgaaccacttggattatcagcttttgtcgagacggtacttactgtagcagtacttgtgttgggtttatttcccgagccagtcttcaacaacttcatctcattccttgcttcttctttacgcacaaacacttacgctatgtcgttgaattcattaatgtttcttactgggcgaccatgtaagtcgtcccacaactcgcctccagctattgagaggtcagttttgctccctacttgaagagccgtaagttgaatactgtcattcaaatttctaacttttgtagctgcagtgctgaagcgacccaggtaagcctaaagtgactcgcctggttgctgctttattttagttagggatgatgcttcaggtcgcctatctctggcagctttttattgtttcttaaagtcctttaacagttgttcccaagaagttatagaatggtgagtgaatttatcgaaccagcttctcgctgccccagtcaatgatgttgggaataaaatgcatcgcaaattattcgagacgttgctggctcgcattatggtattgaagttatgtgaacgactgggtccatagtcccatcatactgcgagacgtgtggatttttgaatccctaagggaatttagaattcataatatcaggatgaaatggctcgatttccttatccgagtaatagccaggtaacttcccatgctccccatcttggtattttctaaacttatcctcaaactcaatgattcgcatttggatggggtccatttgtcgttggttggcattaagttgatggcgtaagtcaggtgtattctaatttagtcgcttgcgaagatcaagttgtcttcgattcaaatgctcacgaagatcaggttgtcttcgctcataattgctcacagatcttgtatctgagtaactctcaaattgataacttctcgtattgctcatgctttcttgatcagcataacatcgaggtttgcttccttctcgcatttgccttcctgattgactgtgcccgcgagacctcaagtgtgccttgtcttgtaccgaccttctccttcggaagaggttagatacacgtcctctatttaggtacgtgtatacatcttctctctcggatcgagaaggacattgggggtgtctcggtggtagcccacttgtcctaggttgagtcctaggatttctcttgttattacgagggatttcctgttccctagtttggggttgccttgtgtcctcattcctccgagaggcctctggtacatcattacactcattcccttgatttgttaattcttaggatctttgaggaacttctcgacgttgttcgtggttattttgttgttcatccactagaacatccctagtacccccaggtttctcctcctgagtgttttggggatttccttgatttacttcctgtctcctggttctggaaccccaaggtctgcctcgtggtcttcttaccccagaatcaggttgattccgtgtattagttccttgagtcgccctagtcgctgcaacctttctttctaactcagtgtttcattggttagactcggctaagcattgccggagttgtcgattttctaattccannnnnnntacatacctagttggatcataagcatcctcatgtctaggtacatatcctgcagaagtattagtttcttcattctttccttctgggttttgattatcaccaccataatttcttcttgaacgtgtttttccagaagtatggggtctttgagaacccattggctctttcccagggtgatgtgtagtttcctcatgataatttccatcgttttgattatgatcaaccatggataaatttctatttgtaaggagggatttttctgagttttattacttaggctctcaatgaaagcaccaaactgttaacgcagattttcattaaccaaaaataattagcctttacataataaatatatcacagaaataataagaaataataaatgtataaatgacaccacatatttttacgtagttttgcagttaaatctgcatactttacgagtctatcttatttaagatattttctgaataccagttacaattgatcatatctcctttttctctctaagattctatgttcactttttctgtggaatctgtccctatttataggaatataggttaaaaattatttacatgaatctatttgaaatgtaatcgttcatgaaacgtggacaattcccacgtttcatttaaatacatgtgggataatacaaaataacttcttaactgcttttttgtaacgtccccgcttca

SEQ ID NO: 13860 - DNA, 10341 bp, Cannabis sativa
  modified_base (9807)..(9807): a, c, t, g, unknown or other
cggctaggatcctccaccagaccatctttagacagttgtgtatttttgccccccatattcgtttccacttagcgttttggctcacacagtcttgaacatttttgatagttctataggcagattttatgctgaattgaccactttgctccggaagccatagccaagagtccttggcagggtggttcgggagggtgatattcagaattcgtttagcgtctgctggttggaaccatcttctcaccaactcctccctccaagagccatctccaatgaagttactcaccaagctgataccttccgtagcatccagccgaggctgaggttggaggatcagtccagggacccacggatggaaccagatggaagtggtttcaccatttccaatctttcgacaaaggcctctaagaataaactgcctagtattaagtatagctttccacataggggagtccgtaggttgagtttccatgtcaagaaatggcgtatttctcatatactttgcctccattacttgtttccacaaactgtcatccgcctctaacattttccatccccatttcatgagaaaagctttgttagtcgcttccgtgactctgaatcccaggcccccgtacgttttgggacggcacagggtatcccaagccactggatggaatactcgtttgtctttcgaatcgccccaccaaaagtctctcagagttctgtcaattcggttggttgtgttctttgggatgacatccgaagatgcgatgtagttagctagagtagaacctacggacttgatgaggcaagctcttcctgcacatgatagtagcttggccttccacccttgcactctattgaggactttatccactaggggcttaaaatcttcggatcgttttgatgatctgaacaggggaaggccaaggtatgttgtgttgggggacatcttcctcattccccaaaattgggaaatagcctgcactgtccctcgctgcacccctttggagaaataaatagaagacttttgaaagttaatagactgtcccgaccattggcagtacgtgtcaaggcattcccggaacgccttggcctctctcatcgttgcttggccaaaaagaatgatatcatcgacaaacattaggtggttgaccgatgtaccttgtctaccaatcttaaagcctttgatctgccccctaccctctttcaaatgtaggagtcttgatagtgcttctgccgcaagtatgaagagtgtcggggatagaggatctccttggcgaagccccctctccggagtaaggtttccaaccactgaaccattgaggagtagtctgatttgacgaaccgatatgcaagctttgacccactcaatgaatggggaggttagaccaatgtgtctcagaacacttaagacaaactcccattccattcggtcatacgccttctccatatccagttttatcatcatgaatcctcttttccctttcctcttagagaaggattgcacaatttcacgagcgatcatcgtgttctcagctatgtatcttcctttgacgaacgctgcttggtttggcgatattattttttgaattacgcttcggagtcgtgtggctattattttggatatgactttgtatgccacattacagagagcgatgggtcggtacactagaacacacgcaacttagcacactaggacttcacttatttgtgcacacaccacaaagaactcaaggtccatatatgtagatgttgttggtcggtagtgagggcttatgtctaaggcccaagttctaaatagcacttaatttatctcaatctttctcaaagtttcaagaatgttcaatgtaggtgttgactttcaacactcttcaaatctgactttttttagaaagaaaatttttatattaaactcaaaagaaaaagttgaattaaacttttctcgtagtgtccaaacagttgataagtttacatcaccaaaaaaaaaaaaaataatgacttacggcttaaatatctaagtttaactttcgattataaataaatactctttcgattataaataaatactttccgatcgtagataaatagctaagtttaatttttaaaggcaataatacttgttatagttctaaaacttttgtaggcacatgtccattaagtgtcaaatcattatatgtgtcaatttcttattggtatatttaaattaagttttaaattaaaaaataaaaaatttaatgaccttgactattgagagattgttatgtggttattgacttgaaacttatcaactaggtacctcctaccaaagttctaaaaatatagcttaagtattatttctgtcgaagaattaaactaatgtatttaactgcaattggaaagtatttatctataataaaaagttaaatttaaatatttatatcgcaaattactcaaaaacttatatttggatatttctgttgttgcttccaaacttagatgatagttcatgaatttatatactcaaatggtagttttgtcttatgagactcagcaataaaattttagcagcttgtagtttggggaagtacactttttggttagatagtgaattatctttgattggagaaggttctaagactgattgaagatatttgtattgtaaattcttaagtgatttacttttttttttgaaaaaatattccccgcttctgtgcaaatatgatttttggagttttataacttacataaaataaaaataataataataaagtctagctatttagctatttttggcatcaataagttttaatgtttatttgtgggagtaaatgtaatctcaatcaatgccacaggagcctggacatatgctgaagtctctaaacagacagtcaatgcttgagaaggtgtatactcgtgaagaaattatgctataaagttggttgttgctctcattaaagttgacggccacaatttgtataaaattacaatctgtagtttctctgccagataaatttgaactctcttaataattaaggtttaaatataaagaaaatgatgctcgttcataagcagagcacattcattataaataacgtttgagctgttagtatcagttgccgattttaaaagcagcagtcccggctgggctctaaagtttttctcaatctcctaaatcccataatagaattatatatccaaaaaaactagccatatgatgagaagtcaaatccccgttaaaaacaaaattaacttcccagaactaactatagctctttctaatgacatcctaaaatgtagttgctgtgacacaaagtcaaagggtgttctttgatataacttgaacaaatctaacgaaccactgagcatcagacgaattattctcctgctgcttcacttttggtagctgttgtccgttgtcaatcaaaaatttggcatagtcaatagtctttggaagattagaacaaggtttagtcacaagatcagagtcaggaaggagggagaccaagaatcttgcaacctcgtgcatggttggtctttcccttggattacgtttcgtacatagaagagccagttggaaggtcttcctaacatgtcccaagtccaagcaggtaacagaaacctctggatcgacagcgtccatcaccgtgtcactatctgccttggacaatatctgagataatgttgacacacaaggtcaaggtaaataaaatgaatgggttaagaaaggaaaaaattataactcaaaattaggtatatcggaacataccagttgatgcaagtttgattcgttatcaacagctttcttccctgttagtaactccagaagaactatcccaaagctatatatatcagacttttcgttcaggcgagatgtgcgtgcatattctggatcaatgtaaccaatagttccaagaacataagttgaagcgtgggtcttagcagttggaatgcatttagctatcccaaaatcagcgagatgagcctcaaagttttcatccagaaggatatttgaggacttaacatccctgtgaataattcgagggttgcaatcatggtgaagataagacagcccctgggcagctccaattgctatccttaatcgtgtttcccagtcaagtttcacttttttcgaaggtcctgtaattagtgccaaccaaaatagtagttcagacttgcataactattcatcaaacctttattttatttttttttattatttttgtgtatgagcgggaatgaaaatttctttaattgttaacaattgtgagcatactaaccatgcagtaaatcccaaagagatccattcttcatgtagtcataaaagagtaggttcccgaactgtgatacacaatagccatgtagactgacaagattgcgatgccggatgctaccaatagtttcaagttcagtctcaaactccagcaagttgtgctgatcattgtagagtcgcttaattgcaattggtcgggaattcttgagaacacacctgtacactgtgcttgaagcaccataaccaataatgtacttctcgctcaagttctcagttatcctcattatatcatcaaatgtgtgaatagccatgtccatgtgaagaataactaatttggaagaacctgaaaatggtgaagtacataaaaagtaagattatggtaagactttttgtggaaataaatggtagaattgatgaaataccttgaccgatcttgccagatcctgtaatcaattcatttggttggtgggatttgtaaatggcaactattaccaaggatagcagtgttatgaatcccaatgtcatacatacaactgcagctctggagaatactggtagcatacggataagaatgacagcttgtcaaaaaccaaggacaaccagcaaaatctttgatgcaaaaccaaaacaaattacacacaaaatcatacctttggattttggcacataaggtctgcagattgaccccaaccagtttccacacaacaatggatttcctatgaagctgtcaaagaacccaagaactcaacacaattgaatattaataccgcattgcaaatatcggaattaaaggaagcatgcatacctgtctggtgacaaattagaaaagttcctagtaggagggacaactccagacagattattgtaagaaatattcctgggatgtacggacacacgagtaaataacaatcataaggtaggcacataaaagaaaagaaattcaaggattgataattacaaggaagcaagacttagacaattggcaagctgagcaggtatctccccatgtatattgttgttgttaagtatcctgttaataaatttctttttaacagtatgccttaaaaagacattagaaacagaagcaaaaaaattacacttacaaagacacaatgttctgcaactgtcccaattctaccgggatgtgaccggcgaggttgttaaaagacatatcactgtaaaagtaaaaacagaaaaattagtccttgataaaggtttaagatttttgaacaaagttcaggcaagagaaacacatcaaatatcagtaagagcttacatggtcactatacttctgaggttccctagttctgctggcaattgaccatcaagattattcctacttaaatttctgcacccatatttgacagtttggaataattttaaagatggaattcctcgcaacggaaaccaaattaccaaaaggaaaaagaatggacaataaaatggccacacttacaaggtgagaaggtgctctaaattaccaacagaagctggaacaggccctgagaatctattgctggacagatccctgaatttaataaaacatttattatcctctgccgtccaaataaatggttgcaggtaaaaggcaccattaaagaacatacaatgtatcaagattgataatgtggcctaactccataggtatcttccctctgaaactgtttgctgaaaggttcctgaaggtccaatcaaattaattaccattactaaaacagaagataccatgaggttgcactaaaaatgaaacaaaatcacgttattactaacacttacaagtaagtcaaactctccaagttccgaaatcccaaaggaattgatccattcaagagattaccatgaacattgctttgagacatgcaataagatgcagttagacacagttcataagatttgcataaacaagcgtatgaaaatatatacaaagacaaaattcgagacatcatacaattgatttaacgccgtgcaggaactgatattatgaggaattggtccttcaaggttattattcgcaagattcctgacatctcaatatgtaaatgagctattccacattttatcaaataaattaactcaaatgcaaacatttgaacttacaactcaaacaattgttccagctttccaagttcaggaggaattctgccaaccagttgattatcatttagctgcctgcaaagtgattccttcagtaacttaatacacaaataaaaggaaaaatatttaagtttgtcaaataaggctcacaaatagctaagtttagacatatttccaagctcaggaggtattggcccagtcagcttgttcccatgaagatatctagttaaaaaagtcaatgcattagaaaccaagtttcagtcaatattaatgcaaaaccattttcttttctctcaactatagaaactcacagttttccagtgtaagataaattgccgagtattgcaggaattggcccaacaagttcattttcactcaaatccctgaaatacacatagtagtaaactatattagacttttaaaaagtaaaaatataggtatgtttattcaagtttatgaaaaagcacttacagaacagcaagggcctgcattaaaccaataacctcaggtatcttccctgttaatctatttccttgaagagacctgcttaacaagtattagatggggattctatgttgaaccatgaccgctagcattaagaaactgcagagttaaaagaaaaaaaagctggaaagcttacaatgtagccacttgtaaaaatccaatgttatatggaatttcgccagtaatctgattgtaggaaatatccctaaactcctcaaattaatgccaaagaacaaaatcacaaccaagccgtatttagaaattaaaaattaaaactcagatggaacacgtacaatatttcaaaactagtacagttcccaatgttgtcaggaatcggaccacttaaattgtttccccgcacatcactgcaaataatatagaaaacctccacagatcagaacataaactaatgaaatcgtatgaagaacactatgggttaggaagaacaggtactcacaaataccacaagccagataactgacaaatatcaggtgagagggttccagtcaatgagttgtctcgcaatcccctaccaagaagaagacgtacaaggcattaaataatcgtaagtcttagcatgtaaacaatgatcaagtggaaaaagaaaaaagcaacacttaagcagtcccaagtttaaaacatgatatacttacaagtactggagtacttcattccaatacagtattcttggtatctcacctctaagctggttccgagcaagatcactagcagatttcaaggccagcaaaaatatcagcacaaacaattaaattaaagaaacacattcaaaggcataatataacaatagagctactactacttcatacagcaaatctaactaacaatgcaaaatgtgagtagatatgcaaacaagcaatgcgcagatcaagctaaatcaattacgaactcacagagttttaaggtttggaatctgggtaagggttgatgggattgtaccgaccaattggttgtttttcagattcctgaataaattaagcagttaagctattaaaaactcttctctccacaaactcatatgtagtgaaacattacaaataaaagacactcacaaaaactcaagttgcttcaactttgatatagaaaaaggaatatcaccatgcagtaaattatcagataaatccctgcatgaacgaatcataacatcttcggttaatgtagaaagacaatgagtactggcagaaaataggccaaacacaacaggataaatcaacacaaaagaacaaatagaaagagaataatatattacagatgcaccagggaggcaacgttgccaatctcatcggggatttggcccgtcaaaccattgccctgtaaatctctgcaatttttcaaacacaaaaaacgtgtcacctgtatgttcttgaacttatattgttgtactaaaacataatatgcttagggaaacaagtagataactcttacatcgactgtatatttctcaaatctcctatggcaggtgaaatttccccacccaggtttaaatttgacaaattcctaccaggagaaaaaaaaaataaacaagcttagagaaaaagtgatccatccgcgagtaacttcgaaagcaaaatagaggtaccgcaaagattagacttacagtgaaattacggagaggccatcaccattaccgtcgcagataactccccgccatgaacagaaatcgtcaccttcatcgttccagtcaagtaacacattcgctacgttgctaaatgaaactttgatcgataacaaggcatttcctgaatcaccattatttaaaacaattttttagttggatattaaagaatgtaactaattacagttcaaaatacatattttaatttaaaaataataaaatattgattaaagaaaagagcgcagttccccgtagtaagaaaaacacagttgataagcatgagaatctggtaaacgcgacattctcatagagattctgtaggtctcctaagaaaatggacggagagaaaaagaaaactacatgggaaggaaaaccaccaaaaagctcaacaggcttgacttcactcacgagccgtacaactttgaaaaagctacttttaagctcaaaatcggaccattttgcttagcactcttttggtccaacccaactacacaaaaagtagctaccattgtaagagaagttctggctacgattttctcatgctcacacacaatgtgacctacacttctctctacacgacagagtccagctacccacatttccaaaaaaaaaatggcaaagcaatagtccataaacacaaaagaagtaaatgttagagtagaaatgaagacaaaacaaccaacattattaccctcgtcgttaagagaggaagaaaccggacaaagaacgagcagtagtactgcaacgacgacgaagtggacctcgttctccttcttctgtctccaccattgcaagaaagcatactcctccattgaagagacagcaatgaaaatgaagtgagtcggtcaaaagagaaacgatatggtatattttttctctctctatctctgactgataatgatatatagagagagataatgagaacaggcgtttagcgtgatctgtaaggcagagagagagagagagaggtgtaatgaagagagagaaatacgtaaacggcggtgaagcgacgttagtgatttctgaaagaaaagtggcagcggccgtcattcgtactaataattaataatactattagccgtttcccgaagcacttttttcgttttcctttactactacagcgcgtgttttccaccttctttgcagcttaacctttctagtttagtttagaactatgtaaatacttttggttaagtttacattacacctgcgcctcatttacgtcctaaatcactatttatctttttaaatttacgtcctaaataactaggacctatacattacaatccaaaaactttcgaacactctaaataactatatatatatattattttttaatattttntattatataaataatttttttaacgtatataaatataattgtattagatcgatttttatttgaattttgagattaacattcaataatctaattagaatttaacttttagaatccaatctaatccaattgtaattaaatattcaactttttgcaattaaattagatttgatcagttcgattggattgaattggattggatgatgttcactcattacacttattttgtacttatagtatagaaaatttttttttcaaccttcaaggcatctctaatagtaaatatcaaattttgtgttaaatcatcacaaaagtaataaaatttcaacactaaaatttttttatattctaatcacaatattaaaaattacactaaaattatattttttattattatattataaataaacacaaataatatatatacaaaaattttactcataaatatattattgggtgattctacaatgcactcccttaaaagggatatactgatgcaccccctacttgtttcggcatctagaaaaaaaatttagt

SEQ ID NO: 13861 - DNA, 10465 bp, Cannabis sativa
ttttgggggtttttaaaaattggttctattttaaaaattacatacactaagtgttatccaaaccaattttgtattaaaacaatcataataattcaaatttccctttctgttatatgactacttttggagaaaagaaaacccatcttcattcctcgtgtctctaatgcattgattaatattgctttccacaatctaatggggtcgacatattttgtctctaacgtcaagaaaacaaacgaaacccttttcagatcaattgaaagcccaaagaaaattgaaagcaatatacaattatctaactagataggtaggtgtacgtagtatggccaattagaaaaattatatgtagataaatatgatttaaaagattcctaccacacgtcaagtatatgtgcaataatagaataaaagggcattattgatttgatattgacctacataaaaaatgcactaaatagttttgttcataatattcattttattgaatacattttagcaagttgcttttacaatctattagacttatatgtacacgacacacatatggataaatattgttttgtgaatgtgtaaactccatatcattagcttggtattagttttttcttatatatttattttacatctaaatcaagataaatttaccttgctcgtgccattttttacattctctataaggaaaagatatacgaaagttctaagaaggagatagaaattagcctcaccttttgaggatttttattcttttattctcaaactaaaataaaatctcacttttttggatatatatacgtatacacatataggtagagactagatagacaactttgggaaagggaaataaattaatatcagtatcatgaaaagtttttcagaaagctcaaataagattatttttcttattggtatgaaaagtataataaatgctcttaagcaaaaatgtatagaattatttatgaaatgtcacacaagcatttctttttttttttttttgaacataagtcacacaagcatttcatatagtagaattggttacttcaattatttatgaaatattgaatttaatacccattagaaaaaaatttaatattctttatagcattacaatgaaagctctttgctcctctcgcttgattccacatatatatattttaaaaaaattataaaaatatatatttttgccgattaaaagatttagaatagtgagattctatccaataatagcacatggaattaaattcccaaaaaattaataaataatttgttttgaaattgctacaagccaatagaaataaaagttaatgaaacttttatggggctcctcctagtcgtagtggagtggagaatcaactgactgatcaccagacatctggtaatattttacctttttgccctcggagaaattgcatcctcacgctgatattataggtcgtaccgtacaccaacaccaccaagtattataatattaccccattccattcactacattcgtctccagattctcgactggtgcttagtttgtttcgtctcgctcaatcgagtttgaaacgtcaacgactcagaccgagtcagataacccgactcactatatttagagaaagacggggacggagagagtcagacaatctcatactctgacgctgtcctggtctttccggccattgaaagaactctcgtgattttttttcttcttcagtgaaaatgagctcagtcgtacaggtttttttctttctcgatctcgttgattactttctgattcaatttgctttggctaatttattttattggtatctttttgttaattagggtttcactaagtcactcgccatgactgtgctctcagagatcggcgacaagactttcttcgccgccgccgtaagtaatttgaccgtaatttcgccaatttttgccgtagttttcgtgaaacaacaaatattttttgagggaatgattgatatgtttgaaatttggtagctagaaactgatatttttttagtcaattattaatgattagttgtggtactgtgaagctctcaatgatatttgttttaaaattttgaggtgataataaattgattagtgtttgttttttgtttgtctctccaaatattatatctatatttagttggtttggttgagcacatttgtgttcagaatcgcactccaatagttttaaaaaatttattaaattattcgatgtttatataggaaaggtataattgaagttaaattgcttttcaactgtctcctcttatatctgaatctgaaaagacttttttttttttttttttttttgtcatttgtcatatttgatttctttaaattcatttatttatttgttattggttacttgtttccaaatcgattttctgctccgataatatcagtattctgtattcctatgtggtatatgacatcatgttatgtttattttgaagatcctagctatgcgccacccaaggaggcttgttttgactggttgcctttcggctttagttgtaagtgtgttgtttttccacatttttatgcttgttggtcaagaaataaatcaatttcttgttttgaggcccctaattagttcaaatgttttccttcttaggtcatgactattctttctgctgtcgttggctgggctgctcccaatctggtaagcgtttagatgttttttgtagcaactctcgattcatggttgactgaactctctatttgtggtatcttgtcagcatgaagcttactctttcttaaaatgggatttcattcatgagctttaataatgtgcagatctctcgtaagttgactcatcatgtaacaacattgttgttttttggttttggcctgtggtctttatgggatgccttcactggagaagggtaaggagtttttttgttgtgtttgctatctttgttgtattgttaacttaataatgctttaactggaatctaactctttttcacttaacagagaagctgaagatttggcagaagttgaagcgaaattggttggtttttttatttttattatattgttggataaaactttatttcttcttgaactgatctatgttgtggcttcaacaggatgctgattttaagtccaattcaggaaccgccaagactaatagtaaggtaactgaaaatgaaaccaaatttgcttcacatggctgcaaattgttaatatacctcctcctcatactagactgtctgctcattttttattttttttccaaatacttgaatattttattttctaacaatataatcaagagaatttagaacattgttatgctgattgctgagcactcaggggtggtattttttcttcttgttttttttttttttgaggggatatttttctttttcttgtactcatgttttctttttctttttttggtatgttcatcccaggatgttgacgaaaagaaaaaacagaaacgaccttttctcacacaattcttttcaccaattcttttgaaggttagacttttcagattacaaatttaatgctaattatgattgccaaacatttaaaacacttcccccatctttctcttttgacaggcattttccattactttctttggtgaatggggtgacaagagtcaggtaagtacaacaccctccaagtggatagaaggtagtagtttctgtccacttatagtaatttaactgaacttccttcgcagctagctacaattggtttagctgcagacgaaaacccaattggtgttgtacttggtggaattttgtaagctgttctgtttattctaactatttatgtatttctatcaaagattaagcatgagggtttctctctacatggaatgtgttttatttgaagttagctatttattatatcgtttctctgtttctcctttgtgcttaattagaaattaaaatgatacatcaaatgccaaaaagatcagttctttttgggtttcaggagtctgaatctataggttttaagatcacctattctcagccacttctcttgcatccagaaatgactgtaacatattctattgttttgctttctttgtgtgtgtgattagagacttgtgaagttaaaattctggacatttctgcatataaattatgattatcttttatgtatcttaccaagctttcatttttcagaggacaagcattatgtaccactgctgctgtcctaggtggaaagagtttagcatctcagatatctgagaaaatagtaatcactgcaacttatattggcctacttttttttttttttttgtcttttcaattttctaaatattcctagtttataaacttatattatgctattataagcagcgctcatcattaaagaactgttgtgctgcaggttgctctatctggtggggttcttttcattgtttttggcttacaatcattcctatcaacaatggactcatgatcctgcaaatggttagtttgtgttctctagtgtcttttcaaggtagcatcttaaaggatacaattcttggagtctgaaaattcatgcacttctcattgagattcaattattagtgggtggagtatcactgttgagtgttgaccacacccacttacttatttgtaagactgattccattggtattttctcttaccaactagggatttgtggaaataatgactggatgttgaaatagaggcgatggattatgggaattgttagatttataaatttgagaaaaacatttttttcttaaaaaaaaaaggtcgttggttcaaacaaacttgaatttcaagcaactcacatgttcacccgactttcacacgttcacaaacatacatgcatttgctggttggtgattcctactaactctgggtgatatatggtttttactgttttttgcattcagggattattgcctggatggtttgttgaactaaagaaaatgcaactaaaaggaacaatgttaagagttcctggggtcatgtactgtttaaaggttttttattatttagtggagcaatgacccgggtttccaatttcaatgatcttgtgtttacaaggataaacttgtatgtctttactggcatcttggccatcactcataagatgttgcttttgccatgagctgtatttgatgctaataaataattttatcaaataatggtatatttatccttagtcattaagggagggaggtgacttcttagactacaagctcttaggtcttttttttcttcttcctgctgtgcatttcttgattttccctccctcagtttttgcatcattcggtcgaattatcatacgaatttagagaaatttacttccaaacatatttggccatgggatttgtaagaccatctccaaatatgattttaaaaaatgttaacctttgacaaaaaaaaaaaaaaaatgtacaaaagttatatttagcacattatttcaattgtcttctgatgaaagttagcattttaagatgcaaagtaaactgatataagacgatattaataaattaaatattaagaaaaagaattaatgcgaatactgtgaatataaaagcatttccattaactattctactctaatttctaaaatactttattaaaatattaatgaactaaatcgcattttgcgcaatttttttacaataattataatatttttagttgctcaatgtttatacttgattaaatttaacattttttaaaaaataattagatccaatccatttaagtaacaaaatcaaattaataatttacttgatttgatttttttaattgaacttttagtttataacatacttaaacatataagatctctctctaaaaaaacaaacatattctaaaaatcacatgaaaattaaacattactaaaatcatttaattttaatattactacataaaattatcaattttacaattttaatataaaacaaaactattaaagtaactataatagtttgggcctggttgaggatgtaggctctgctgtgggaacttctgtgaacttggttacccctgtggaggaggtgaacaatcctcctccacaggcgtcatgagaggcattgcgtggaattgtagagggttggggcagacctctacaattcttgaagttaaagccctagttcggtcatgctcgcctgatttcattttcatctccgaactcaaaagtgatcctgctcagttggtacgttctctaaaaatttacaattttactttaatattattgttccggcggttggtggtgcaggtggcatgctcttggcctggaaaacagggtttacttttgtatctcaaagaatcaaatttctggtattgtgtactcagaccctgaccatcatccctggctgttatcttgagtctacggacccccgtactttcatgaaaagaaaagcttctggtccaagttgatggatctaggtcttaaatttggagggccttggttgattctcggagatgtgaattttgttctgagtaactctgagagaagcggctcgaaggggagagaccaattcttgccgtttatttcgaatttgatcaatggatttggtttgattgacctgcctgttaaaggtgatcgtcttacgtgggacagccatcgagatggtgacgctcatgtaaaatcggcccttgacaaagccttggctaatggggagtggccaagtcttttctcgaaggcgttggtgatctcttaccatacgtgcaactcagaccacaggccccttcgtatcaatactgcgaaccggggagctaatatgattgtggagaatgcttggagctcggtgtttcatagttgggcctcggcaaggatttttaagagagtgggcgctactcaccttgctctcagcaaatggaatagatgtcagtttggcaagttggacaaccgtattgctagactggaaggtcacctgaattccatccagagcctcctttctggttcaagagtgtgggccgaggaattggaaaccagaaagtctcttaatgaggccctaaggtgtagggccctttactggcaacaacgatctcggctttcctggatcaaggacggggacaaatgttcaaagttcttcactactgccatcataaaaaatagaagaaatgagattgaggccatcatgaacaaagacggggtgtggttgagtaacaggaagggacattgggaaggaattctcggatttcttgggaagtatcttcaaaggcacgatatatgggctggtggaatgcttagaccacctgatctcggaccacttctccctccaggagcaaagggatttggttaccattccaaactctgaggagataagacatactctcttttccatgggtagtcttaaggcctcgggaccggatggtatgtcagtgttgttctataagcactattggaattcggttggtactgatttctgtgaggcggtggaagattttttcatctctggctccatgcacagaggagttaatgctactaatgtgatcctcattctgaaagtagctaacccgaagaaagtctcccagtttaggcctatttctctatgtaatgtggtttacaaggtcatttttaagatcattgcaaatagaattcggtcggtgcttcctagattaatttgccctacacaggcggcttttgtccctggacgaagtatcaacgacaataatgtcttagtccaggagattatccactattttaaacgtaaaaagggtaaggaaggacttttcgccatcaaaattgatgtggtaaaagcttatgataaattgagttggagttttattgatcacgtgctcagcagcttcaaggcccccgacctctttcggaaatgggttagccaatgtattactactacgtccttcaacattcaccttaatgggggtaaggttagcagtctggtctcggagtgtggcttaaggcagggtgaccccttgtctccgtatctcttcatttgggctactgacattctctcgcagattctagagaaggctatttctggtggcgttatcaaagggatcaggttgagtagagacggccctggattatcccatctcttctttgttgatgatcttatccttatgggtagagcaaatctcggggaggcgagaggtttctgaaactgcctcgagaaattttgtagttggctggccaatgtgtgaacaagctcaaaacttctattttcttcagtaataacaccagtgaggggatgaaaagggggatcttacaagagttggggctgaacttggcggatacgaacattatttacttgggcctcccgctctttagatcaaagaataaagatgcgaattttaatttcatccttgataatcttgttttgaagttacatggttggaagatgaaaatgttgtcaaaagcaggacgggccacgcttattaaatctgtggggctggctctgcctgtgtatactatgcaaactaccaagctctctaagaagcttgcttcaaaaatcgatggtatggttaggaacttttggtggggttgtgagcaaggaaaccgagggttatacctaaaggcctgggaccacctttgccttcccaaatctagagggggcctggggttttagaaatctatggaattcaaccaagctcttctggctaagtggggttgggccctccttactgaggatcaatctctttgttgcagggtgttgagagccaagtatctgaaaagcaaaccattgtttaaagcaacctataaagattcagactcttggttctggaaaaatgtggttaaatcgacagatattctcagaaaaggggcttgtaaggttataccaaatggggaagaaacaaacgtttggaaggacccctgggttgttcacgggaaagagttctacccgaaacccattacttcttgtgctgagagggtgactaaggtggcggatcttctaacgagtgatagggattgggatatccccaagctcgagtccctgtttgaccctgaaactatcaatgatatcctgaaagggggcagaccttccggtcaagggagagacaggtggattttgaccaaagaaggaagggggaaattcaccacgaagtcagcttatttgattcaagctttggaaagagcccccgcctgtgtggtggctccagcactatggaatagactttggaattctaaagttctggaaagacataaaatcctatggtggggtatccttttgaatgctttgccggtccgtggaatcttggccaagaaaatccaaattgaagatgtgacttgccctttgtgtggggaggctgaggaatcaatggaacacctgttcctatactgtaactttgcttaccatctctgaaggtcttctccctggggggtgttcccaatccatgactctggtggtcgggcttgggactgggttaaatttctttggaacctaaaagctaacggtgtggactctgataagttattcctatatgcgtcagtcgttgtggacactatttggagaacctgaaatgacaaggtacacaacttgaaaccgcataacattttaacgacaattgactctatctctcaatgttatacagattatgtggcatgcttatttcctccgatgttacctgtggctcctcctgcttggacaccgccgcctgaggactggatcaaaatcaactgtgatgctagggttggtggaaattttatgtgcattgcagccctggctagaaaccactcaggaaatgttctgtgggctgttgtttccatgctcggattcagggacccgttgataggagaagcgactgcatgttgccttgcccttgattcggctagactcagggccacaactttgtcttggtggagagtgattcgggaatggttatcaaagcgctgaagggtatacattcgttatggaatattgataattatgtctctttatgtaatcaactctctaaaaacttttaatcgtgtaatttttcgtttatttcgtggtgttgtaattttgctgcccataatgtggcaagatgggctttcgctcggaacattacaagttttgtggaaccttccttgatacctatttctatcctttgtaatgaccatgaggtataattttcctatctatataacgcttaatttttctaaaaaaaaaactataataaaataaaaggaataattaaaatctctaaaaatattaatcacaacaactaataagatgcgggctatgaagtgtttttttttaagattttttcctaattaagtacgaaatagtgataggaaataacaatagtaactgtgtaaaatatctaacacttgttattttattgaattcaattaatattgaagtttattaatgtatggagaaaataaataatatagatggaagagtaaagatattttggttgttgcttatcatatgctttaattaatagaaaataagcttattttgttctaattctcgattagtttaagggatattggcggctaaatcacctgaactttacgttttgtaacacttaaccacaaaaactaaaattttggtggcaaaacctaatgaactcccatttcgttttgctct

SEQ ID NO: 13862 - DNA, 4483 bp, Cannabis sativa
gtaacttttgcaaaacataggatccaaaatagtatttaccttaattcttcatttccctccaatgtggagtggagaggagagtgccattgtgaacccttttcttttgtcaatactctcactagtcaccactagagatgagccgattaattaaattataattaaccattaattaatgatatagaggaacagacatcggaccacctatgcatcacaaacaatttttctttttcttctattttgcgcaagatgcatcacaatcattttactagagactagactaaggaacgaacattcttttctactttaatataagcatgtagagagatacacattcttaactcttaacaacaaaatgagcagtaattgcttttagactcattacattacaaagtcaaaaaagctctacatatccacctacattatacactttgataccacattacatgagataaattttctcaagttcaagaaaggaatccaatctatacattttctcggtttttttttttcttcataatttactttctcatttgatatataactaagtatagtatatggaaagaagaagaaaaaaattatcgatatctacatttttctgtaaatgcacaatccatggcaaggagtgcaagagtatgtatgcacagtttgtatgaagagcaaaaactagtgtgaagtgaagcgtagtagtatccctctcaatcttgcatgaagttttagctcaaaaaaataaaatcaaaggaaatcaaatccctttgcttcaactcgaactcaaagaatagaatagaattttccaacctatttctttgcatcacatgcgattctcaaacagatcaggcaatgttatctttccagaattgttgggatccagcttattgaattgattgcatattatcattatgtctttctctcctatcttccccatctctttaagcttgtatattacgtattctgacttgctgaaaaaacaagaataccgcaaacaaaacaacaaggaataataataatgattaaatattgattagatcaatgattacatgtaatgtaaccttaatgtctttgactactataaaagaccattaagcatagccatgacttttttgatatgcttgttaccatttccatacatggataatcaagttgtaacttataacagcaactacttgcctatttgcatgcttcaccatttgaaatttgagaatccctcttgggtgaaattctttacattttttgaatactataagaacattcatcataatcataactttttgatcttatgtttccaatttcttgcaaggatgatcaattagcaacaacaactacttgcctatttgtgcaaatcttccctaaacagtattatcaccaataataataaggttatcaaataatcaatcaacaatggaagtttttctaatctacctgacaagacaactaactgttccaaatgttttgattatatttaatactaaaaattaggaaagatgtgaaagaaaaggatagcctttagcttaccttatgaaaccattatggtttatgtctgcagcaagtaagtcctcaacggtgatttccctttgcaagacccacttagcaattctcctgtgcctcttgtcaatccttgcctcagccaaatacaggaacgcccttgccacagccagtgtcgataagagaagccaaatggccgcaaagagcctacctttaagtgtcttgaaggctctgtcaccgtacccaactgtggttacagacatgacagacaagtaaatggaatccacccaatccaactcttccccataatgcaaaaacataaccccaacgctaatacacaacaccaccactcccagagccaaacccaccttcagtctaatcctcatcctcccctttgccacatctatgatataatctctagcagagaagccatggtggtggttatggttgtgattgtgattgtgattgctgttgttgctgttatggtggcggttttgatcgtcgtggtccatttgctgcataccagtcaagataatattttcttgcacgtcgagcacataattaacaaccccactaagcaaaatgtcaatgaatccgaaacccaccaaaacaaaaacgcaagcaaagaccttggtgaagggggtgagaggagctatgtccccataaccaatagtacacatggtgactatacaaaaatagagagcgtccacgactgggtgagtctcgacgccggagaagtgatcggtgttgaaagagtagatgagaacacccaaagagagatagataagtagcaagaagaaggcttgtctgacgatggagctggagtcggattgaggatggggaagctcggatgtcttgggtttgaggtcacgaaccacggccatagcgggagccgtcttacaacggtggagactgtgggttcgtctgggtgcagaggatgattgagggtggtcaagttgttggattggtattcggaaatcattgtgaagagggtttgtttgggagtgtagcaaaggctgagagagatgggcatcatcatcctccatagacattgaggaaagccaagaaagattgagttttgttgttaatttgggggaaaagaggagaagcgaagcgaagagatggttggaatggtagttgggttaatgttgggagttggagttggggccaattagagggaaaggacttggtatcataggctacgactgaacagtgggacccacacaatgactagtcctcctcacaggctctcttctgctctgctataactaagaccgtgtttggtacgatcaaaagattgaacccccccacccccttttttttaagaaacgaaaagatttaattttttttttgttgacgtaagattaaactttaataaagatgcaaaattaaaaagtttattttgtaactaggaaacaaaattttgtttaataagtcataaaactaaatgtaaaaaagattttttttactatttacttttttatggcatttttaaataatacattttgtatatgagatttatgttttattttcccttttatgggttttataaaaaccctattttattatatttgacccgattctcatattttattttattttttaaagtttttgaagctacagttactatagcttactttttgcatggagtagcttagtactcattgcttcttacagccattgcattttcttcaatcaatcacacattttgttaattcaacttcattttcgtttgatttttctctcagctactattcactttttttattgagtctctgtgattcacgggtgctttatagtgtaggtaaggggaaagcaaaggttgagcagccatgagttcgtggtcgtagcagcaatgtacatattagacgcagtcacgacccaatgaacaggatgctctattttgattgtattttgggaatgcatgtttatgttgcaaagcactattaaactagtttgtaaccattttgaaaacaagggaccccatagttaatattacttatcttttattataaagaagtttttatatgtctgattttagttatcaaaaatttaattacccacacttttggtataattatatagtatataaataagaatttaataaaaacacacacacacacgtggcgtccctgttggacttggcgttacactggtggttgatggaagggataccaatatttggggggacccttggatctctcattgtaaagacttcttcccgaagcctattgattccactgacactggtttgagaaaagttagcgttcttctgttaaatagtggtgattggggtatccacaagttaacagtctgtttgataaagagactgtctctgcaatcttaaaagggggcagtccctttggccagggtaaagataggtgggtctggacacttgaaaataatggtcggttctcgtgcaaatcagcctaccttgcccatgctttggatagggctcctcagtgtgaggtagctccttcgctctggaacaagctgtggaatagtaaaatcttggagcgtcataaggttctttggtggtgtatcatgtccagtgcactccttgttcgttctgtgatcaggaaaagatttcatattgaggatctgagttgtcctttgtgtgttactgaggaggaatctatggaacacctttttctgtcatgcagtttggctttcatttgtggaggtcttctccttaaggcatttgtcctgtttgtggcactgacattcgcataagggattgggttaagtttatttgggacctcaaacataaaggcatccttgctgaggatgcttttctctatgcgtcaattgttgttgatccatctggcggatccgcaatgacaaggtacacaataatagtccagttgatgtaaccaagtgtattgactctattcgtacgtcttttgcagattatcatgcttcttttttcctgtgtcctgcttcgagcttggtggataactggcaccctcctccccaggattggctcaaacttaattgtgatgtt

SEQ ID NO: 13863 - DNA, 16113 bp, Cannabis sativa
ggtaaaataaattccaacactggaatccaaggatctgaggcacaattgattctgcatccttctcctattttccatcttaggccagctgtaagtaaatctctactctaatggatgccttgccaagtgagggaaggagagtgtccaagactagcatcaagaaaggagttgtttaggaaatatcgactcttcaaaacctttgcaaacaaggactccggttgctttagaatcctccaagcttgcttagcaagcattgcttcgttaaaatgaacgaaggaccgaaaccctataccaccactatccttccttttacacaaaagtttccaagagcgccaatgaatcttgctgccattttcatttagaccccaccaaaagttggccatcacagactcaagctgattgcaaaaataaacaggaagccgaaagcagctcatagcataagtagggatggattggacaaccgctttgagaagaaattcacgacctccagctgaaaaaatcttttcgctccaagtatgcatcagtcgccagattttttccttaatgtcactgaaaatttgctttttatcccgcccagagtaagatggaaaacccaagtatcgttcatggcactcacaaattggcatggacagttggcgatggaaaaaaacttgagcagctaacgtggtgttgggtgagaaggacataactgatttatctggattgagaacttgccccgaagctctgtgataagtgtccaaggaccttttaagtgcaaggcaagaggattcattcgcttgacaaaaaaggaggctgtcgtcggcgaaaaacaaatgggagatagaaggagcatggcgtgtcaacttgaaaccatttaggtgaccacttatctcctcatgttggagcagtctggataaaccttcagaacaaattaagaacaaatatggagaaggtggaaaaccttgccgaagccctcttgttggaagtagagaacccgtgacctctccattcaagagaaaagagaagctattcgtacgcaagcaattcataatgagtaagatccattcacgggcaaaacccatcttattcatgacttcctctatgaatctccactcaacacgatcaaatactttgctcatgtccaattttaaagttgcaattccattccaccccatagttttgttcttgataacatggaccaactcaaaggcaacaagtatgtatcagtgattaatcgggttggcaagaaagcactttgagtatcggagataacgtaaggaaggacattctttaagcgattaacaagcactttcgtgataatcttggatataacattacaaaggctgattgggcgaaagtcttgaagccgctgaggttttttaatcttgggaatgagagtgatgagcgtcttattgaaacatgtagaatcagccccttcatttaaaacactcaagacaacccttataacaagcggcccaacaatatcccaattttgctgataaaacatcggagacataccatctatatcgggacttgtgtctggtgccatagaatgcacagctgaatgtatttcagcagcttcaaaaggcttgagaagttcattattcatgtccgtggttatggttgtgggagttgcatttaaagtatcagcaagagcatcctcatcaataactgaagcagtgaaaatggaggcaaaataatcttgaattaccgaggacatttcagccttagaagagacacgacaaccagcatcattttgcagaaattttattgtattgttggtctttctagccgaggctttagcatgaaaaaacttggtgttacggtctcctgagtttaaccaatctacccgagaacgttgttgccaatagatctcctcttgttccaatagatcatcaagcaaagcttcacaatttttcaaatctgtcatggcagcagtagtacgttgggttacattatttagcctctccacccgtgcctgagcatctgagattttgtgcttcatgtttccatacttgtcaatgtgccatttttgtaacttagtggcacagtcgtccaagttattaagcacagccgcaattggatcattagttgaggagttgttccagcaagctgaaataatttccttgctttgagtatcagagagccataacttctcaaagcgaaaacgactgcgtcttttttcttgctgaagtcgtgaagatactggagcaaagacagcagaaattgctcggtggtctgagcaaaaaaaatccagatgttgaactgaaggagcagagtaaaaattgtcccagagatggttcacaaaacaccaatctaagcgctctttgatcgtgttaactccagagcgatttttgatccaagtaaaatggtcaccttcgaaagaagtttcatgaagcttacaatgatcaagggtctttcgaaaagcttccatctgtctatcatttctgaggcagccccccaacttatcattattggataatatctcattaaaatcgccaataatcaaccaaggtacagaaggagaaacatcagcaaatctttgcaaacagagccaagaggcagctttattttgagcctctggagcaccgtagaaggctgtaaagtgaaaagaaacttcatttgcagcagaagcatagcaatcaaaaaaagttttaccaaaattcagaagagtaacatcgatatcttgttgccaaagaagcatcaaagtaccactaaaacccgatcttggtgattccaaaccatgagcaaagtttaaagattgccgaaaatgagaaatagaattcggagcaagttttgtttccataagaaacaaaatttggggcgattgttgtttgatcgaagatgcctaaatgcagacgggttccctaatccccgcgcgttccaactcaaaattttcataatgagtcgcgggattgcaaagcaatcgccgcggaatcatcaataaagccatctgaatttaccactaaaatttaaacttagttcaagtacaagtgaaataagagtgagcgtttaataatttaattgctaaaagcttgctctttcttttttaatagcattaacaataaaatcctcatatttatttaaattgcaaactgtccccattctcgaactcttttttttgcctttggggggttttgaatctttcatactcggtttcctttggcctccttccctcccagtcccagtcccaaccccagttccttcgaactggtaaaaacgcaaatccaagtccagaaagagagagacgctaagatggtgacgtctcccgtagtgaacacctatccactttcgagctacaccttcgggaccaaagagccaaaaatggagaaggacacttctgtagctgatcgccttgctcgcatgaaagtcaagtatatttctttattctctttcattttattttccaggaaaattttctaaacccttttttttttcttttttctttcccctttgtttctgtttcacgaaaattggacttgtttttatttgaagccctagaagatgaagtaggaaggggattgcgaaaaagtcgatactaatttttcgtcgtttctctttttgtagctatatgaaggaagggatgaggacgagcgtggaagcgattttactggtatgtgtttaatttgttctctcttctgccatttactttgttcttcatgatctcgtgtgtggtcttattatgttattgattaggcgtgggttgttagaaccaataatccagccctaaactgcaggggcttgactgtggtgattgatgttaagactctataacttagcttctacaagttagggtgtcaacgatgctttgataatgaacttaattatgtatcacttttcatctgttatttaatgggagaggcccattctgctttacaaatgtataaatcataatatggaatttggccatagaattattttatagggaaatacttatctatgctcactatgtggtcgtcgtggaagacatgcaaaacttggattaaagaataaatagaggaaaaatggcacagtgggttctcgtttttaactatgtttggtaatacttaatgccggaatgttggatgccattttctccatattatcctctatttaccactgatacttttgttttaagatacactagttatgtttacagcagtttcaacatgttccatgttctgcaacctttcaggttcaggaacacaatcatccccacattcttttgctgcaaataggaaacacattttgcaaacttccgggtggacgactgaagcctggcgagaatggttggccttactttttgttattacaatgtttggcattttttacttttcaaacaaagatggaagcaggttcattctcttacttatcttctatttgtttttggggcttctttattctgcagaaatagagggcttgaaaaggaagctgaccagtaagctcggtgcaaattcacctacccttgtgccggactggcaggtaattcaccgtctgaatttcctactcttaggtctgttttgttcttagtagctgaaaatatggcaaagtgatatggatagtgggagaggtgataattcttgttttaggtaagcagtgaacaataacaggaaatggtattgcaatttgcattgtacatttgctgtagaaattgaattcattacctgatgatttttttgaggttatttctgtcaacatataagcttgtctattggaaatcagcatctcatctacacagaatattcactctatcttaggagtgtccggtcctgaagttttgttttgctattaatttaatcaatacttgtttttctttggcatcttgttgcagataggtgagtgtgtggctatctggtggaggccaaacttcgagaccataatgtatccatactgccctccgcatataacgaaacctaaggtaagttctgttgaaagatcacctatgggatactttacacattccatgttgttgtctcattctttgtctcccctgtccctattttttctcttgtgatttaattgatatttattgtccttaatttttcattatgtaggagtgtaagaagctttttcttgttcacttatctgagagagaatactttgcagttccaaagaacttaaaacttcttgctgttccattatttgaactgtatgataatgttcaggtatggttttttatgaaaatctactcttgcaatttattatcatctgcctgcattcatgtaacttagaattacgggagcttttcagctgagaaaattgctggaaattacgtttattaattttaaacttcttaatagtttttaggaaattgttaggcactcacaggaggttttcagctgacaaaatttgtaggagttatgtttattaattaaaatttatttatagcttttatgaattgttaggcatccattagatggttagccttctttaggtgcctctatatgatagtgtcatagtatatcaaactgtgccgttctacgattgttatttgtccacttgtcttagttattattaaaggtattagtcttattatgttaaaatagtgggaatgagttattttttttctcccccttccacttactaggcacatcatttttctttgaaaaccttttgataacaatgaacgttatttcttgccagagatatggaccagttatatccaccattccacagcagctttcaagattccaattcaatatgattactacataaatttgcatgtcatcgaaagtccctcgacagcacaaagcttatacagctttataccttgatataagtttgcggattacgggagctcatacttggactttgattcataaattaaactctagttaggtttttgtgagggttctattatgcagatgactgaaaagcttatctctggtatggtttcatagatcatctatctatctttaattttttaagaacgttggctagtgtctttgtgatagttgtggtatctttgttctaacataatttatgcggaaatttttggagttcttaatttataattaagagttatttctacttacatctttacatgtttagagggctgtgaatagttttaaaatattctgaattagaatgacttgaaatttcatagattttgcttcaaatgtaacaatagtgtaatttccagatgaggtaaatcttaacattgacaggccaggtcaggccagtttcttgtagtttattatgatggctctgacaacttattaatttgtcttggttggatggtttgttgttattcaaacattcttgtagaatttgtgcttaaatcaaatatagtttaaagaaaatattacgaattttgtgtacgcagcagcagcttggagcaacaaaaactccaactagtgctgatcatgcttttatgatgttcgaaagttcttgaatctatgatatgattttattttggtcaaaactttttatttttgatcaagtaatgcctccttaactaggaatacttgctcccttctcatacagctacagctagattgaccatgcgtggcccttcttatctccattgacaaagtctcttctccatatcttaattcctatattgcattacactatatttgccattgctacatgaatcattatgaatataaaataagaacaatttctgctggcaccaaataaaagaaaatatcctaaatggtcaaaaatgttaaatattatgtgtaaatgtatgtaataatattttatattaggttgtagagtacattattgtaatgttcttgcaccattttggatatttagtattttactatactatcagtgataaattcgaaagattctgagtaagtatgggtatgtaagcaagatcaatgtcgaaagcttactctgatacaattttagcttgttcaacaactatatgaagtttgttatagggcccattaaaaaaaagagccaacccatttagcaaaaatggtccggcccattgaagcatgacacaggcccggctgggcctgcttttctaaatatgggctgactcaactctgtacacttttactatattttttaaattagattctatacttttttttttatattgttattttttatttttatcatttttttttttaaatctatcattttttttaatactttgccaattctacccctgtcacctcaatatactcgactcttttatgttagggtattttgggtacaatacatggtatgttttaattaaatataaattagaggtagatttggttaattgataaataaaagaggtatttttcaatatactctcttgattagtgtaattaagtaatatgttatatattatattaaattataatatgtaaaatattatatattacattacaccccactgataccctgtaggctgtaacacagtatttgacaccattaatgccccaattcgcagcatgtttcatgtcgagtttttaaatgaaatttaatattataaaaagaaaaaaaaatcagaaaagcaaaagaggcggctgaatttcgaagatgggtcattgaaataatggcaggagtgcgtactttgaatttattatatctaaatttttatgtaattggcagattttattttagtaaaatattccaaaacttttaagaagtaatttaaaattgaaacaccgtcccttattaacccacaaaagaaaatcttgaaagctggtatagattgattcttgcttgctgcttcaatatataaaatataataatacatatatgtgtatatataggtagggttgttgttgaagaacaaagatatcatacgttggggtttgtttgtagcataattattgactatgttaagtgtcaaattgggagaagaaaaactatacctatttggtcgaaacagcaatgtagttgacgaggtctctctctagctacctcatattcacaaccatgtggctattaaattattcattactgttttttttaatactaattgtcagattgttaaaatctttatgatcagtaatccaattatacgtatagataataaactggcttcctggaaagattctaattattattaacgaactttaaacatgtttatatatttatatatatatatatctctttttctcaattggtaatagtaatatatatatatattttttaatattatataaatgttgttattagctgtccctttcgtctttttttccaaacctcaatcacattatgcatgcatgattcctcgttctggggttggcaaagttcgaacaccacaaattttaattattaaactctaaacctaaagacttgttaataggtctttttttttttaagaaaaaagaagaaaagtgaagcatgaaattaataatttatagtttcttaaacaaactttggcttaaatttctatgttaatgatgccaagccaaaccttcgtctttgtattcaatttttattgctgtgtgttttggaattgtatagaatctaatatttcaaaattgtaatttttttcccaaacgcgttcttctaattaagtactagattctttgtctttcaacgtatatttaaaaatacattttcttagtttttattacaacataaattggtgtgcatggatttttattacatacaaaaactaaatattataataattaaacaataatttctctatgcataattataacacaaaatatgaaaagagtttagacaaaggtatcaaccgttaatgaaatcattaaagagttgaaaccttattaaatataaagtttgtatatatatatggacaaaccactagttaggtgactcttgatgaggaagtaatattcaagtcaaatttggggacttttgttcttcaaataattatcattaattttcaaattaaagaaagtgagctttttggcgacacttgcataatttaatctttatttttgtgtgttttcgattataattttgaaaaagaatgagctgcactataatagtttgttagtcctgacaacttgggctcacaacacacatttatatttatatgtatatatacatatatatttttttggtaaagtaagttaatcatgaagcaacatcaaaattataaaaattatattaatgcgactcatgaaaaacattcttgttaattacagattatcatattaattaataattatgatgatataaatatacttttttaagttgattaatgtcaaatcaattatgaattttcccagaaacaattaagaaaggtgatgtattaaacagtgtaatagaataatgcttagatcaataatgtgggaattacaatattttatacataccaatggattcgtattttattcgttagaaaatcaatgaataaagtacatacatatacatatatacatacgtatgtatatgaagggatcatttaattttgtattagtttttggctaagaatatatgttttataaacctataaaataacgtactgtattcatgtatttttgtactaaaaagcataacaggatatttgttggagaatctcctactaatatatatgtacaattttgtaatggtggtctttctttatagagccaataataaattatttatgtgtaataatgtttataagtaggtctaaactaaatagttgacatttcgaagcttcttaagtttctatcttatatgtgaatataatgatacttggaaaaaaggaaagtaatcaaataattaatatcatgtataccataaaacatatattatatgaccctataactgcagtaaaataaattatcatatacattcaaccaaccactacgaatcttagggctatcctagttttattttatattcaatatttttcaatgactttgctttactcatctacatataatatatggccaataaaagtgacaataccataatgatacaatcagttgtgtcgttttagagggtcatttttcctttttatttataaatgtatagtgtcgtttcctcttgttattttctgtttttgcttatgctatgttccaaaatctaggtacgtagatatgaatgaatattataaattgtagggactaaataaaagatgtatacaatatttatatgtactagtataaatatatatgaagatattttaatggttatatcaaatatgtaattatgatggttacatttatctttagtcgtttagatcatttttaaacacttatgattaatttaaaaattaaataaatcacttgtaatttgatattaaccttattttaattattttctaattcaaaataaaaagtatttagggattttttcattttcactttaaaattattattatttttttttttatgtatttttataaaaattcacataacaaccaacggagcaacctaaatcgcaaccaaaattcacataattcacatagcaaccacatagaaaccactagagcgacccaaaatgtaaatttgaaaaaaaaagttaaaaaaaaaatagtatttagggcaattcctcaaatatttataaacattaattgtaaaaatttattaaatactttaattaagaaattaatttattttaagtaaatagttaattataattaatttaaatctaaaaataaagttttacatgttagtaacctgttatagcaggttataaaaaatgtaatcatcacagttacatttttaatgtaaccatggaatagtcacatgaaaaatgtgagtaaaatacatatttaaatgaaatccaagacattacacactaatacttgggggtgttcataaaattccatgggaccaaccagtcaactctacattttatgtaatttaccccaaagtgggacgaaaacagagaccttaggcgggttgtggggcgacccacacccatcgcttaacctataaatacccccttcattttcatgcaaaggggtcaagcaaaaagcacatagcaaaaactttgctaaaatcatccttgatcttctttttcttcttcttagaaaggaaattgaagaaaaagagttagaatttcctgcataacactgtaaattaatcaatatttcccaacggggccaatagactaactcgtgaactaggggtttgttaacacccaaaccacgtaaaaatctccgtcttttattgttttgctatttattatttctttagctcttaaatattttagttttcaaaaatttggtaaatattttggtactttcattaagagctgaagagagacgaaaactattgttactaccatggtatcacacgaaaaatagttcacaaaaggactcccaaggatggtcttgagacggttatgaaggatgtaaattccctttcactagaacacacccagctgagcaatgcgagaggcgaggatatgtccaacataaacgttcaagaggggggcttaaacaaccaacatgaccatgttggcgatgacaaagatattgagaaccatgaagaggaagtagtagatgatgagggtcacgccaaagatgggttttacaaaggcgagcactgttacgaacacgatcctgaggtaacaagagtttccaaggagttttttgaaactcgacaaaatctggctcgttaggaaagattttcttgaaagatggaaacaaatttggactgcctccgaagtaagttcacagatctagacgaagaagactgtgatgaaaatccttcaatagaatgtgtcgaaaggaacaccaaggagaaccccactggcgttagcacctatgctcctatacgggacaagggaaatgccaaagtggatgacctaaaatatccccgtgcctctgagcctcctcaaaaaaatgcaaatcaggaaaccagggccttttaggtgcaaaagacgaccaacgcctttgggcttgggatcctttgacacagaaaagtcttgtagcgccgaaggggactgggacgaatgttctagaacctgagggaaggaatgatcgccctagtgattcgataaaccaggacgatggggtggaggagcagtacttcgacaatagttggtccatcgtaaacctcagaaggcgtttaaatgtaaaatacaaaaaatctaagataaaaaatgcaaggtcacgtggtgaggacctcgaaaaccacttgaacgacaaggcatgtggaaagagtctttcagacagtgacacaaaatggttagaagagcagatagttgtcttaacaaaattggtctgaaagaaaagtggggccttcactaattcacaagatgaagacacgaagccttgtgtcaagaggatcgcagacgctcttctcttggagaacttcaaaatgcctcaaatcgagttgtacgatggacactgagatccaaaacccatttagccaagtataataagatgattcaagtggccagagttagcgatgatgccaagtgcttgtgcttttcattgaccctcaccaagtctgcagaagattggtggaaaaggttaactcccacatcagttccctcctggaaggacttacaatctatgttctggaagaaattcgtggctgcccgcgaatacgatttggaaaagggatttatcccgatatcaagcaacaaccaagagaaactctaaaaagttttatccagtaaataatggaatcaatcgccaaaactaaagtaatcgataatatgaagcttgtcgccttgcagtccaggcttgccgatggctccctactgtggaaagaaatgcagaggaagagggttgaaaccctctccaaattcatggccaaggctgaaggcttcattagcttagaggaagcttaccagcaagcctttgaggtccctctagcaccaaccccgataacctctgttctcgcattgacctcatctgctgttgctcttggaatgttatacactcccacaatctacagaccttttgtgtttgttcttgcacctacataaaaccatttctttgggtacggagtggcgtaaactagatgcactgtggcacccagacaatcataagtgggaatactagaataagaagcaagcatctcccagaacaagagagggggaaaggtctgagatgaggagaagcctcaaagaaatccaagaaagagtacgacccgaagtacaccgagtactccagtcttgtggaaagtcgtgaaaatgtattcaggccaacatgtaacatggttctttagaggaaggcccctagaattccccaaggagaaaaatttcaaagaaacccaaagaagcattgtgaataccatggagacgtgggatatacaacgaaggaatgtgacttcttgaatgatgaaatttaaatgttgataagagcgagaaacttagggcaatgggtttgggttcctaacatatatcccaaatagggggtcattcacagacatgtgattgtttctggacaacaatgtactataaatcctctatatggagtaattcatcctcatgttcccagaacatatcctctggcactcctcactccaccagctctgactgcagtggctttaatggcttcgagacctacacatcccccaaggctagcaccacgaccggttgacgggcatgtagtgacgatcttaggtggactgcgccatgtgagaagtttcataaatttttagaggaacatctgagagaattagacaaaaaaaaaaaaaagaacatgtgtgttggcacaaacacccaccaacgttctcggacaacaaacctgccaattactttcacagaggaggatgctagacatgtgcattttcctgaccccttggtcattgaaacttgcataacaaacaagtgggtgcctaaagtcctggtagataacggaagctctgtgaacatcctgtctaaagatgcctttttagcgattggactcactgatgcagacttgtcaccttgtcctatccaactgtatgaatttaatggggatgccctaatagccatggggaggatccaactaccagtcactcttagaggagaaaacaatgccagtgcttacaagtattgtacatttatggtagagtggattgccccacagtgtacaatgcaataatgtgatgttagtcttagtagattttggaatggtaacttcaatacaccatttatgtatgaagttccgttgcaataatgggcgcgttggaacaattagaggtgactaaaggagcgaaagaaattttcacatcgtcttttaacgaacattattcatggtctgggaggaggcaccaattgctcctgggatgggaactcaggtggaagctgaacctatctaggaggactttgagactgagttagatcctcgtgtggggacggaaagagtgatcgagcctataaaggatgttgaagaaattaacatctgcgataaagaccccaccaaaaccattaaagtgggaaaaacctactgtaacaccctgatccatagggacgccacatgtgtgcttttacaaattaatttatagttaatctattagtttaagaaaagtgcaatttaattaaaaactttttgattaaaataaaaacataacatttatataaaatactgctgaatacggggatcccctgtttagaaaattttacactttgtcccaaaaccattattacaaaataggactatattttcaaaataaaatcaaaggggtggatcgtgtctactggaagccgagacactgcggttgatacgtacatagctgggagacctctgactcatggttggtccactttacccttccctttacctgcatcacgaagcacccgtgagtcacaaagtctcaacaagaaagcaagtattacaacagtatataatacgaaataataaagcaatacatagcatacaattccactataaataatgctttttcatcacaaaatcaaatattcagatcaactatttgtctaataagacgaactgttcttgatgcctcatgaagcacccttaccactcatcatcaacaagctacatatgtcactatcgccgcccgataaagcagacgataagtaagaaacctatctacgatttgaagcgagtaattactcattcataataaacggcaatgaccgtatctttatctcaatcataattgagtcacaaatgatgatattcgtttctcacttaacatgcttagtagtgcatttggcttttttacctcagtccagtaatcaggaatgcacgccgaactgagtggaaataaagctcgacgatcccagcttctatgtcatgacaacacaatctgataaataacttaaccaaaattccaaaacaaatcctaatttcaaaatcgaacaaaccctaactttcattaactcaaaataggctatactacacctaaataccctaaactaggtcctggaaagcaccccgagccaaaaaccaaacttgaagaaaatcgagatttgcccctgcagaccaaccagtcgactgattcaccaatactagtagaactggtcgaccggttttggtaggtaagaaaatttctggttttcttcccaaaactgatccgaaactccaccaaagctattcaaactctccagaatagttttataacataaaaacaatgtatacaaatcatcaatactcaacaattcatcaaaaatactcaaaacaccataattgagcaaagtttgagttcttaaactgaatttctcccaattcaagtctatacagccaagtaatcaaccaaagcatacacaaacaaacttaattgaacttagaaaccaagcatcaaaacctatctaaacctacaaccctaaaatcttaaaaagaactaacaaaacctagcttaaaaccttaaaaataaccaaggacacataaggagaacttacctcaaagcaagaatagccttaacttgataaaatcagctgagaacaatctatatttgtgaagaacacctcagattttaaaagggaagagaatggaagagcaaaatttgggcatttcttacttttctaggttataaattcttatttcttaatattatatttaacacatatacctaatattaatttaaaaccttagcctggaaagtccatgcaagataaaattctaaaccccaccaaaaagactattttacccctctcacaatattaaggcctaaaatcaaacctagaatgttatggtcatttctaattttcccttaatgaactaacaattcgactttctaaactagtccagtataattccaatatatctcaacttttatcgtcgtgacattgttcaccactagggatgttcattggatcacatccaatggatttggacccatccgatccaatccaattatttattgaatattggatttttccatc

SEQ ID NO: 13864 - DNA, 887 bp, Cannabis sativa
  modified_base (539)..(540): a, c, t, g, unknown or other
aataccgtgtcagccttggcagcataagatgctagcaaatcctcatcaagatcatcaccggtctcatagagaatatcagacccgtgcatgatagttggtgaggtcattccaagcttgggtttaactattttttcaatgatatctatcaactttgaacggtgcatatttatctcaagcaatagaggtgtctgcatttaatcaaaatgtatgtgattggatcggaatagcagttcaaatgtcaaagctaaagaataatgaaaaatagtattccaatgtgaaaaggcaacctacctcagaacaaacatagcaagacttgttaggttcaaatggttccactggcatcagtaacatctttcttgaaggatgttcaagacaatatgtcatcctgcataaaatttaggaacatataagagaaaagcagctaccaaaaagattctcgacacattatgccgcctacacatattcttatatgctcccaacttgagaggttagacaactttccatccaaattacaatacatgagagagagagagagaganngagagagagagagagagggcaaataggcagtagaaaggaaacttcacacacctatatctttttgtatcattttgcagtaccttgatggcctcaataacaatcaatccagcaataatggcattggttgttgcaacagcatgaacaatatttccagcaatacctttagcttcaaacagactgtgcaaaggaattccaaaagaagaagctcgaatgttagcagcagcagtaacaaattctacagctagttgatcatccttgtcaaatgtcaaattcccaatgtcctgccaaacatccacaccaaaatgatattcaaatctccacacggtagaactaagagacagaaatta

SEQ ID NO: 13865 - DNA, 1925 bp, Cannabis sativa
aataatcttgtaaggactcaccgacttcttgtttaacattttccactgttgtgtacgacagtttgtacgttattgtggcctggaagtgcgttaagaacacgtctacaaaggtttcctaggttgatattgaagcctcaggtaattggctaaaccaatcatatgcattatcttttatggtatctgcgttctgatcgagtcacatatatggacactttatcagtgttgataacataggtcatgcgagttcttatcgagtcatcgagtacgctaggtcatttggaccaatttgttatgtaaagaaacaatctttactaggtcgcaggtgaaggttacttaatcatcgcatatacttagggatatgcgcgacctgtataaacccttcttgatcctatttatttcataatacgcaaagcgtgataatgcgactagactctgtcacgttcacatcatctcgcgagtttagttcaggcgaggtttattctcaaggagtcccttcttgacagcttagcaattcttaacggatgtgagtccacgtatcactcttatgggagcctggtctcaaatttctaagtaaaaaattcgcactatagcacatttgtatctaaacactatattttagtcacaaataattttacttaatacccattcatatatatcaaaatatatttatatatataaatatatatatatcagaaaattgattaattaaaacatatcatctacgaaagcactctgttcatagaatataaattctttttgaccttgatgttatatatttcttttaaccttatcacagtattctaaaaagtttttatttattattaattaagttctctgctgggtgatgtgtacgaagtgttttattaattctagtaactctgattaaaggtgcgaagcatggtttttattttattatctctatatataaaacaaagcttgatcgagtaaatagaactatatatacatattaatttgtggcattcaatagaaggtagcctgtccacgaaatatatcatagatcttcatgttttcggaactatgagcatctttaatagagtactaaaatagtagtatattcctatattttaatatacttagaaaaatttactcaaattcgtttagaacgtggtattaggtcgtattgtattatattgaattcgattatatatcatatttttatataatactatattaaattttaatttatactaaaacattatatatttaggtgttcataaaagttaatatcacatataattttatataaaaatataaaatactattcaatctaatactatacaatacaatgcagtgtaatacgacgtaccaaacaaaccctagtaatctaaaaatcgtactaaatttggcacatattaaaagttgtgccaaatttaatgcatgtatgtgctaaatttgacacaaaatatagcattgtgtcaaatttaatccacaataaatactatttatttatttactatgatgttactgatcgacttttaagtttagattttttatttactatattaacattatttaaataataaaaaaataaaaataataaattttatatattctcaataaaatattaaatgaccatcgatataacaattatgttattttattttacattttgtgcattgggatacaattacaagtagtgggtcaaatatagcataaactcattttttgtgtcaaatttagcacaaaatttaaatcttccattagagatgatctaatagtcactcgccacaagggatggagccaactcatgcccctcaaagtttaagataaattatatatagcatatgaccctaaatcatagaactatgttagtaaatgtgttcatttcaaaacttgtagaggaataacctttttagaatatttattatttatatatattgtcttttgccacataaaaaaattaa

SEQ ID NO: 13866 - DNA, 6959 bp, Cannabis sativa
agacgtcgagggaacttgcaggtggaaaaagaaaacatctttttctttcgttcttttgatttgtttgtttccctaggacaacaaaattagtactcttaagtctgtaaaccaaaaaccttaaagctacaattttatttatctggaaaagatgtagtcttttgacatcataggatatcccaatttttccttctctgttcaagtttcaagtaatagtcccatagatgttggtccttgaaatgtaactattgttggatctgaaatcttattttgagatcctaggatagtagtatgtcttcactcttttgttacttcttcagtctaatttaatagtgaactaactatattttactttctattactgtacagtggacgacatggttttgttgtggcaataacaggaattgaggaaatcggaaaaggccttatccgtgatggtacaggatttgttacatttccggtaaagtatcaatgtgtggttttcagaccatttaaaggagagatacttgaagctgttgttagtatggtaaataaggtacggttattatttcttttttctttgtgacgtgcccattaaatattataaatttgtgtttgtaatcaaagtgagagtgtacaataacatctggaaattacagatgggatttttcgcagaagctggacctgttcaaatttttgtttcaaaccatgtaagtctatatctaagtttttgctgaataatatatctaattatctatcgatattaaaagtgttatatatctaagtgtaagtgtatcttgttgtcatgggtggattgtagttgataccagatgatatggaattccagtcaggagatatgcccaattacacaacttcagatggatccgtacgtatttatgataaaaaacctatatagatttgttattaaaacttatattttcggattaattgatcttgtggatttaataaactctgtgtcttggatcttgcaggttaagattcagaaagatagtgaagtgagattaaagataattggaacaagagttgatgctacagaaattgtatgcttttcaaccctttttcttagaaaataaataagactctttacacttaccatatcagttaataaccgtatctttttcctctcaaaacttagatatcatgagatcacttcttttagttaaaaagtgaatgaatttttctaattagattcttaaaattagggaattggagttcctaaaaactctttcaaaaacgattgctttgaaaattgtctgtactatttagagtattatcgtgttggtattctgagatctcatattcttttgttctatcacagttttgcattggtaccataaaggacgactttttgggtgtgataaacgatccttcggcaacctaatggcgtttctcctaaacccagaagaaaactaatttaggtatcgggttgtttggcgaaaaggagttggaatcgaaaatgaatctgtgatccatcattttctgtgtttgtatctaaatttaaagtattggaataagattttgaccgttttgggaggaatggttattccagtcccataacaaatgaaaatgtcatttcaatgcgcagttaaaatataattaattattttcctcttttctttaaatatgtaatttttactgtaagactaaggagattaacttaactccaatctacatgactaaagtgtaagcatttcttatttgcttgaggatatacaaaagaaatttcagttacattctcaaataataattcgaacatgatacataatttatgggttaggatttgaaaaattagacgtaggttgaaaaatggttgacacaaaataaaaacagatcaaacacaacacaactgacttaatacgaatttgacacgtttgatacagtttttttaattaaaataaaataaaaaattattaataatatgattatgtaaaaatatatacttagtgattcatacataagttaaaaaattttaaatttatttttctttaaaaaaaaaatgaaaaaaattgaaaatattttaaattttttaattatatattatacatataaaaattatttatttatatataaatgtatatgaattttcttatagaagttaaatttactattttctcaataactcaacttaagtaataaagaaacgggttaaagtgggtcattacgaaacaagattttttatgggtacatgagttgaaaatggattaaaatatgacatgaacacgacacgataacacgttttgtcacctctactcattttcatgattactttattatgaaataaatcttagttaaaattttgacttttttttttaaaatattatcaactaaattcaatcaatgatcgattggattcagtctaagattcattggatctaaagagtaaagaaggttaagaaaaagtcagagagagaaaaatttataagttttatttttctaaaataaaatttctcaattatcctttgatatgcatcaatcatttgtttttaaatctatcaaaataaaatacaacattgaaaaacattgaaaaaactgaataatttacaaagaaaatgctttgtcaacacgtacaaaaattttaatataaaattttcttaaaataatgtcatttatttttttaacaaaaaactagttaacacataatcaaatagtttagagaagtatttccgtcaacctcttattatattttttagtcaactttaatgacagtattcgttatagttataatatcatagttacaaatttttaaaaatttttgaataggttatagtgctgaaaatatatttgaagtttttcgaacacttacgataaactggaatatcaagaattttattttcagtactgtaactattttaaattttttaaaaatttataggaattatattgtaaatataaaaaatattgctatgtatttcgatatttaatttcagaatgttaactaagagattaagagattataatagaaagttgtaataatttttgttcaaaaaataaaaataaacacttaattaaacaaagggtattgttgtaatttaggataaattgtactctcttcccaattttttttttttgaacaatcccaatttcttcttgctgactctgaaaaacagattatttggtttgttaattaaaaccctaaaaaacacaaaaccctaaaaccctttctctgcgacttggcggttctttcagcagcctcctctctctctctctgtcttagcttcacccaaattatagcaatggaggacctgctcgctactgctgagaaaaaggtaagtcctttacggtcatcttgttatgttttggctgaatgtagagtggaggagaccaatatggagttttgctatttcagctattgaattttgaaaaaaatttattcttttgttatgggtttatgccaattgttttgattgtagtcgaattaaatgcgctccattgtaatttgaatgtgtggtaatggttttacttgataggcccttgttgagattgtgaaaatggttcagaaaagaggattcaaggggagtaaaggagagtggaaagagtttttgagtggttatgataaaaagtttggggctagattgagtgaccctgcaaaaaggtctaatgaagttttggtttcttttttgaagacatttgatgaagaagagcatttgaaggtagtgttccttaactccctctatctctctctctctctctctgtaatttatttttcattaggtggcatttggttgaaggtaatgaaatggaatggaaatgaaatgaatcaatttttgtttcgttttattttattgtttggttgcattttaaagtattgtaatggaatgacgtttcggtgggatgactattatattttgaaatggaaggaataaccattccaatacaatcaaattttttaatacagtttaaattttattctattctcattcctatttttgtatttcgttaacaatgtttgttgttaatgatggctgcagtacgtgactcaactaattcaatcttattcaaagcgaaacttagttcagaagcttacaagagctccagaaaatgagtcacctgagcaggtgattgtgatacacatatttatgcccttttgaattgtatgatacaatatgtatgtagtgttgtatttcggattgcttaagaatttgaatatgaagcaaatggttgtattgggattgttgttgagcttagattttcatttcttacatttctagcaaacttacgtgcttacaatttgttatgctctttatctcattcatacttttgtaacttttatgttttgtactggtggtggcagtacagatgctggttcgcttaactcttgaacacccgcaatacccgttagagtattcgttcccttcaaaggaacaagtaagttgtttaaatctctttctaacttatgttttgccaaagaatggtgcattgaacatatttattctttgtgattacttcctcacatttatgcttttagtattattaaaattgttttgatgtatatgcctccttgctaaagcaaagtctcatctttgttcaacataaattgtatattttattctcgatcttaatgaagtcctacaattttttccaaagataattgcttctctttttaagttgctcccataatattctttaaactaaagacccaaactgaagatcttcggccaattttgttatacacataattaatgaagtcctgcaatatatatttgtgtttttgctcatgatagcctatgaataaaaacgacacctctagctgttaattttgtttcccattcttattgctcaaccggtttattattataatttacgcttaataaagtggcatattgtcttcatactaacttgtggaaattgtgaatcagggttggattgtcaccaagcttgggaaaatgtccaacgtgatgagtacagataacattcttgctgttgactgtgagatggttctgtgtgtagatggaactgaagcagcagtgagggtgtgtgtagtggatcgcaatttggaggtaatgaaagttcttatttcttttatgaattttatatgatttttataactgtttccttatcaatttgtttgaaatcacttggctcttttttaaatggagtataaattacaaataagagaactcaacccttcaattataacatcttcgggtgtttctcatctcatcaataagttctcctttgtacgcctattaatatagtttttattttcaggtcaaattgaatgtacttgtaaatcccaaaaaagaagttgcggattatagaactgaaattacaggaattactgcagcagatctagagggagttacatgcacattggcgaatgtacaggtttagtatcattgctttgtcggttttgagaaatttctgttaacattatttatctgaagttctgaacctcttttctgtgtgctctagaactcgttgatgaagatattatccagtggaaatattttagctggccacagcttaagtaatgatctcaatggttagtgaaacaatcacttatgccgtaactacattttatgctcaattagtctctactcatttgttgatctttcgcttttgggctcagtattgaagatagatcatgcatgggtcattgatacctcttatatattcagatattcagagggacccatcagtagaagaccttctttgaataatttatgcaaggcaagtgaaagattgaagctttttcttaatcgatttcatcagttcgaagctcttttttctaattcatctgctgcttttagatttgggcctgactgttttttatatgttattcttttgacagtctttgttgggctacgaagtgaggaaggcgggttctcctcataattgtttggatgatgcttgtgctgccatgaagcttgttcttgctaggttagagcaaaaagcaggcgatactattccctataaagaaatgaatgttgtgagttcactttctcatatcttcatctctggcttacttacctcaatttgaactttcctaaatcatatttatttgaaactgtataggtacccgaaattgaaacgccgaaactacttcttcacaggataccatcacatgtacccactgaagaattacttacagctattcctggggacttcacaatcgaaaccaaggttgaccactcattcttgttcttaaatattgtaagacgtccagttttaacaaaaaatcaagctatgttcatgttggaaaaacatttggatccatatgataacgtccctcggctaacttttcattggacagggcaccacgacaccatttcatgaaaccgtgcattgacccggttacactttatatcttatttaagattttgagttggtggcatgtaatgaaacactactattctatgtacctttgtattgctttacagtgatttagaatgaggtggattcaagttgccatgactaatattttaaattttttcagtcaaataggagaattaaaggagataagtacactacctatgctatctttaaaagtttacaagaagcagaggaagcatatgaaaaagtcgaaggcagcatcttgaaggtacataagattagtaaattgattttagatttcgatcccaagacaattttttgaatattagggacaaaattgtttatctgttatgtagttggttaatacaacaagtaacatgttgaccgaaattatgccaggatacgttgggtcggccacagaaactcgtcacatgcaaactcagcacaggtgaaacttacagtctgtgtgttcgtagtacaggccgcggtgattgcttagatgagaatctatctaagaagagagctattgaagtccaggaaacatctgaagtaacgaaaaaactgaaaacagatgagaagattgaagaagagacaccgacagagaataagaaaacaaagaaagagcggaaaagtaaaaaggcatccaagcacaaaaagaacaagaaaggaaaaaagaaacgagcttagac

SEQ ID NO: 13867 - DNA, 22002 bp, Cannabis sativa
tgtattaacctgcttaagactaaacccgcacaactcaacccaaccatctttctttctatttttctatgtcttctttttctccgcactgttaacaatcgaattctcacagctccgtcgctatggcggaggccttgattaagcttgtcgattctctctcgttcggcaaaaacgacaagtcgttctcgtccatcgatctacttcacaagcttcgttccgaagatgactcgatcagaccaggccttgaaaagctctttctgattctcaaatgcggtgtcgaccccgccggagacgaagctaagctagggtttcaatcttggaacgagtctcagattcaagaagtttgtgctctagcgtctgcgatcgcttttgcttctcgatctctttccggtactttttcttcgttttctttactctgtcaagaactgattccgaatgtttactttccttgattacgaaacagaattcgaacagtttttttattttcgaaactcttgagctatttctaaagctgcgacttccgagtttagaagtactcagttactagttcagttttttttttttgctggaaagttacttgtttagttagtgtgtgaagtattaatactactgttctcttgatctttttatatatatattttttcattgttgaaaattaactgctatgattgtgaaattcaaaatgggcggtgatggaattgtacacttactacatttgaatgtcattttgtgaatagtggagcaagtggaaccagttgttctcgcgattgtacagacatcagtggaactagctgtttgctatttggaaagatcagaattcagcagtgatgatttaagtattcaggtttgtgacttccaaagcacctttttattcttcaaattgcatgtctgtacactttaaaatggaagattgttagaagtgcgtctttttctttagtttattattttttattattttcccaatgaataatgaatgtttgattgtgctctgtctacactgggtaagaggctttgttcgtggtcatgtttgtataaattttttattggatgtgttgaaatagctcaactcttaagctggccataaatcatgctgaaacgagacaaagccagagtctctgactcaaagtagaactgtataacctatagccacccttcatcatctctgtggttttttatttattttttattttttattattattattattcatggttaagtgatgataaggaggtcataaatcatcgttttgtttagttgttgtgccattatatattttgctgtcgtaggtggtctaatagttatttgctatttcagaatcatatggtacagcttttagaaacagcattggttgatggagcaaataaagtacctgaggcagtgcaacctttatctgcaactagcctcttagagttgccggtggttgctagtaattcaagtggcatggagtttgttagcagcattgagtgcaatcttcaaggtattttattttattttttttctaatttttttagctaatatatcgttgcggtggatgcatgactttgtctcgttgttgttttaactaacaatatgttttttcgtacttttgcctcagatagagctatttgttcaagggaggagaaggtggttgaccggatttttttgacattagcatctgagtgtatacaagctgatagacagactactgctctaagtgaacctgttctccctcaagatctaaaaaaaatggtttttctgtctcaacattgggctgtttctcatgtggagtgcattcaaaagttgattttggtctgcaaagaactgattgttctccctgatatgtttgatgagaagatggctggtacaatcttccgcaagagattaatgctcagtttgaggattttaaagctactaggaagttttgcaaaggacattcccttcattgaatacgatgtctcattggtccaggctgttgcttctattgctgatacattgccttacttatttagacctggatttgaattcattagtaacaatgctgccgtggagggtagctttgaaagtcttgctctgtcgctattggaagaatttcttgatctttcccgggttatattttgcaacagttatgtttttctgaatattcaagcttgcataattgcctctatattggacaatttagactcttcagtttggagatataacaagttggctgccaacctgaagcccccactagtgtattttcctcgaattgttatttacatattgaagctcattcatgacctcaaaagacaaactaaccgaactcttagctggaaggagttggacatagagattattggcaaaaatgttgatttgccgactgatttgccttcttgccatgttcataaggagaaagttactttgcttaagaggtacacatttgaacaattattggagatgattttcccttcctctagtcagtggctggaaaatctgatgcatgctatctttttccttcactctgaaggtatgaaattaaagccaaaagtggagcgatcgtactctattaatgcaaaaactagttgcaattctgaagttgaaaatgttgttttccatgaagatgaggcactttttggagatcttttctctgaaagtggtcgctctgtaggatctgtagattgtaacgaacaaccacctgctgctgccaattccagttccagccactgtaacatgcccatggaagctgctattgaactgttaagctttctcaaagttggcatcttttctcttgaatggcatccttctctttctgaagatggctgcatgaaaatgagggaaaatcatgttgatatattgctctctttagtcctatctcaggggtattgttccgatgataggatttctgatagctgttatcctttacatgaagagaaaaagattggtcgtgtgcaagaaatttgcttcgaagtcttgcaagatcttcttacacgacatgctttgtccgattcacttgaagagtaccttgttgagaaagtcttgagcattgagaatgacatgtttgtttacaatgaccagacccttactttgctagctcactctcttttctgtagagtgggcgcggctggtagcaaattgagagccctgattttcagagaatatgtgcgttttattgttgagaaggcaaaatctatttgtttaaaatgtcctagcttgaaggatgttcttggtactcttccgtctttgtatcatatagagattctcctcatggcgttccacttatcttcatcagaagaaaaggcatcactagcaaacttaatagtttcttccctcataacaattgatgctccaacagaaagttttgacagcatgcagttatcatgctgggctttactggtttcaaggttggttttagttctccgtcatatgatattgtatcctcgtacctgtcctccatctttgcttctacatcttcgctctaagataagggagtcccctcattcatgtgcgcgtcagcctaattatgttaatgatcatatgtcatcttgggcttcaattgctgtaaagagtgtaatgggtgcttggtttgaggaagaatctagcatcggtagcttaataagtcaactggttgatgtttcagcccttaacacttcagtttctaaagatgatgcggcgattggtttcttatccttgaattggaatgagattttgtccaccacttcaaggattttggggttctggaaaggtagccaggctacagtggtagaggatttaattgttgaaagatacatgttcttgctttgttgggatttttgtgctgtcgattttgcatctgaccaagtgctgtctttgaagaatgaccaacagattcctgacagttctgacacagaatatttgtttttcttcagccgctcaattctaggccattgggatgtgctcgacaagtgtcctaatttttctgaagttgtacttcacttacttcagcacttaaatgctgaacatttatctgaagatattggggaatcaggctgggatttcttgagaaatgggatgtcactttcattggtactgttcttgctaaatgatggcattcggagacatggaatgaagaatatagtttctggggataatgagcataaacctcttgctgagcacttgatttcttccatgatggaaggtggccaagttgaaattctggtaaagctgctgtcatctttattgaaaagatatgtatgcattcttcagaaatcttttctagctacatttgatattagtgagaaaggtgatggtagcttttcacatttgctgctcctaaagcatactggatttgagaaaggccttctagatgggattgagaaaattcacactagctctgcccaattcgagtctgtttttgacctcttacctaagttggatgctgttgttgaccaaagagctaccacagtttgtaatctctcctgggaatctatattgcatggcttaccctttaatcttcaagttcctagcagtatccttctatcctgccttcttagaataagagggattatttctgttttagaaggaattctcaaaacagaagatatgaaaggaagtggctgttttgggactgaggtactttgtgagatccttgatagtgtgatgaaaatcaagtacgacaagatttttgaaagcattcatgacaagtgtgatgctatttatcatagtttggttgttgggatgggagaatcggactattccaatttatttttattggctcacatggagggatttttaagagacataactgtgaggggagtaagtgacagtaatatatgtgagtgcattattaccaaggctattgataccatggatagcctcaggaaagatcctacaaagtttagtgttttcaaattttaccttggtgtagaagatgtttcggagaagttgaaagagctctttgagtttcaacgtggtgatttattggtcctgcttaattctctggataattgtttctctgaatcagttaatgtgaaggttctcaacttcttccttgatttgttagctggagagttatgtcctgatctcaaactgaacatacaaaataaattcctcagcatggatatgacttgcctgtctagttggttggagaacaggctactgggttgtgtaacagaatcttcagctggagtcagcagtggcaaaggatgttctgttcctgtcagagaatcgaccatgagttttattttatcccttgtatcctcacctgaaccgcaatcaagagaactgcagtctcacattttcaaagttgtgctgggttctctccatcgtgcttttttgcattttgatattcatgtatccaagtcttttttccaatttactgtacaactgtctaaaggggaaaactcgatgaaatcacttttaaagaggactgtgatgctgatggagaagctagttggtgatgagcgtcttctaccagggctaaagttcctttttggttttctcgaaactgttctgagtgactgtggttctagcaggatttccccagaaaggtgttcagggaagtctttatctagtaatactcttgctgttggacctattgcttctaaggaagtaggctcaaggaagaactctgaaacactggttctatctgctgatcaaggaggatccacagctcttgaatgtgatggaacttctgtagatgaggatgaagatgatggaacttctgatggtgaggtggccagcttggataaggatgaagaggaggatggtaacagtgaaaaatctcttgcttctaaagtctgcacatttacatccagtggtagcaattttatggaacaacattggtacttctgttatacatgtgatttgactgtgtcgaaaggttgttgctctgtgtgtgcaaaagtttgtcatcgtggtcaccgtgttgtctattctcgctcaagtcgtttcttttgtgattgtggagctgggggtgttagagggagcaattgtcaatgcttaaagccacgtaaatttactggaatcagcaatgcaccagttcgtaatgcaagtacttttcagtcatttttaccattcccagatgatggagaccagctgccagaaagtgactcagatcttgacgaggacaccaatacagatatagataatccaacaaggttgtacatccaaagagagcttcaagatggtatcccattgttgcttgatgaacttgattttgaaggtcggattcttgagctttgctctttgttgttgccttctataacaagtaagagggactcaaatctgtccaaagataataaagtcattcttggtaaagacaagcagctttcatttggtgttgatctcttgcaattgaagaaggcctacaaaagtggatcactggatttgaagataaaggcagactattcaaatgccaaggaacttaaatcacatttagctagtgggtctcttgttaaatctttgctgagtgtcagtactcgagggcgacttgctgttggagaaggtgacaaagttgctatatttgatgttggccagttaattggacaagcgaccattgctcctgtgacagcagacaaaaccaatgtcaagcctctatcgaagaatgttgttcgctttgaaattgtgcatcttacttttaattccgtgatagaaaattaccttgctgtagcaggctatgaagactgccaagtgctcacattgaatccccgtggtgaggttactgatcgtcttgccattgagcttgcactgcaaggagcgtatattagacgagtagactgggttccaggttcccaagttcagttgatggtggtcacaaacaagtttgtcaaaatatatgatctatcccaagataacatcagtcctgtgcactacttcaccttaccagatgacatgattgttgatgcaacacttttcgtggctcagagaaggatgttcctgtttgttctttcagaacagggaagtttattcaggctagaattgtcagtggaaggtagtgttggggctacaccgttgacagagaaaattcaaatacagggcagagatatacaagcaaggggctcttctttgtacttctcaacaacttataagttactctttgtgtcctatcaagatggaactactctgataggtaggctaagccctgatgccacatctctaaatgagacatctactgttttcgaggaagaacaagatgggaaattgcgccctgccggcctgcaccgttggaaagagctgctggctggtagtgggttttttgtttgctactctagtgcaaaatcaaattctgcacttgctgtatccattgaagcaaatgaattatttgctcagaacatgcggcatgcagtaggttctacctcgcctttagttggtgtaactgcttacaagcctttatctaaagataaaatccattgtcttgtcttacatgatgatggtagtcttcagatatactcacatgttccagttggagttgatgctgctgctaatttaactgcagagaaggttaaaaaattgggttctggtattcttagcaataaggcttatgctggtgtgaaccctgaattccctctggacttctttgagaagacagtttgtattactgcagacgtgaaatttagtggtgatgcaattagaaatggtgattctgaaggggcaaaacagagcttggcatctgaagatggctacttggaaagccccaccccagcaggatttaaggtatttttcttgaactctatttaccagttcttcattggctcttcctgttaaactggaatttttgttgttgctgtgtcatttgtttattataatgggtacatgctgtaccattgattaaaagtactaaaattaatttgtttaaatttttttatgaaaaatcttttttattagtttcaatttctgtgataaaatttattggaaaaaaaataataagttagtatttaacaaaataaagtactaatgtacctaagttttacacaagaaaaaacattaaaagagctatgaaaaatgataataaaagaaacatatttgtatatttcttatgagataatttataatggataagaagttatatagtaactatacagtttttattatactagttgaatgcacgtattaatatattttgtttattaactacattaatatatttaactttgtgcaaataatttataaaaattaaaatataactaaattttgaaagtaaatgagaacatatatattttggtacatataagtttggagatacattagtctctttattgatgcctttataaattattttaggtgtaaatgaaacttactcaaaacttatttatattgtatttaagaatgtttcactattttttttttactttcagtcacaaaaatcacaacttgttgtcactaaatatgattttagctataacatttgttgtaactaaaattaaattagagacaatttgtatctaaatactacattctagtgacaaataatttttgttgtgactaaaagtaatatttagtaacaaaaaatctatgttgtgagtcttgtggcttataagttatcattaaagttcgtattttttgtagtggtggtttattttattataacaattttaaatataatataatatttaggtaaatattaataatataaaataatgtaaaatcttaataaataaataaattagctatgctcattaattatttattttacattttttaattcaaactttgtcttttaattattttcagaagaaaatttagaataatggaaagtgatattaaacaagagtatgtttatagagttcaccgaaaaaaaaaattgtattagtgtgtaaatatatatattaggaaaatttgagtttttatgctttatttttctatctaattaaaaaatcattcatttttatattatatgagctagagtttttccatcggctaaaaaagcaattaagaaaaaaaaaaatcggcaaaaaaaagataaaaaaatgttaagtttgacttaagtattttatatataaacatatttttgatatagtgtaaaaatatatattttttgatttttttttaattaagtatacaaattcaaatttcttttttattattcacttttggatcaaaatctaatagttttatatttttaaaattaatatttatagttaaatttgtttggtaactattattgaaaaatgttctatatatatttataattatctatatatatgcatgtgggtgcactcttaatgggtatttttaaaaaaaaattgaatttttatgcttaattttttatttaattaattattattattaattttacattatatgggatgaggttattttattggctgaaagaaataattaaaaaaattatttggcaaaaaaataagataaaaaagagttgagtttgacttagatatatttatataaacatatttttaatgtagtgcaaaaagagagttttttaattttttttttaattaagtagctatattaaacatagaaattcaaatttttattttattattcatcattagatcagaatctaatgatttaatatttttttttgcaaatgatttcatatttatagttaaaattatttggttaccatcaatgggttaatacctgttgtgaagtgattcatatataaaatttcattgcacattacaataatcaatcaaaataatactccaaagtttcgacaatttcagatacagtaatttttgtttcttatagagaaggttcaaaaaaaaaaagtaaatgatcatttagtaaaagtaaattttagaagcaccagttgttgaattatttacttttaatcaaataattaatgttactaaacatagaaaaagaattgttacaatatattattgataaaataatttgaatgacatttatttttaatatcttaaaaagctactaatgtattgttttctcaaaaaaaaaaaaaaaaattagaaaaagaattgttacaatatatcattgatcaagataaaataatttaaataacacttactttttattatcttaaaaagctagtaatgtattgttttcttaaaaaatatattaattgagtttccataaaaaaaggttcacattatcttaaaaagccactaatccaatcaattagtcaattgagtttccataaaataaaagataaaaaaaaatcagataagacaaaataagttaacgaaacttaaaacaccaaacttatgcttttatattattattattattatgtatagatttatttttacatatttattcttaggtaaaatcattaaaatattgtattttaaatttttagttacacttgtcaaataaaacattactactattattaatttgaaatataatacaaggagtaatatattattgagattcagttccacataaaattacaataaagaaaggccatagtagtgatattacttcttgaattgattgtgtttcttgctattttttgtcagaaattcaatttcacttacctactaccatgtatattgcttctagactttcatagcttactcattgttcgctcactgtaattgtcaacagtttatctaatttttgcacttctgtttgaatgtttgtctgcttctagtaatttaattctcataactgtccgcagatatccgtcttcaattcaaaccctgatgttgtcatggttggttttcgtttgcatgtgggtaatacatcagcaaatcatattccttctgaaataaatatttttcagagggttattaagttggacgaggggatgcgatcttggtatgacataccgtttacagttgctgaatcactccttgccgatgaagagtttacaatctcttttggaccaactttcaatggttctgcactacccagaattgactctcttgaagtttatggtagggctaaggatgaatttggttggaaagagaaaatggatgctgtactggacatggaagctcgtgcattgggttgtaattccttgcttgcgggagctagtagaaaaagacggtctttgcagtctgctcctgttcaggagcaagtcattgcagatggtctcaagcttctttcaaatctttattcattctgtcggtctcaaggatgctcaaaggttgaggaagcacaaacggaactaagcgaacttaagtgcaggaagttactagagaagatatttgaaagtgatcgggaacccttgttgcaggctgctgcttgccgtgtgttgcaggctgtgtttcccaaaaaagaaatatattaccaagtaatttcagaatgcatggttttgtataatatttgtgttttaatgtacttatttgataatctgttcacaaacttggacattgtttcatcattaattaggaattccttacacaggttaaggataccatgcggcttctaggagtggtgaaatcaacctctgtactctcttctaggcttggtgctggtggtattgctggagcatgtctaatagaagaatttacagcccagatgcgtgcagtctctaagattgcattgcaccgtcgatcaaacttggctacttttcttgaggcaaatggtagttgcatttttcctgatgtcatatgtttatttgaatttaaaaattttaaggcactttcaatcgacattagcaaaccatgattattgaagcatgaaatttttggctctacaaaggtgaaattgttgaatatttatatttatatataattaatcaaagctgctttgtattaaattagaatattatttatttatctactagtttctgtgcccaattttaagatttcttaacatgtctaacaaaatgctaaggtgttggagtgggctcatcttatggtagttttaattggattttatgctttctgctagcgtggcctgtgtataggtcttttagggtaaaatattatctaatgttaaggctattctttttctttcttctattgcttctttctgtttaaaattgtgctaccactattcaatcacatcctttttttttttgtgaatgatttgtttactgtttttcattgtgtttctattgtctgaaatgtttgccgttgttcatgaaggttctgaagtggttgatggccttatgcaagttctttggggaatattagactttgagcaacctgacacacaaactatgaataacatagttgtatcatcagttgagcttatttattgttatgcggagtgtctcgcattacatggaaaggatccaggagcgcacacagttgcacctgctgttgttttattcaagaagcttctattttcccctaatgaagctgttcagacttcaagcaggtaacttaaagtttttaattggtatcatgatcttaagagttaaattgtaagatcttcacctaaaccttactttctttgtcagcttggctatatcttcgaggttgcttcaggttccatttccaaaacaaaccatgttggccacagatgatgccatggaaaatgcagtatcttctagtatgtctgtcgatgcaactcctggaaatccccaagtaatgaatgaagaagattctatcaattcatcagtacagtactgctgcgatggttgctccacagtacctatacttcgaaggcgatggcattgtaccatttgtccagattttgatctatgtgaggcatgctatgaagtactaggtgcagacaggcttcctccaccacattctagagatcatcctatgacagcaattccaatcgaagtggaatcattaggagcagatgggaatgagttccactttacacctgatgacaccagtgatcaaagtatgttgccagtcccagcaggttccagcatccaaatttctgctccctcaattcatgttctagaacctaatgaatctggagaattttcagcttccgtgaatgatattgtttcaatttctgcttcaaaacgtgctgtgaataccttgcttttgtctgaacttctagagcagttaaaaggatggatgcaatcaacttctggggtccgggcaatcccaattatgcagcttttctacagattgtcatcagctgtgggtgggcctttcatagatgtctctaagcctgaaagcttggacttagagaaactaatcaaatggtttttggttgagattaatcttagccaaccctttaatgccaaaacacgttctacatttggggaagttgcaattctagtattcatgtttttcaccctcatgctccgtaactggcaccaacctggcactgatggatccacttcaaaatctgtcgggactacagacacacatgataaaaatgtaaacaatgttacggcctcaacttcctctgatgatcaagaaaagaatgactttgcatctcaattgctccgagcttgcaattctcttaggcagcaatcttttgtcaattatctattggatatcctgcaacagctgatgcaagttttcaagtccccagctgctagtcatgaaagtgggaatcttggttctggttgtggagctctactaacagttcgaagggatttgccagctggaaacttttctccattcttttcagactcatatgccaaagctcatcggatggatattttcgtggactatcatagactactgttggagaatacttttaggctcgtctataccttggttcgaccagaaaagcaagataaaactggggataaagagaaggttttcaagatttctcctggaaaggatctgaaacttgaaggatatcaggatgttctttgcagttacataaataatacaaacactaattttgtcagaagatatgcaaggaggcttttcctgcatctttgtggaagcaaaactcactattacagtgttagagactcttggcaattttcaagtgaaatgaagaaacttttcaaacatgtaaacaaatctggtggtttccataatactgtaccatatgagagaagtgttaagatagtgaagtccctaaccactatggctgaagtagctgctgcacggcctcgaaactggcagaaatattgtttgaggcatggagatgttttgcccttcttaatgaatggagtattctacattggagaagaatctgttgttcagactctgaagctcttaaatttggccttctatacagggaaagatattggcaactctttacagaaaattgaagctactgatactggaatcagttcaaacaaatcaagtacacaatctatggatcaaaaaaagaagaagaaaggcgaagatggaatagaatctggttcagaaaagtcatgtttggacatggagtctgctgttgaaatcttcactgacaaggatggagatgtcttgatgcaatttatcgattactttctactggaatggaattcaagctctgtccgttcagaagccaagtcagttctttatggtgtttggcatcatgcaaagcagtcagtcagggaagccatgctggtggccctattgcagaaagtaaaatgtcttcctatgtatggtcagaacattgttgagtatactgaacttgtcacatggcttttgggaaaagttcctgatatcagtttaaagcaacaaaatactgaacttgtggaccgttgtttaacctctgatgttatcaggtttatctttgagacacttcattcccagaatgagcttttagcaaatcatccaaattcccggatatacaatactttgagtggactagttgaatttgatggctactatcttgaaagtgagccttgtgttgcttgtagctctcctgaggtaccctacagtaggatgaaactagaaagtctgaaatctgaaacaaaattcactgacaaccgcatcattgtcaaatgcaccggtagttataccatccaaactgtgacaatgaatgtacatgatgccagaaagtctaaatcagtgaaagttttgaatttgtattacaataatcgacctgtggctgacttgtcagagctgaagaacaattggtctttatggaagcgtgccaagagttgccatcttgcttttaatcaaactgaactaaaagtagactttcctattcctataacagcttgtaacttcatgattgaactggattccttctacgagaatcttcaggctttatctcttgaaccactgcagtgccctcgttgcagtcggccggtcaccgataagcatggtatctgcggcaactgccatgagaatgcatatcaatgcaggcaatgtcgcaacatcaattacgaaaacctcgactctttcctatgcaatgaatgtggatactgtaagtatggtaggtttgagttcaatttcatggcaaaaccaagttttagctttgataatatggagaatgatgaagatatgaagaaaggtttggctgcaatagaatctgaatctgaaaatgctcataggagatatcaacaacttttgggcttcaagaagccccttctcaagattgtgtcaagcattggagagagtgaaattgactcacaacagaaggactctgttcagcaaatgatggtttcattgcctggaccttcatgtaagataaatcgcaaaatagctcttcttggtgtcttatatggtgaaaagtgcaaagctgcttttgattctgtcagcaaaagtgtacagacattacaagggttgcgtcgggttctgatgaattatttgcaccagaagaactctgataatggagtggcttcttcaagatttgtagtttccaggtctccaaataattgctatggctgtgctagtacatttgtgacacaatgtcttgagatattgcaggttttgtcaaagcattctaattcaaaaaaacaactcgttgcagctgggatcttatctgagttgtttgaaaataacatccaccaaggtcctaaaacggctcgcattcaagctagggcagttctttgtgctttctcagagggtgatgtaaatgcagtgagcgagctgaacagtttaatacagaggaaagtcatgtactgccttgaacaccatcgatccatggacattgctctggccacacgtgaagaactatctttgctttcggaagtgtgttctttgactgatgaatgctgggaatcaagattgcgtgttgtttttcagcttttattttcctcaatcaaattgggtgccaaacatccagccatatctgagcatgttattcttccttgtctaaggattatatcccaggcttgcactcctccaaaacctgatggtgcagacaaggaatccatcatgggaaaatctaattcagtttcacagactaaggaggaaaacactcaaaatgtttctggatctttggctgggctgagcagtggaagcaagtctgtttcagattccgagaaaaactgggatgcttctcagaaaacccaggatattcaattgttgagctatacagagtgggagaagggagcatcatatcttgattttgttagaaggcaatacaaagtgtcccaggcagtcaaaggtggtggtatccagaggtcacggcctcaaaggcaagatttcctggttcttaaatacggccttaggtggaagcgacgtgctagcaagacctctaaaagtgatttgtcagtgtttgagttgggttcatgggttagagaacttgttctaagtgcttgttctcaatcaataaggtcggagatgtgcatgttgataagtttgcttggagctcaaagttcatcaagacgatttcggttgctcaacttgcttgtgtctttattgccagcaacccttcctgctggagaaagtgctgcagagtattttgaattgctttttaagatgatagagtctgaagatgctcgtcttttcttaactgtacgaggatgtctacgtacaatttgcaaactaatcacccaagaagtgcaaaatgttgaatctttagaaaggagcttgcgcatcgacatttctcaaggatttatacttcacaaactaatagaacttcttggtaaatttttggaggttcctaagattagatccaggtaaactagatattttaaacagattttatgttggggatttcttttagtattatgttatttaatgtttgatattgggtcatgaataaacacgtatatcttatgtgtatttctttcaaaattcatgccagattcatgaaagatgatttgctttctgaagttcttgaggctcttatcgtcatacgtggcttgatagtacagaagacaaagttgattagtgattgcaatcggcttttgaaagatctattggatagtcttcttcttgaaaacagtgaaaataaaaggcaatttatccgggcctgtatctgtggattgcaaattcatggagaggagagaaaaaagagaacttgcctggtatggatgttgtgttatattattatgctctgttaatgttgcttatgtctgccatttgtattgagcttcttgaaatatatgtataatatggtcctgtttattttatgttctatttggtttttttttttttcctgaaatatgttctattgggttttgcagactcaaattatgttcttgattttttttttctttgataagtataggaagatggacctgattttgctgctgtgttaattttggcttgtttcaattatatttgcagtttatcctagagcagctgtgcaatctgatctgcccatcaaaaccagagcctgtttatttgttagttcttaacaaggcacatactcaggaagagtttatcaggggatcaatgacaaagaacccttattccagtgctgagattggtccattgatgcgtgatgtgaagaataaaatttgccatcagttggatctgttaggccttattgaagatgattatggcatggagttgctcgttgcgggaaatatcatctctcttgatttgagcgtagcccaagtctatgagcaagtctggaagaagtcaaatcaatcttcaaactcgctggctaattcaaccttattatcttctaatgctgctacatcaggaagagattgtccacccatgactgtgacttaccggcttcaggtttgttaaagctactttaattttattttttattcccatctaataattttatcagtgtgaatattaatttaaacaaggtaaggtgttatattcttttgattaagttgtatgtatatttataaatacacacatatatatattaatatgtgtatcttatatatgtaaagagaaataagttattgggtatttttgcataacaacccatacgtttttcactgtttatacaatctagtctctgaatttttttattgcaatcagttgcttgagtcctaaaaatagtagctattaattctttattgctaattttttttaccaaatttctttccttttttttgatagaaatgttgaattttttccactatgatgtcaaaaaatttgagtagtgtataatttataggaaatactaatttttctcaaagtaagaaacaaaatttttataaaaaaataatcagcaagggcttatttgatatgctttataaaataaaggacttgattgcaaaaggaaactgtcaggaactagattattaaacagaaaaaaactttaaagcgctatttatgctgaaaagccttaagtatcatttttttttaaaacaatgaagaaatattgatctcccaatggaatgatttcattgttacttctgggtcctctactcactgtagggtgccttgtaaacttgatttccttgttttacactgtccttataaaatgaaacttaacatgtctcttcatagaatgtttgtataccgttattataatgaagatgtgatatctttcttttacctcccttagaaatatctattgtttcatgtagagtttgtgcatacatttagcagatacctcatcaattttcttcaaaactatgtacttatttatttaatttttttgttgggtgtgttgatggcagggattagacggtgaggccactgagccaatgataaaagaattagaagaagatcgtgaagagtcacaagatccagaggttgagtttgcaattgctggtgccgttcgagagtataaggggttagaaatcatattgggcatgatccaggtttgtgattaattaaatcgaatcttttgaggtgtctttaatgtttcacagcttcaaagcttgttcaatatatatgggcttctttctacaaatttagttttctggacttgaatttcgactgctatcgttagtctgggacaaaaaaattaaatgctgcaggactctggattaattttttagtaaggtataaaataattgtaaattttaatgagttcgttcgagaaaccactagctcttaacatgttctagatcgtgatatgacatatattctaatttttgtttgtaatgtttacttatattttcaaaaaatttgcaagtttaattattactcctgggtttcattgatacttgaactgcaaactcctatgaattctctctccaaaaaaaaaaaatagaggtatctgacattgatttctgtgtgcagcgtttgatggatggttttaaatccaaccaagaacagttggtggcagttctgaatcttctaatgcactgctgtaaaataagagagaacagacgggcattgttgaggttaggaggtttaagtttgctacttgaaacagcaaggcgtgctttctctgtggatgctattgagccagctgaaggcattcttttaatagttgagagcctaacactagaagcaaatgaaagtgataacattagcatcactcaaaatgctcttactgttagtagtgaagaaacaggtgaacaggccaagaaaattgttctcatgttcttggagcgattgtctcatccattaggccttaagaaatcaaacaaacagcagagaaatactgagatggtagcaagaattttaccttacttgacatatggtgagccagcagcaatggaagcacttattcagcattttagcccctatttgcaagactggagcgaatttgacaggttgcaaaaacaacatgaagacaaccccaaagatgaaagcattgctcaacaggctgccaaggagaagttcacattggaaaattttgttagagtttcagagtctcttaaaacgagttcctgtggagagagattgaaagacattatccttgagaggggggtcacaggaattgcagttaggcacctgagggacatttttgctgttactgggcaagctggctttaaatccagtgctgaatgggctttgggtttaaaactgccatctgttcctttaatattgtctatgttgaggggtttgtctatgggccatttggccactcaaaagtgcattgatgaaggaggaattttacccttgctccatgctcttgaaagtgtaagtggagaaaatgagattggggctagggctgaaaacttactagatacactttctaataaggagggaaaaggagatggtttcttagaggataaggtaaggaggttgagacatgccacgaaggatgaaatgaggcgcttagctttgaagaagagagaacagatgcttgaggtacttactgttagctcattgaagattcagtcaattttgccttctcagttttgagcataataaagtaggttgtgttttaactgtcttctcagtgaacacaaatactttacaggagaatttacttgcatctgcaactaattgtttttcaagtattgaaggactcgtcactcctttgtgtcatctttgcttgattacatatgtagagtttgtaccaataagattttaggaaatgcataaaaggggcttttatagcatttactttttcatatgcatcttttgtttaattttcatcttttgagggtttcttctgtattaaagagacacaaaggaaagaatccatacatgtgccaattcttatcatcagcattttgcttttcttgccaacagaaagaagtataaactaattgatactgagaatctctgtttcttatgttttgtgatttgtccaggtgcttggaatgcgtcaggagctagcttcagatggtggtgagcgtattgtagttacccgcccacttcttgaaggattggaagatgtagaagaggaagagggtggattggcatgcatggtgtgtcgtgagggctacagtttgaggcctactgatttgttaggtgtttattcttacagtaagcgggttaatctaggtgctgggacttctggtagtgctcgcggggattgtgtttacacaacagtcagttatttcaatataattcattttcagtgccatcaagaagctaaacgagcagatgctgccctcaagactccaaagaaagaatgggagggagcaactctcagaaacaatgagtctctttgcaattctctctttcctgtaagaggtccatcagttccactagcacattatattcgatatattgaccagtactgggataacctcaatgctcttggacgtgccgatggaagccgacttcggctattaacttatgacattgttctggtaggggctgctatatctctgtttcttctcactttcattgaatgtgttttcatttactttagaagcctattcttaagatgatcgttcatactctaacctcatgctgtgctgaaatctagtacctttcttaactggcatgtaatatagatgactcactgcacaattatgatgatcacgagtttcctagaccttagtacttgtaaattttttatgctctggttaacatggtgatcccctattaatctcttgctatatgttttgtcttgtagatgctagctcgttttgcaacaggtgcatcattcagtgcagaaagtagaggtggtggaagggagagcaactctagatttcttcctttcatgatccaaatggcccgtcaacttcttgatcagggaagccattctcagcgccgcaccatggccaagtccgtatcaacatatttaacatcatctaccgtagaatccagaccgtccacccctggatcacaattacattctggcaatgaggaaactgtccaatttatgatggttaattcacttctgtcagagtcctatgaatcatggttgcaacatcgcccagcatttttgcagcgtggcatctaccatgcatatatgcaacacactcacagtctttcatctgctcgtgcttcatcatccgttatcaaaatggagtcaactactagtggcagcaaaaaccccgcttctgaatctggaaatgccgatgatctcttggccattgttcgt

SEQ ID NO: 13868 - DNA, 1861 bp, Cannabis sativa
ttttttttttttttttgaagcaagtttcatggtttttatgtctttcctaacaactttattagtagttatttgtaaggtataagaatgtgaagcgagatgccttaagacaaataagaaaatagagatgtcaactttattcatcttcctaaacaaaattattcaagtaaaaaatgtattgttctcctaataaacgatatgagtatgtacactcttatggtggttggagcataattatgtagcaagaggtagtgaaaggatgaaggctacgaatatttaattttatgtagcattttgtagaattttcagatttttttttctttgaaggaacagaattttcagatttatttaggttaaaaaatagtatagaaaagacttaaattccacattggtgaaagataaatgggaaagagaatttaactcatatataaaacattatatttctaactatttttttttatattggagtgggtatttaaacttaagacctcctatttgtgagaagaaatatgaatccaccagagataatggttagaatatagaaaaaagagcatacatttgaatccatacaagtacaaattttatcattaatattttccattcaaatatattgtcacaaatccacaactgcaattgcaaattaaaaagtgtcaacctatactttttcacctaaaaataaataagagatatatgaaattgaaaatcacttcttcacctaaaaataaatagaaaatagaaatatatgcatgtgaaattaattattacccttaatagagaccataagaacttttttttttctttttaagttcaactattattacctctatacaacatacaactagaaataaaaggtaaagaaaatcaacagaaacaaatagattaaactcctgatgtgaaactatttcagattcagtaaccttgtaactgagcttctctgctagtgagtggtacataacgaacggaagtttcagtcctgatagtgacagaaccgtccaattttttgtccactaccttaagatcctggtatatgttccccactggaatgaccattctgcctccgggcttcaactgatcaataagtggctgtgggatttctggagcagctgccccgacatgaatagcatcatagggtgcaaattctggccaaccaagtcttccatctgctcaaaagaaacaatcgccaaacaaaacaattcatgctattcatgaggttataataagttctaaaagacagtaagaaaagaatataaaaataaatatatgtcattaccgcaactaaaagtagagcaaaaaagaatgactggcttaccaccaacatgcaatgagagagaaccttctttgaacaatggtgcagcagcacttttttcgatattctggattgaggaagtaactaactctggaatgtgttccacacccactgcacgaccttgtggcccgaccatcagtgcaaaacaggctgttaggtatcccgttcctacaaaaaaagaaaaactcattgtctattttgaaagaaaatgagagaaatatgatgaaaataacagatgatgatattggataactgaaatcctcactaaccctatacatgagtacattccagcagtattagaaataggcagcggtaacttatgaattaaaaaagatgatgacttttacttgaatccttgtttggtgagtaaaaaccacaaagaaaacatgaccaacaagctcagaaaaggaataacttgttcagttgtacctaaaccttaaaaatgtaattttcagcaagtcaaattcataatttcaagtcaagtaccattattgaaccccttatcttggtaagtatgctgacccaggtttcaatacaaaattacaaaatcaatcatac

SEQ ID NO: 13869 - DNA, 4532 bp, Cannabis sativa
taagttgtaatgttgtttatcagtcaatcattttttagatttgttctttgttagctactggcagtagtggtccttgtaatgctattttgcgttctgcgaatagtgttggttatgcactagctacgtttgttatgaagtggtgtaggtgaaaacatttggaaagatacttttaatatttgtctgtaatagttgatttgggtcattaaataaggttgaggattttcccttaaaaaaatgtttaataaatcgtgtgtggttaaaaatattaaaaataagtaaaatggggcaccgagtgtaaaatttcattttaaaaatacataacaaacatctttaataaaataagagggtggtctgattaataaaactaaaggatctaaaatggtgtttacaataaaattaggggttaaaataacggcaccgttagttcttcttattctgttttccctacgagtctctctcagtactgctccactcttccattccaccttctcctttctctctccacttcactttctctctctacacctctctttccccttactaccactccatggaattcagcatttaggaacccagttttccaaagattcttattccaatttcaagcatttccttcttgaaatgaagatcctcgattcttgggcttcttcacactagggattgtcatcttacttccttctccatggccattagaggcgttgatttcaagtggtttgttttccttcttatacttcacacatatctgtataaatatggatatgcatgtttatatttttatgtattggtgtttgtttatatctatttctgtttatacgcatttgaatttgaattcgtagacaacttttttgatgatgtgaagttgtggtcttacaggtacgatgggttcttcctgtctatgctcgcgactagtgtgtatccttacatgatttcgaaatttgggaattttaatgccttttcaatctgaaaattataacccctcttgattttgtagtatataatataaatgttgcacaaaattaaaaaagaaaaaaaaaattgaaggaatacaaatattcgtaatttgctccaagtaaatatgcattctttattaaagctattatagttttattatggattttatctgtttcctataacagtttcgtgcgtagtgttattgttgctattaattggaagcgttatcatggttgtacgtacccattgaacatatggattgtggtgagcttctcaagactgaactctgaagaagttaaaatgggattttttgttctgtttaatttttttgactagtttgtttcgttattatttattgattggactcaggttgattacaccgtggtgtttgcttttcgtttgcttatgttcgtagataatggacttgctgctggaatgggtttgtaaggcttctttcctataactgttagaacatttgtacctttcattctatatctcgttttctttgtttaaatggaagtatataaagacaatgaacgcagattcataaatagggcacaagctttctgttctctgatcatgaaaaaggggtgaactagtcttgactcttgaggattttaagatgaatcattggatctgccgttggcttcttagtgatactataggttgcaagagtggcagcagctggattagcatcttgttcctcgtgatgtttttcaatatgagcttcctgggctacaaaatggaatcaatctcctcaatgtaataggaatcagaacttgagttaacaaagacaataaaagtgtcatgatcttggggtagacttcaaaaattgttttaatgtgatctttggtagataccaaccgaagctaaatgatcaatagatttcttgataccaagtagatagtcattagaaccaacagacattggtcgaaacagattttgaaaatttagagaaataggcttttaaggccatgtgtctctagagccaagtcacacacacattatattactgttggaaagtgtgctaagtgaaacatctttagttatggagggttagtgggacagacatgtaggaacacaaagtgacctaaacgtctccatgaaggggactatctcatagacattactagattgacctgttactgaatagtatttcattataagtgataaacgtttcgggcacaaattttttatgtgccactcaaacctgttttgtatgggttttctttctcttctacaattttctgtcaaactttcttttagactacataatgactggctgctttttagtctcatttggtagtccaaagtccaaagctgaatgtaaatgttgattgttcgatttattcattttctccatcttcttagggattttggttggcagcagaggtatgctcgtttttgtggaagagtagtggtactctccatactttctctgctactctacccatttctctgggcttggacagtaattggtaccctgtggtttagaagagggaaagtttgtgtaagtcattacctttaataattgtccttcattatcatcagagatcaatcttaattctggcttacatattttaattgcatacagttgccagaacaaggtcagaaatggggcttccttatttggttactttttagctactgtgcactcctctgcatagcttgtatgtcatttggcaaggtcagtgtttgccttgttctgtaaaagattcagtacatagtacaatttacaatttaatttataaatgactaagtgggcattctctatgtttatttcactttccatcactcgatttcctcacaactaataattatttgtttcttgccccaatttaattttgtaaagtttaaattctagtattgagttttcgcctttacttttttctcctagtggttgacacggagacaggcacacttattacgtgcacaacaaggaattcctatttcagagtatggggtaagcagtataccttctattcttataattttgagatatattacatgtcgatatatgctgtgttcgtttattctatgtggcttgctcgtatatgtattatatgatgaatgaatccagtgatgtgactattcataggaagatttccctcccttttgcaggtacttgttgacatggttcgtgtccctgattgggcatttgaagctgcaggtcaagaaacaagaggtatgggccaagatgttgctacctaccatccaggattatacttgactccagctcaggtaattattagtttttctcaagttacaccatctgggggcagctcagatgtgataagctgttcttataatgtatgtaattttaacacttaggaaggtgtgttgatgttttaagatgtattgaattatttatggcacatgtgcatgcatgtcaatggttgccaaggacctctagttattgtaaaacttgtgcgctctaatttcaagtatgtagcttctgttttcttttgttgttgaagcttttgtctggttttatcagagggaagcagtcgaagcattaattcaggaacttcctaagttccgcctaaaggccgtcccaactgattgcagtgagtgtccaatctgcttggaagagtttcatgttggcaatgaggtatttatttatttatttattttatgattgtgaaacatgtcatccacactacacactaatctcaagtttaattatatgtattttcttaactgcaggttcgtgggcttccttgtgctcacaactttcatgtggaatgcattgatgagtggcttcgactgaatgtaaaatgtcctcggtgtcgctgctcggtcttcccaaatcttgacctaagtgccttgtctaatctccgtgttgactctgaacgatcatctgtccctattatgatgactagtcgttacataagagaccaatctcccagtcagagctattttttaagaatgcacggtctgcttcaccctgtccattcagaaaatgctggaacggggaatgatgcagatagtgacttggaatctggggcggatgttggtcctcgtagtcgatcaagcatggagctgatcacatctaatttacacattccacctggtcagtccactccaccagaacgctaaacctgtctgctggattatttttcacaaaattttaacactttttctaaccctttgctgaggaaagataaatgatattttgtcaataccatgaccatcgcatggtaagttcttgtgctggtcattgcatacttagttggagaaattatatctgtaaattgtaatgaagaaaactgcatcattgctccactagtatatggattataggaaaactcggggaaaacagtgcccttatttttttttccttttggtaatcagtgtagaataaatttgtagtgtttgtggctgcaatttgtttactgtaattttcttggttctttatataccttttgggatttttttctactcacaaggaaccattgacaaatgcacaattcatacatggtggtctctgtgataaccattttttctaaggtacatcctacttaccccacttgtgtatttatttagctgtaataagtaatatactcgaatgaatgctcttt

SEQ ID NO: 13870 - DNA, 1071 bp, Cannabis sativa
ttatggaactgttttgtcctactagtgatacaatgatagacagaggaataaagttgaacagttgttttctggcttacctttgatagtcttacagttatcttcctacatctagttcattcaagttacggaaaagcagggagatagagagataaaagaaagttgtcaagttagatggcaaattaaatagaaaaaaaaaaattacttaatggttagtgtcttactacttttttatcctgtaaaaaaaattatcgatgctgcgtttctactaggttaacaaaggagtagaggcaacactcatccaacttgtggaaacaggcttactacatgctgatccacatcctggaaacctgcgttacacatcttctggacaactatggtacttattttgcgtgtgaataagtaaatttactagaataattccaatgcatctgttagttcatcacctccttgtgatttctgcatcagctttcttgacttcggtttactttgtcgggtggaaaagaaacatcaatttgctatgcttgcatccatagtgcacatagtaaatggagactgggcatcgctagtgaatgctctggatgagatggatgtcataaggccagggactaatttccgacgtgttacattggtataatatcttaattagttaatgaatgacattatattatacttactgatatagagttgaaatttgtttcacttgctataaattgtacgccattcaaacaaattataatttgattgtaattatctttcaggatctcgaatatgcactgggggatgtagaaatcagagatggaattcctaatctgaatttcagcagggtaaaattctgttttcaatatttttagtttacattttttttttgacaaaagaccaatgctcactgataaaattcggttaagtaataagttcatcaatcaagatacacggaggaagagattctgcattgttaaattcattatcagttgtaagtgtcaacttagcatttcatgggagcatttttacaacaacgcaacacctagaatgagagatctttagttaaaactgttttcaatatacattattagg

SEQ ID NO: 13871 - DNA, 1092 bp, Cannabis sativa
  modified_base (50)..(56): a, c, t, g, unknown or other
atatttaaaattctgtaaaactgtgtttttgtaattttttttattgtttnnnnnnntttgtgaaataatcccttaatttaattttacgaatagttttttttttttttaacatataactacatttataatctattgtgaccatttactaaaaatctaattgttgacatacattcaaaattttataaacttttgtattaaataaataattatgtaataaaacaagcaagcaatacaattgattatagtcaataaattatatttctcgcgttgatataatataagaaaatgtggttttataatagcaacaagaaataaaacaccaaagcaattaaaagtagaaaatgataatgaaatgatgatcatcaacagaaaaatcgaaattggttaggaaggaatcaaatgatgatgaattgacaaactatgtatgaatcatatatatagttagttggcaacgcttacctacatggctacatcatccacggccgtaattagccacatggctacatggctacatgtacaccaatggagactagctccaacaatctttctacagatcgaaaacaatagctctcacaactcactctctttatttatttattattatttatgtatttgttttatgaaaacaactctttctaatataccattgaaatatatatatatatatatattgaattaactttgtacaaagtgactgatatagagccttatatactcatttagctaactaggacaccaacttaatagtcatcgaataaccaacttaactaacttcttagttaattcatgaatatcaactttgagtggttagtattttaactcattgtaatatttgagtttttagatttattcattacgacttaccatgcagtttattttacaaactaaccaatatttacattttaaaaactcagtagtacaattaaatgggagtttaaagattgttgtaaccacaaataagtatgaacctgattatataaaatttgattagaggtgagtataataaggcacataaatactacattaatacaatatcatgtataatggtataccacaatctatatctatatatgtgttcaaaaaaaaaaaaaa

SEQ ID NO: 13872 - DNA, 2323 bp, Cannabis sativa
catgtgggattgcacagcttacccgacatatccccttacagatcacgggactactgactgtcacaatgctactccttctcagtgtagttgctattgaaaaaggagtggttgcagtgaaagacaagattaaaaatctagttaatgagcagcaaattcacgacagtaaagtataagatacagctgggtatgctctcatttggacaaaatctgatatattacaatgaagtaaggaggtttgggtagatttaatctccccaggcgtagctttatatttttaattggttatccaaaaccgtttaaaagtagggacaagttgaagcgcctcaatttggtgtaagattgctcatgccttttgtgtggaatatgaacagaaactgcaacacacttgttctttgattgtgttgtaagtaagaaggtgataatggaggttaaaaagtggctcagctggaatgtgttggcttgtgttaggttgatagagaaaatgtgagtaagttcaagaaacttttcttttctacttgcatttctgcttcggtgtaccatctttggcaagctagaaatgaagtgtattgttttttgaaagtaactagaatatagatattattgtaaagaggatagtggaaattgtgaaaaatagagtgttgcttgtttggccaaagaatattggcaaacaagatagagaggtggtttgagagataatagtttatacatttgaatcatacatgtatagttatggtaaggccttgtatgtacaaaatgtaagtgattagttatattagaatacaactctgatttttttaaaaaaaaaaaaaaaaatacaagttataaattgacaaaaggacttataatattttgttggataaatgacacttaaataattaaagttcaactaggagcagtctacatgcaatagtcctttaggatacataaatatgtttgctcaagaaattaaattaagtcaccctaatttttcttttcggaataagtggagtttaacattcaaatatgtatatagtaataatgaggagccaaatcagtcttttgacataaatggcttataagtatggagattcttgtagagtccttgaatggcaccagtaccagcagccaaagatagaagaaagcacactaaactgagaagttggaggccaaaccacttggcagttcgtctgtgaatcttgttaatggaaatgtgcatctcgactgggaagaacaccacgattggccaatacccaatagcacccataagtgccaacatatcagtgaagaaaggcaaagctaaggcaactacagttaccatcacaacaaacactgttctccatgttagcctaaacaagtttatactcaacaatgttttcttcttactactcatcatgatggtagggccagcaattgggtaattggtggtaatgaatcttgactcaggccacctttttctagcccacaattccactattcgaaacactggttggattagtacctgcatattatatatataaagattaaattgcatcaaagctagcataactttattattaattaatgcgaatataatatacattaactaaattagtaacgtaatcatcacacctgatatgctccaactaagtgcaccacgatgaagaggttagccaaatcgatgatccaagaagtctcatgaaatccaaagccagcgagtagattctcaggtgcatggtttccaaacgcggcatagccaaagcaaccacacatcagaaaaaatgttgtcatgattgatacgcctatagtactcgctttcttcatcactttgttttcagatggagatgacttcaatgtgtcctgatgaaatcattttattgtacaattatataccatgtttataaatggtgtccaattttacataaatgattaaatttaaaatattaatcaaaattatttaaattaagcaatcataaaaatacatgtcatgagggggtggtatctcatgagtaactaacaatttttttatgagaaatgctaaaaggcgcgagtgttgtctagcaccctcctcgttatcatattgttattagtgtaattaagtatcgggtcctatatatttgcttcatttttttagttgaactacatttattgtttgccttttttcatttggttttgaaatacgaactctctctagttcagacgaatagttctcttaaaaaacaaaaacaaagaagacttttttcggtactaaatatatatatatatatgccgtcttgttctccggcactgtacaatcgtacaaccgtccaccgccacgtaaagatatcagcgttgattacaacaaagacgattaccatgattcttctcc

SEQ ID NO: 13873 - DNA, 3289 bp, Cannabis sativa
gctgatgctgccgttgctgcagcacaggcggctgtggctgttgtgaggctgaccagtcagggcggtgctaagcatactgggaagagagataagttggcagcggttaagattcaaaccgttttcaggggatatctggtatgttttttttattacttttctgtttaatcattatggtattttagtctgcttgttttatgattggggtaatggaggttagtaatgttggaagcaacaacaaatgtagcaaaaggttttttttttgtctataactttacttgttgcttactttaatgtcttttgtcaaaggcttttgaaaattgtttgatattgtaaatcttaataaaacagtacaaacgtgttttaaggtccaatgaaacagtatattggtttcttcagttattgatcctgcattctttttcaatttttattctcattctgttcaatcttctgaatctgagattttaattttaaaatatctctacttccaatgtagtatggaaaaacttggtttgtgcagattctaagttactgttctattgaatctgaatatgtttgcttcttaaattttaggctcgaaaggctctgcgagctctaaagggactagttaagatacaagctcttgttagaggctttctggtccgaaaacgaactgctgccactctccatagtatgcaagctctaataagagcccagactgcagtcagaactcaacgagctcgtcgttcattcaacaaggagaacagattgttccctgaatttcattccagaaagtccattgtgagtcccatttcactttgaatatatccattactgaatcttaatgtcttacttaaactgatattttcttcatttccaccttacaggaacgatttgatgaattaagatgtgaattccacagcaagaggctatccgcgacctatgaagcgtctgtcaatggatttgaagaaagcccgaaaatagttgagatcgacacattcaaaccgaagtcaagatcgtctcgtagatttagtacagcattatcagaatgtagctgtggggaggacatgccttaccaaccaatatcatcaccactgctctgtcctgctcctggtcgaatatctattcctgaatgccaacaccttcaggatttcgagtggtacttcaatggtcaagagtgccggttctcaacagctcacagcactcctcggttagctaatcccttatggtctaacaccccggccaccccggccaagagcgtttgtggggacagctacttccggccgtattcaaactatcccaactatatgacaaacacaaagtcattcaatgccaaattgaggtctcacagtgccccaaagcaaaggccggaagcaaccacgcctaagaaaaggctttcgcttaatgaaatactggctgcaaggaatagcattagcagtgttaggatgcatcgatctaacaatgctcaactagttgaagatgaagaatcctactgttgacaaagatttcataaagatggatgatcctctgccttttgctttagagaagataaaaaataaagaaaacttctctagctaaaggctttgtttcccactttaggatcaacaattaataggtagaacacagtgctttaatttgtgtaaattacaggcctttttttttcttctttttctttcttttaattgtctttatgaaatgagcaatgagaagagagcttttcatttgtttatcttttcctttttgtgtttaattctttacatttcaaaagcaaaaaaaaaataaaataaacaaaagagttcttcgggtgtgaatatgaattgtcaattgtagtaacaacaactaacaaaagaaactattggagagaaagagaagagttttgacttgtttagtcaactatgaagattgtcaacttaagttcatattacacagaaaagaagagagggcttgtacaattggtacttttgctatgactattgattaggtagggaggggtaggctgtggaagaaaaataataataggtaaaagtggttgattatacaaattacaaaattttgaaaactatagatttcccgcttttaagtaaaagagaagcagaaagtgtagtgtagtgtagtgaagcttcggtgtaggttccactaaacaagtggctaaaagaaaacaagtgcaatatgataccctgcattccataatttaggaatgaaaagctgaattcatataaagaatccacaagagaatcttttccataaatagcaaatactagctcgattacttgttaccttttttttttaaaaaaaaaaaattaaaaaaaaataaaactgtgagtagtgtgtgtggtggttcaaatttcatatccctaatacaactcaccccaaagcaatcaatggtgttttttactttttttttttaagaaaaaaatctttgttctttcaggatactctgtactgtgtgtaattatatatctattttcattattaactcaatatttttttttaaaaaaaaaagtgagaaaaatgaaaattaacaaaatagagaaattttcgaaatagacgttatgcatatcattggaatttggagatgccactatttatttattttttagctaaaatgttaaaatagaatcatgttactccaccatcctctttactataagaatgattatttatattataaacatagttttaatttgttaaatagaaattgattcaataaaataataaaaaaagaaatattattttgattaaatattatttaaaaaattggcaaaaaaatagggacttatttttttttatagttggagtatatttttttaaaaaatcactctctattttagtgtttattgtttagagcatatgattggaaatgttcaaaactcttctacaaaacaattttattaaacgttaataaatagggaaagaaagaaaaaaaggagaaaacataaaagatttgcactaggagctagaatgtaatgtatttatttatcgagaaatgttaataataattttttagttaatttttacgtttgaaatttcatagtagaatattattttttatagcgtcattcgttataattatagtattgtttttataaattctaaaaaaattctgaatagtttataatgctaaaaataaaatttttgatatattttagtttaccatacgctctcaaaaaaatttaaacgtaatttcagtactataaattattcaaaaaattttaaaaatttaaaataacaatattataaacatagcaaacactataataaaaaaaaattgtaatatatgtttttccaaaagatgtataaattaagtctaaat

SEQ ID NO: 13874 - DNA, 1522 bp, Cannabis sativa
aactaacggtaagggaacatacagtatgtgccaaaattacgatgaattgtaataattttcattattatcaatccactaaagttttgagaattgtgacttgtgagatcgagaataactctcattattattttgacatgtatcattacataacattaaggagtataatacttgtcttctcgcgtagctatcaaaggtgacaactgtgaaaatgacatgttaaaatagagcaacacctgaccataactttagtgtatagctatctcagtttgtacaaacagagaagtaaattacaattggatacaattctgtggcatagtttccgcccttaaatgttggacaataaggtgaaatccacctcagcaactcttaaattatgattcagctgatggaccccaaagccaaactcccttacattacatgtcaaggagtagaggccaaagctaaacaagagccacccccactcccaatattggtgtgtactgtatgttaacattaaacaaccatacaagccaatgtaattacagtatatatatgtatgttgtatgttgtcttttactaaaagtatttttacacatgtcatgtcatacttctattctacaaaacttcatattgctagtcaatggttgcaatcgttgctcttcttgctaggtgggacattctccaccgtccctaataatactttttagctttacagagatttatatatttgtaatatatgtgtgtatgaatatggtaaaaatgtaatacatgtgcacaccagtttggcttcctagtgtcgatctacaccctagaataggataaactagtatttaagcagttgtaaagagtaaaaaagttctctacctagttaaaaattgcacccatattaagttagtttcactttcattagtgcatgttaaaagaatattttttcactaacataaatgaaagaggagtactaattacaacttcttaatttttataccagaaattatatactaaaatattttttttcatagcaatattcgttatagataatattatctttgtaaatttttaaaactaactgaatagtttacagtatcaaaattaaaattctcgacattcaagtttaccacgtgttcaaaaaaattcaaatatcttttcggcaccgtaaagtactatttgcatttaactttcaaaacattatagaaattgatgttgtaactatactgaacaccgatataaaaaaaaattaaaaaatacttcgacatgtgcttttgggtagtggccgattcatgatttaaaatgaggtggtgtgattttttttctaagacacaggcaaaaataaacttaaaaaagaaaaaaaaatactatttgtcagatttgaagccttgaactccattatatatatacaatttaatttaactattatactaaaattaatattatgtctataaatatatagtaattaattaaaatgtatattgtaatagaaaattggcattagcactcttctatattaaagagtgtactaattataacattttaatcaacttggata

SEQ ID NO: 13875 - DNA, 1505 bp, Cannabis sativa
aaagtgagttcatctaaattctctgtaaagacttattacaaacagattcagggcttaatcaatattttgtatttatttataaaaaaacaaaccaattaatgattaaaatacatttatacaaagcaaaaagaaaaaagaaaaagacttacatctggaacaacaatctgagcatcagagttctcaatcaatggggcatttgatgaaaagcttccatttccagagctggcaatgaactgtggctgttcagaattcgaacctgtcaccgccattttcccttcttctcaaattttcttacacttttacaaggctggaactatcagaaggaagagaaaaacaatcaaaaactccattttttttttaatgtgagataaattacaacacaagaaagaaacccttcaaaaaaaaaatcatgattttctgaggtaattaaacgataaagacatttcaacgtatatgtaattttcctcatttttttggccaaacccttaaaacaaattacataatttttaagttgggcaatccttttccattcaaagcaatggattaaaacccagataagaaaatttcacaaataccaataaaaatactttctttcaccgttttctgttttctggaaagccaatcaaatacacatatctatatatatataatatatagatacacgacaaaaacatcgtagacaaaattgaaaataaatagcaaatcgtaccaataaaaaactaagatttaaatgaggttttttaattcggggaaatgacaggaatgagtcttgaaagaactaactccatggccatgccactgaaactgaaaccaaagcactctgtttctattagttaatttatttttgtttatatatagaaaaagaaaataattaaaataattaaaacaaattctgatttgctttggaattaaacctcgtccaatcttatttaattcaagtcaaatgagagagaatatagaacgaagagtttttggctcagtttttaagagaaattatcaaatgaaaaaaggacacgaatctttaccgtcaatcaataaaagccacgtgggacccatagtttgaagggtcaatcctacgtggcatatggaaacaccgaacgtatggcccgcgtgagtagtacgcaggcgaattttacttccacgtaagcttaataaaagaggatctttgcacgtgtgggccaccattggggtttgtgcgtgtgtgttcgtttcggtctgaggtttttttagcttaaaaagggataaacagcacaagccactgatttgacggtctcgattcttttcaagagtagtcacagctagttagatcaacggctatagattcctttacaaatttttttttcctcgtattatttcaattgaatcgaaaataagaataattataaaaaatattatttttttaaatttaatttcacatatatatatttacggtattttataaaaataatatataaaaaactgtattttttataaataaatttaaaaaaatcgtaaaatattaaaaa

SEQ ID NO: 13876 - DNA, 3776 bp, Cannabis sativa
ttcatggacccaattgaattcaataatatctttcattcacatctttttccatcaagaacgttttataaaacactttttttttaaagattggaattttagatccttgggaaatctcttttcttataccctaattctccttcattcggagatgacgtaacttgggctcatcatgctatactcgcagggaaggaaaattgagtaattctccctcttcatttgttggttctttgagcgcttcgatgactcaatgagtttctgagtaattctatttatgggccgattcatcttttatcataacaacatttttagtaaattctttaatcaaaagtttacataaagttatatgattcttaatacttaattacacgttgagattgaaagatgcttattagtgcttttattatttcttaggggcctagaagatctatattttcaaccataataacattattgaaaacaatcgcaatccaatccacttttaacctctcgtgcacaaacattcctttcctaacatgtaattctttttgtctaatgaatacatttctaattatttaaactattaaataaataaaagagactataaataaattcaaagaagtccgagaacccatcttaaaccactaactcataactaacttaacgaaaaaaaaaacaattctcttcactcactctctctctctccctttctcctctttcaatctttttccaatctcataattatttatcgtataaggcccccctccgttaatggcgtatgaccaaaactccaccgattcatcaccgtcgagatcaataccgccatcaccgccaccgccattcacagctcctcccccggcaccggcactgccccggatgccagtgtccctgatccaaccatcacagagaaagaggtcacacaacaaaacaaaggtcctcagagttttccggtcggtctttcgttcattcccaatcatatcaccagccgcgtgtaaaatgccagctctgcctaacggcctaatggagggccaccaccaccatcaccaccaccaccggtcctcgtccagcgggcaccgcgtgacggggacgcttttcgggtaccgaaaggggcgcgtgagcttctccatgcaggagagtccgcgttgcttgccgacccttgtgattgagctggccatgcagaccaacgtgctccagagagaaatgggatccggaatggtacggatcgcgttggagtgcgagaaacgacaggaaaaggacaaaacgcggattgtggatgagcccctttggacgatgtattgtaacgggaagaagagtggttacggggtgaagagggaggccaccgatgaagatttaaacgttatggagattctcaaggcggtttctatgggggccggtgttcttcctgggaattctgagatggaaggcccagatggagagttggcttatatgagggcccattttgatcgtattattgggtccaaggattctgagacattgtatatgttgagcccagatggtaatactgggcctgagcttagtatatttttcgtaaggatttgataatcattatcatgaatgatgaggggaagggggtttctttgtgtattggtggttttgcgttgaattgaaaaatttgacgtaatttgtttgtgatgattgtgtagaaattaggttttgttattggttaatttgaaattaattagattggttgattttattcaaatttctttcttcctttaatctctgctaaactggttacgtagggtgcattttgtgttctttaaaaatagtcgatagaattcaaatttttaattaattaggtgttttagctagttgatttattattatttctttttgttaatctagtcaattcaaaattattaatttcttacacctgcatgttcattcctttactgcatgggtctgctagggcctctaagtctaggaccacttataattatacttctaattaatttgagattaaggtatacactttgaattttgctagctgtcgatcattggtaacactcatgctaatctcatttacatataaatatatgattatttatctaattaatttatatagaattatagcttaattaattatatataaatgtttacaacaactcatcctgatcaatgagtgtagtgtcactaagcttttgtataatgattatcgatcaagtagtttccaccgccttcaaattcctaagtactgatcagttggtatgagtaataattataacaatgatattaaagttgcgtaataacataaagctaaggcctaaagcacatgtctttaattttttatgtatccttgtggaacaaagaggtcgccggcttctattataaactcattttagtttttgtctatcaatatgccttcaatatgggaaaacttgctcaggatctgaagaagggatttctccacatgatcaaaagttgcaaaactactactactacaggtaaatctacctatataataatttttggtagtgtattatattattttatggaccattgtccatgtatggtaatagtattgccttgttattgattctcaatttttggttgtactaatgttttccaacaataatttcagaaacggaagatggagaacaacccaaattgagatctgttcaggttatctttctacataatcttttttgggtaaattttaataatactattgtaatgcatatatgtataattacagagagtaataagaagaagaggtaaaggcatacgcatcaaagctccaagatctccaaaacgcccagaagttcctaaaggtccccctccacagaccagttgaagctaaaaccgatacttattgtgtaataatatttctacttctattattccttcttaaaacaaaaatataagagagttttgttagtttcttgccagggattaaaattatgcgttttttattattctttgtctagacttctgctcaaattataaatatatatacatgaatttttgttggatcatataatatactagtattcgatcttcatttccaactctaattaaatatatgtatatataccatcaagttaagaatgcacaatagatgtttcaaatttcaccgaaaattcattcttcaacttcgtcatagtgctttttgacaggaataatattactcacacacgacacagatctacgctttaatttcaaagaaaaaaaggtacatagaattatgtcatattatcaaagattacacaataaacataaattatatatttcattctaccatgtttgatatggaaaggatttataaactaggtctcctgttaagtaatattttttcctatacacattaattacaaatctcatattgcacaaaattcgtgcaacaattgagtttgaaaaactactttattgggttttttcattaaaattttcagtgatgggttatatttaatttttaagtgataattttaccttaagtttattttaactaaaccatcctgaggtgaagtccacttggcctttctctcttctttgcttgttttttattcaccattatttgcctccatgtaatggtgacagagtttgatgcaccagtccaccatatcaacagtcctggccctgggttctctttccccgaaattaatttcggcttgtttcgctgccagaaaacaatgatagttgaaatctctgaatctggttgatgaacatcaaggggtctgaacccctttgcattgcttattttcttccaaactttgtattccaaaacttgatgcaaccccaaatggcatgtgtcactctcacttagtgcatgtttggcatca

SEQ ID NO: 13877 - DNA, 4390 bp, Cannabis sativa
aaaaaaaaaaaaaacaaatatcacgatgaatagattattcttggcaccaacaatccactacaaataaacatacttgccccaactgctgtgcactttctcttgattttgcatcatctgaaaacagagttacttccttcatggcgcacatttcaccactttcactacagttaaaaaaatgagggaaacaatattgctaaagaatttttgcatttgaaaaaaatgggcaaagcaaagtattgcatgcgtaaagaaagagagcaaatgaacagggattaagtaattctgcaatacaatatcttaaaagttaattatataattataataaaataatataaacaattctgccatgcatttacttattgagttgcaaaaaagttaattagtattatacatgcaataactaaagctttcacttttgagcataaaaccctctacaaacatacctgttgaaacccagatatacatgtccaaaggtgccccttccaagaagccgccctttcttccagcgtgaaccagggcttgttggattttctgccctaccagggctgcgtggtactgtcggagttgctgaggaagaatatgtaggagaaaatggactactgtgagtgattgttaatggaggaaggggcaaccggtgactttgttgcctcccatcatcaggcttgctagtaggtgattcagctggggttcctccagcacgtggatgcagaggggtgaccgcaccactatgtatccttgagctgggaccagggctaatcattctgggactagggattggagaacactcagggctacatctgctgtgctgccaaaatagctgccctgacagatctcctcctactgaattatgcccagaattatgacctgaacctggactagaacagtgagcagaagctatatctggatatggttttcctgcccagaacccagagttgagaaattgctcagtaccaaatgccctaataggactcctagaaggacttgactttgagctatccggagcactgcagaaagcaccatgagatggaatttgcaaattttgcatatgcatggttgccagttgccttttaggtaatgtagacaaagtctgggtgttgaacagaagatttgatggcctcaatgtttcctttgagttcttttggttcaaagtagcgggcggatccttgtgcattacccttcacaaggataaaattaaagttagtcagacattgtatatcacggaagggaaaacataatatttctttgtgccagagatgaacattaccttgatgggctgttcagagcagttttgtttccattttcatagtcagatgtaaggggacttattagacgtgactcagatgggtcatcactatcggtagagctatcgctagaaacagaagcagtggctaaatctccatcagcatcagtaggatctgccctgttaaggatacaagcaggctttggaaggggaaaaaccagcaatggctttgaccgcttgtcaagttctgattttgaggatgtactaatgctagagttggtacggccaatactaagttgcgtcctaggaaggggaagcggttgggcatgaggcctttctgcaaaactttgacatcttgatacttgtgtggagggagatggtgatctggatggaaccctggatagagatcccctttctgagacagtatcactacgtctcctggagcctcctgattttgagttgctcttatcatcaggtgcactcttgaattttctgtgtaatgtatcaataaaactctctttattcgctttcttttttccttctttagaggaagactttccccaccaagaaggcattgctggtgttccgagcttacactaactgtcagtttctgagttcaatttatttttattcaaatgagctatcacattacacccaattgatgtaaagatatgcaacacaattaaaagttacaatgatcgattcaaatggccttatcctcaaaagtcacaaaagtaggcaaactggactcatttcaggatgcacaacatggaaagcagcttaaaagtggtttcacaaaataacctggagtggacagatcaaatatattattgttagatataattcagacaaaatacaactcatataagccaaacaaaatgtttcatacagaggttgaaagcatgcagaattatatataaaatgcacaagattgcaacatgcaacttatatacaaaagataaaataacgactccctttttaggatccaggaagtaaacttagcaagtcgaaagattttaagaagaaaaagaacgttttaatgaagataagcttagggattaagagagcatacataagcaaatacaaggagtgattacttcaagagaattgaccatgtcacagcaaggcactacaaaccagaattagttaagagcgttcccacaaagtcacctcaattggatgacttttaaaagcctggctaataaattgtttgttacaacataactaactggtctcacagaaactaattaatatcaaagttcaaaatcatacctacttcctcttcattaatttttttgtcaaaaatactacatgcttgcatggcttttattttaacactgcaatccaactttttggtaagtaaatgaacgctatgaagctaaggttctgtcgtacaatttgcaaaaccaaattgtgagttgcacagaactaatattgacaaataaaccagctccatatctgaactgctgtaacagactgacaatcttcttaacttaacaaactgggattgaaaatccactaatttctaacaacctttactgcataaatcaatgaagtcctcttgctggaatggctcacattttcaccatcttatgtctgtttcacttccattttcaactaaaagcatctggatcattttctaatatctgaaaaaatgaattaactaaacaaaaaagatctttcattttggcaagagaaaaaacagtcacataattgcagttgttccaatacacccaattctcattacaccttgacatacccataatgccatcgaaatagatcaactcatacgacccaattcactgcccactatgctacaacatattactcccaaagctcaagaacccactaacaaacacttcccagcacagatctacacaattcaagcattcatttccacaaaatcaaagagttcaactttaaaaacgagctcaaacccatcaaagaaatagaattctcaagcaatatacacactcaaaagttacaaacttttatttttttcacgctcagcatgtaaaatgctggtaagaatcgcaaagatgaatttactaacaaattgcataaacccaagaaccaaaataaaattgtaccccaaagattaatgttctaaaaaagaaaccctaagaaatagccaataaaaaatacccatagaacaaaattctctaaaggaatcaatttggtgagtgagtaagcaaagtaaagccaaaatttactcactgtgatggaatggagttaaagtgtttttttttttctttttttatggagagaaagagtctctcccaaaaggagtacgcttgaaaaaacagctccaaggacgacgcgtctggctgctgtggtggattgaagatgcgaagctgaaaaggcacagaagaaagagatagagaggaagaagaagaagaagaagaaggaggaggaggtggaggggggaagagagagaaagagaaagtgagtgtttttgtctgcgtttttttcatttattattatttaattatttatttagagaaaaaatagataaatgactaattataattgactgtgaaatatgtgagacctcggctagactggatgacgtgtagaaaacgacgtcgtttacgttatcatcatcaccatccattctccgttgaatgctgatgaagtcaactactcctgtttagtcaacggctattgtgagggagtatggagttatcatggtacgagaagtatgagattttccgtatttatggtttatttatatattttttaaaataacggcaacttacttaaatatattccattctcattatgctttacgcaagtgtgattgtttatttattattatgattgttattattattatttcctttttcttggtgaggaagaagaagaatgaagatcctttggcttaatttgcaatttggtccgaattttggatttcttatttgcaatagtacccacctaaagtgatgaaacttgcatacctaagaaataaaacataatagttgagtgttatatgatttgtagaatatatggagttagagaaacaaattctctctctctcctccagatagcatactctaggggtgttcatccgatccaatctgcatttttttgtcaaacagcatccaatccgcactaagtgcgaatttcatattttggatccaatccgatccg

SEQ ID NO: 13878 - DNA, 2417 bp, Cannabis sativa
atggtagtagtcaagatggtgagtgttggatatatcaaagtgattaacccaaaaattgttcacaaaataccaatccaagcgttccttaatcgtatccacacttgatcgattttaatccaagtgaaattgtccccatcataaggggttgcatgaagcgagcaatggtcaagagtcttcctaaaaccttccatttgttgctcatttcgaaggcatccatgagatttattgttattagaaagtatttcattaaagtccccagtcactaaccatggttgaagaggagaaacatccgcaaattgttttaaaagtgtccaacaatctgctctgtttcggacatttggagctccgtaaaaggcaatgaaatggaagcttgcttcaccatcagccttcataaaacaatcaaagaagttatgtccataattaagaagagtaacatccacactatcatgctaaaactaatgcgaggtgattcaagaccattgctgaaatgtaatgactgttgaagacgggaaatggaatcaacagaaagtttcgtttccataagaaacaaaacatggggcaattgttgtttcacaagcaatcggaggtgtctgaatgcactcgggttccccaaacctcgtgcattctagcttaagatatttattacatatccataaattttgtaaaattactaaaaaatttccgaactcaaaaaaaccaatttccctcttatattttataattttctctttaagtattatattttaattccttgctttattcactttgagaacaattttttctttctacaaatttaaactcaaatcattgatatttattttgttaactaaatataaaagaaatttaaaagttattttaaaaatttatcaaaattattaaacataataagtgtatgtaaaatacaatttagttactttttgagtttgactttttttttaatagtgtaactcatatgatatttaaaatattattagtttccttacaaattattttataaaacctatcataattactttataaaaataagtttatttagaataaaaaatcttgtaacatttaaaaataaaaaaaaataaaatattttttagtaacccatcaagtggtttgatgtatttaattttgattaattttaaatattaattacttatagattaacaaatataaaagaaaccaaaatgtgacattagattctgatcatcttttcaacaacgagaaaaaagtatatatttctttataccaaaatgataaccttaaaaaactacattcttaagaccaaacaattattagcgtattaaaaacaactttttaaacttttaaaaataatttttttaatattaaaaataactacatttgtgtaaagtaaataaaaaagaaactagcataagttgtaactaaaataaacttctctcattttattaaataaaagagtagtttttttttaaaaaaaataataataagactcacttatactttggtatacataaaaaaaaaatagaaagaaataaaaaacttatttcaatatacgtgtaatattaaaataattaacaatatttatgtaaataatttaaaagtttcgtattctcaagtaaatttctcaaatatatataggataagttgagaaatatttttttttttttttgtatttattgataaaaaataccttcatattatattttattaaaaagtatttacttttgtgagtagatttctcaatatacccgcactctccacttaaatctagcatataatttatattaatctaaatgctataattggatattatctataaaagtggatatatcttaaaaaatatagaaatgtaagtaaaaattaaaaatttggtatagaacgtattttcatatagcccctttttttattttattttatcaaaatagtctttgggcccatttttttaaaagggttggccctgcttttaaaacaacattcaaaccatgcaccttcaatgtatgatatactacaacttgtcttcaattttatagtaatatgaattctaacacaaaacatagacaataaacaagaacatcccaacccaataaatacatatcaactaatacaatgatcagatccaacactatatacatagagatgatattgtatccacaaataatcaaagaaaaaataaaaataaaatgtgaaaagccaatgtaagtgagtatccaaaattggtttttatcaaatctattatactttattgaaattcaactaacatttacattggttataagtcatttcaacaaacagctagcatgcattatatttaatgattctaacaagcacacaaattagaggtatttttttagggattatttcacaaatacatcaaaataacaaaaaaattacaaaaatacagttgtacgaaattttaaatatttttacgatttttataattttattta

SEQ ID NO: 13879 - DNA, 1233 bp, Cannabis sativa
ttttaattaattaattaaatgaataaaaataaataatacctttggttttggggttttatccaaatcgttagagctcgaattacgtgaatagttcttgaacggagaagaagttggatctgagacgcagcggcggagaagtggcggcggccgaggaggaagcggggccgagcaaggagtgacggagttagtgttggtcttgattacattattctgaggagaactgtaagtgttcgagaaaatgccagaaccagaacccctaaaagaatcggtcgacggaggagcgtggtagggatccgaaacgcatcggcgaaggagaaaagggttagtcggagtagagtcatccgccgccgcagacggtggcggagattgtgaagcgacgtcgttctgttcaagaaacagtttcttgggtttgggttggggatcgttaagatcggtagggcaaagaagagaggtgggtgttgaaggaggtggcaacggtcgtttgtgggaggcggaattggagtggtctgtaatacagccggagccggagccgaagaagccgcagttggaacaggggtggtggtggtggtggggtgttgtagtgatggtgggtgaactctcgaggcggagagctgagaaattgagaggttgatcttccatggattgggatgattcttgagttaggtggtggtgatgatgatgatgatgatggtctcccatttttctctttgatttggtgataactgttaaatgttgagatttcagaatgggtttaggggcctttatatacacactggtcggagctaagatgccacgtcatctcaaacagaaaatgcggcaattttttttaaataataataataaataaattttattattaatgtgactaatgcagcattgggttatagatgggaaacgttagaaaataaaaaatttaaataataattttatgacaaaaaaaaattgtatgaaggtatggttagaagttggattttagtaaggaaaatggaaagaagaaaatgagaaataaaaaataataaattattgtattcttctcaaaaaaaaaaatttatatggtatggaaattgttaagtacttttttcaatgctctacttatatgggactcgatatttaagtacattaacagttatataacattaagtaacgtgttaagcattaattgaataattgtgccttttagcatttttttttttaatttaagatggattttactttaaaaaaatggtaacttgt

SEQ ID NO: 13880 - DNA, 1765 bp, Cannabis sativa
attattattttatatatatataaatatatttgactcggtcaaaccgagtcttttcaaaagttgccgttgcagtaacaaccactttttgcctgaatttattgaacttcgaacgattcaacccccttataatcctgatcagatctgctatatttatccaccatgctaactattctttaattgaattaaaagatctcaagctatattgaaaagggaaaaaaaaataaatgatcaatgatttcatcatgattttcccataccatacatcttgaatcaggtgcgatgttgagagtctacccaggactgctagccacaaaatgaaattgtgtttgggtgtgtttagccaattccaaactacaggggtccagtgaactctttccctttccccaaccaaagtcttgtgtaaccgtgtttgatactgtacttccctgtcatgaacatttggtgattggaaaggttctttaattaatcttttgctgccatgattctcctccaataccaacttcccgaaagtgggatctcataatcccaccaactcttttctttgatgtttacactatgtatccacttcactcataagttgcttgtttggaagcgattgcccatacatactttccaattacaggcttactacataaaatagttcttataaaaccaaagtcttcttcttttttttggtttgcaaattttctctcatgatacatatcatggacccaagtaatcagatactcctttccataaaaaagctctacacactgagttaactcttgtaagaatcttttttgacaaaatcataatttgtgcccaataaacatgtatataaatcaatacagagttaatcagtgttactctaccagcaaaggaaagattcctcgagctccaggtattgattctttttgtgattttttttcaatcaagacttcaccttcaacacttgcgaggcacctgtaagcatatgtatagaaatcaatacagaattaatcattgttactctagctaccagcaaaagaaagattcctcgagctccatgtattgattctttttgtcattttttccatcaggacttcaacttcaacacttgtgagcgtctggctactataggaaagccgaagtatttgaatggaagggtgcttcttatgattcccgatacattcaatattctctgcatttctgaaggttgcatcccacaaaaatagaaggtagatttttcctcactcagttggagatccgatgttttggaaaataatttcagcccttgcaataacatgtatattgacttataattcccatggcaaaataacaaaacatcatccgcgaaacttaagtgattcagctccaagtccttgcacctttcataacttgccacttgtctaaccttttcgagaatctcgaaaggtcccgtaaacctagggcataacttgcctcttttctcgaaacgcttgatacctttcattgcagacaccataggaatgcatgatcccctacttaaaactctacatttttgcatttcggatcaacataactctcattctgactttaatcttttcaattgcttcgttagtccgttgaattgattcctggcctaattatttcttctcccctgtctcatcccagtaaaatgggagatctacactttctcatatataatagttcatagggagccatccctatcgtactttggtagctgttattgtacgaaaaaatttaccaacggtaggtatttactccaggagccctcgaaaactataacacaggctcgtaacatatc

SEQ ID NO: 13881 - DNA, 1492 bp, Cannabis sativa
  modified_base (37)..(82): a, c, t, g, unknown or other
  modified_base (955)..(971): a, c, t, g, unknown or other
tcaatagttcaggggacatttttaatgaccttaaaannnnnnnnnnnnnnnnnnnnnnnnnnnnnnnnnnnnnnnnnnnnnnatcctaattagcctttttaaaactttaatatcaacattttgcaaaaatatgtgtatttaactcgttctttttaacatttttttgacttaaaaatagggatattcaacgttttcctgtaaaactttacaacttgttactaatattataagtaggaaattataatcatgtaactttgaaatttcacaaggtgtactatcgaagttatcccaagcggagtggttccaaaccaggaagacaccacttgacgggggttttggaaggccaatcacgtatttggaatcatttgaagtgtttataatagatattagtggaaactagtacggttggagagatcaggttatgatacagaacttgttggtgaacgtagacgttgttacatttaaaaaaaaaaatagatttggtaataaacataaaagttgtaaatcttgttcttagttccaaaacatcttgaatcgtccgaattagggcaatattgagcaagttatgctcaaaatacagatagaatacatgacaggaaaatcctaaaatgtcaccatctcgcccaaagagtcaccacctcatccaagggtgtcccatcttgcccaagagtgtcatatctcacctaaactggccgccacacacccaagaggtcacctcttcatttcatgtcaagcctcgactcgctatggctttccctagcctcatggcctaaacaattagtaaatataagtgttgaaaatgtataagggaaagtaggactaaagaagacaaaaagcatgacctttccacatctcatgacttaaacacttagtaaatattctctaagtgttgaaaaggcataagggaaggtagtgttgggaatattttaatagaatctagatttactaacaagtnnnnnnnnnnnnnnnnntaaatatgaatatctctaatacgataaaattaaacacataagagtttagaaagccttacattgattgcagtagaataatatgactccttccgctcgatctgtaacctttgttcctttctgtcgcagagtaataacaagatctaagcttggatctctttctctccttcgggttggttaccaccatcctccgcagtgattgagtacttgacttgctatgtgtgggcatgacactctattactatgggttgattatgaagaacaatgaaggaggttcgaaattctatcaaaggtgtctctcatctactagttgttaggcaaagttagaaactaaatttggtaggttgaaggtgttggatgagaatgagagcatcgtgttccttttatagtgtttcaactagggcttaggattgaattatatggattaaaaaagaataaaatattaggtaaaaattgcacatagtggtcggccactaaagggccttttactagttacaattttgccactttatttcaaccactta

SEQ ID NO: 13882 - DNA, 4380 bp, Cannabis sativa
  modified_base (970)..(989): a, c, t, g, unknown or other
tacccataacataattggtcacttaattttgtatcacactttataatagcatatacattatacatatgtgcccacttaggatttttaatccaacagaggcatcttgttgaacgtccacgacgtactctcaagagctctattgatgtcaacctcatgaaaaactagaacaaatactcattagtctcgaactcctttacgtacattcttcttcctagacgccaaagagacgccatcacatttcgaactgaatcaaaatcaataggtttatctcacaacagcctccccaccaagcaccaacggacatcaaagtcatcagtcaatccctccacctgatcatacctgaacccttcatcctctttctcttccacacttaagtttacccacctgttttccaagtcctccatcacacgactgctggaagccataatagatcaaacaaactcacgtcactaatctcaccacatacacaaaacacttaaacatcacatcgtagacatgtcaaaagacaagacacaatatatttatcatgtaaaatagaattcctttagtactcttctaattataatattctcattaattatctttttaatatttaatttaatgaccactaatgctattttaatttttgtcctagtttaagttggagcacaataataaatatttagaaaatatagcattcgtttgtattttaagctaaatttagtacatcatatattggagacagtttaatggaaagaaattataaaatcatatttttcttaaataaaaatataaaatcttatgatacattttccatccttgtgaaacacacgcgtgtggatcattgtcactttctaaacactttctagtgccaaattgcggagagaaacatggaatagttgactcttgtgcatgcccttttcattcttaacaaaccactttttttctttaaacactcttttcatttatgtcaataataataataataatnnnnnnnnnnnnnnnnnnnntaataataataataaaaaaaatttgccatttttcgtcacatcttatctctattccctacaaagagtagaaaaaaaattgtttaaagaaatgaagggaataagtaaagaaaaaacaaagtttaagatgatagttagacagtcggaagaaattttaattcctttccccaatcaaaaacttttgcgcttgtgcaatgcagaaattagaattttttttttctttttcttaaacccataaatgtcataagaaaagtgattagtttgtgtgccagtgaataccaaaagcgacatgcaataacaatactttaggtggcgtcggcggagatgaatgagtattagaagcaccatatggtcgttttaaaccttattataactttccttaccaaaaaaaaaataataataaaagaagaaaaaaaaccttattataagtttaatttgcatgtatatatatttggaaatatatagtactgttagtatactcatagtcggtatttcggtagatcccacatattagttgtactaattgtaaattttcaaaaaatttaaaattatttaaagtgtcaaaaataaaatttaagtaattgtttattatcatacgcataaaaaagataaacctgtgtacaaaaaatatttaaatcttattttgtacattataaactaattagaattttttgtaaatttataagacattctaaataactacaacatacaaaaataaaaaaaataaaaattaaactaaaaacaaagaaatagatagtgtacgtaaccatcattttaaaaggtgaattatagattattctaaaaaaaaagtgaactatatttattaaaaaaagagaagggtaccaattgttatagacatattgcctcccgttatagaatttataagcttatggtagaaaaaaaatcgtggtaaataaaaacataaaatgtgttacatagattttttttcatttacagtgaactattggcatgctctatatattattattctttgaactaatttaatatatatatttattttatattaaatgccactatataataaaaaatattgttcttttttaaaagcattgcaatttaaatttaaactatggagcattacaattcaaattcactacacaaatctctcttatcttttatatcttatattaaatgtagttatatgacattacaatttaaatttaaattcattgcacatatataaaaaaaaggggcttttcatttttacacttcaaaacagttttttttgcttttttatggaattaggcatagaaacctctatagcaactagcgctgcaaactaaattgcaacaaaaaatcgtacaaaaacccctactgcaactagcgctacaaccactttaaaaactcaaatcgtaaatttgaaaaataaagttaaaaaaaaataatatatagagtaattcccctaaaaaaaaaaatacatccttctattatcctttttttttttactcaattcacatgtctaggaaaatatctttctattattgtttttttttaataataaaatagaaaaaatagttatgtttcttaaagaatcactattatatttcccagttatcaaaaaattatattttaattattatttaaaaaaataaaaaaaaaagtgtgatatttttaaaattattaaaagtattataaaattaaaagtacattacactaaaattataattaacaataaattttgaatattgttatatttttttatatataaatatcactcaaattaaattttttttaataaaaaatgatgttatttaatgaattatatccacacaaaaaaatcaattataaaaaatatcttttttattattattgtttaaaaaatgtatattataaaattaaaagtattactgttaaaataaaattataattaacaactaattttaaatattataatattttcttacataaatatcacttaaagtaaatattttttaataaaaaataatattacttattgaataacatcaatgttgactgagattttcaaccagcaataattaaagctatatgaagtaattaataaaaattagaggagaaattttttacattattggggtattaatgagtcttagctcacgagtcactatatttatgagagtatttattacaaagagttttccaccgatccccatttgctttatattactaaggatatttataagcttgcaatggtgatacaaggccaccattgtggtgtttgtttacaccatatcttgcacaatttcccaagtgattttagggtataattgcctatttttatgatgaattttggattatctataggtattcgatgagatttgatttatcccttatttatgacttgacgactcatttatacaactattgattgatgtgggtggtcttgtgaaatcagggaatgatgagtttaaacccttcaacacgtctattagagtaaggtgtcagattcccttccttatgccgcattaaatgtgtatacagtgttttgatcatcgtgctaagtgttatgtgtcatcagctctcctgtacccttctccaggctgactttactcacaaagaggaaaagacaggacatatttattgtccaggaagacccttctaaagatgaatgctttatcattactcttttgaaattataagactccgggagtgtatgggtaacgtgggtcccgtttccatttgtctagcttctgatctgccacgtattttcggagaaattctaggcaatgataaaaaaaaattaattatacaactaaaaatatacataactaaaattaaaaaaaaaaaaattaagaatataactaagtacacgtgcattacacgtaatattaatataatatatatatattgacgcattttttttgtcatgatcgtaaaaataagaggactcgaattaattaatttggctaaataaaattgcgataaataaaaaagacatcagggatttatagtactttacccccatgtcgcaatggtaatagggatttataattaattattaaacaaaattatcatttaaatatatttattaattagaccctgcaatgtctcttaattaataaacaaactctcaattatgcctttctttagtaaaattcataaataagacatagtcattatttagaattctaattaataaaataaatcaattaattgagactacaaaataatattatcccagttagtacggggaccatggacttatgtaagaaaactcctgataagtagatttgaaatttaccaaataaatttcctaatttattaattctttctgactccactacagattcagaattgcactcttcattacatagcactcctacaaaacaagcctttagagtcgcttttttcaacataataattaataaccgacgccatagggttgaaaattttt

SEQ ID NO: 13883 - DNA, 3450 bp, Cannabis sativa
attggatccaaaatatgaaatccgcacttagtgcgaattggatgttgtttgaccaaaaaagtgcgaattggatcggatgaacacccctagtcgtgagataagaaccatgagagaaatacattttcttgaaaatctttgaaaccaaagagtatagacgagtaaaaagtcaccagccttgcttactaagaagtgattaattatgatccgaaagattgtgaaagcccatccctcccacacttttatgtttactcaatttctccctagacaatgaataaaattgaaactcttctaccaaaactttaccatatatgttgttccatgtcattacttatctcaataggaagaagaaaaacactaataacatagcttagtaacacctaagcgacatttttattcaaaacttcttttccgctttcgagagaatatttgaatcccaattatgcttttcatgtataattattgtgtatttgaggtccaagtaaactaattattgcctttaataagtattaatgtgaccaaacatattttaagttattatccacaacatgtttttttttttttggatggaatattcataacgtattatccaaatctaacgtagtttagttattgtcttcttttttcctttaaaaaaaaaaaaaaaaaaaaaaagcttcaataagtagctcaattgtttgattcggataatagatgatatttattaaaactaaagacttgactcagattaatttatgaatccaagtacaaaaagatgaatatcaaggaaatttgactaccctacattaatcccatattatctcctacaaaatttcagcaattaaaattaagtatatcacaggttctctatttcgcatatcaagagagagaaaaagagaaatgcctatacaacagaaataagaaatatagaacacatatttttttttctttctcatttcacatctgcagcagcttctgtaacatataaataaaatacaattgtggggatttcggtaatcttcagcagcaatataatcatgtctgttcttcttcctcttgcaactccatttgaaatatcgagtattccctcgcaaataatagaaattcctgaaacaaattaatgggatgagatttaatgatatgtgcatacaaaatatgggtttagattagaatagaaagcctagcagtaagcctcgaacaatataacacccttattatattcaatcttacaaagctataatttgaaaatggataatctttaagaaaagtttctgactgaaaagactactttccgcacaagaaagaagtccacccaatcacataaaatgttgcataaagataaaaactcaacttttgaatcagtgtacatgactcggatcttgttcctttgtaaatgagtttagtagcttacctgcaattgctgctgactaaacaaatgaagaaatcctgtatctgggctagccactagttcaatcaacttatccaagctttcaggcatgacacctgactccatgagtgacacagagacctgcatatatgttaacaatcatgacatggaaagtgcaaatatgtgaacacagaaatcggaaataataccaaaaaacatgaagttgtgctttcatcacatttaaagttagtaatccagggacaacttgcaaatggagtctataactagaaagcgtacctgcattgatcgaagaatggtttctggaagacagaccctgcggcaaagtccccgcacaatgtacattgcagggccttgtaaagagccatctttacttgaataccaagcatctaatcgagaaatctccaaagtaatccccgtttgaaatcgaggaagctcacctgcataaagataacaagtgaatcagtgtacccatcttcattttcatcatactagcttcaaagacaatttatgagttctttggcaactcatttacttcatttatcatttgcaaaaaaaggtgatttcaaagttccatgaaggtatctataattaaacgtaatttattctcaactctaaaattgatcaaatatgacagacacctggatgctgttcaaaaacaattttacttgaaacaaaattcctccaatatggtaaatttacttcacaaaacaacagcaactcacaagaaaagcacgacaattcaatggaatttcatacctttaaaggcagcagccataatggtaccaagaataccgccgtcatttagctcatgtgtcccaagaccatcacctgctacagccaagcaacgaagcactacctcgatgcaataattgtctacagaagatataaaaacatttacctacaaaaggaagtttcagaataagcgggtaaaaggagcatggttagccaagattatgcagaaaggatggatttctgatattccacaagagtttgcaccatgatatcatttaactaaatagagttaagtaatacttatataaattttccttttcatcattttttcatatttagcaaaattgggataaaacagcataccatgagttgccgatttgacacaatttcctcatccaatgaagagtaaagggcactcatcaatgttgtgcatatggtggcatctggacacatgcattcaccagaaggaaggcagatcattgcaatggcatgcagttcgaggaatgcaggctccgccaattcattgatatggtcttcagtaaaaactaaccacggatgttctcctgaacagtgaagaatttaaatcaatgtatttacatattaacccgaaaggtccaagaagttgcatatgatatgagaaaaatccaccagtccaaaaatttgatgctacattaagttctagccaattcagtttatattccattctttggaatacaattgtaagaaaaataaagacgtggatttacttactcaataacaataatagagaagacttcaaagtctccctagctgctaaaatagttctttctttttcctccaatgaaagcttgaccggaggaacctctgcattatctacttcaattttgagccagttgcgatatgttgcatcacaggaataatattcactctattttaaaagagaaggcattaatatatcaaaattgaactctggaatagagaacctacacacacacacacgcacgtacacaaaagatcttaaaagttggctaccaactggcagaaaaggaagacatgcatacccaatcctggaattcattcagattctcaaaagcattataattctccaatgtatcggtagattctgatagttgcttcaaaggttcagcaagaaaactaagtaatgtgtgggcacctatgggcattgctggcaccctccacattgaaatcagggcaaactccctgaacaatatgttgctataaggaaaagaaacataaatataggtcaatatttcatctcatcaattaaagtaaaataaaaactaagggtgagaaatggagaaaaggcaacaggcaaccaattatatgaagtaatt

SEQ ID NO: 13884 - DNA, 4530 bp, Cannabis sativa
  modified_base (4476)..(4502): a, c, t, g, unknown or other
tattttatttatttaatattttataaatctactaataatttcatttcagggcgttgagtgtggcccggactcaactccggttatcaaaaacgacgaacaacctaaggaaacgacaatgaagaaaatgttggagagcgttggagttgatatcgatacatacaacttgataacaactaataattctgaggaattactaaaagggcttctctatcttcttcgactccaactaataggaaagaggtatctaattgtcctcgacgatctaacgtcatttcctgttaaggacgcttgtgatcttgtgtctgaattgccacaaggttacaaaggaaccataatggtgactagtagggaagagaacatagtgaaggagatggctaagcttaaagagcaataccttcaccgtcttctgccgttatcggaccctcaaagcttgtggatgatatttaaagacgccgttacggaggacgttaaaaaatggtatggtggagtaacaacagaggagttcgattgggaaaaggtagttgaaaaagaccttaaaaagaaatgttacgatgagataatattaagtggtaaaaatattgatgtgaagaaagtgatagaaaagacgcttataagtaggtgtaatgggattcctttggccgcgaaattgatggctgatactatgagtcagaacattaagacactcaacgctgagaagaagaaatatgaccaggtctactcaaaatccgttaatgacagccaaaaaaatgatgaggaaaaatctaccaaacattgagcatgcaactgcaagtagttgttaattgttgttactaaataataaattaatatatatcaatttatttatgatgtgccatcaaatacaacaatgaaagggatataattattgaaatataaagttacaaaagaaatttaaaaattaattaccttaattattgattaaaactcttcttgaatacttattttgattgctgaggctgctgattatcaccatctccagaaacccaaactccatcggcatcacaagggcacatagtgactaaagggcaatcaattttctccaagtagcacaacttgggaaagaactctttcatttcttcccaatccaacttcaatccagccaagaacttcaaacgcagcgtttcaacggaccacgtgttcttcaataagctctcattattcccatcattcttggagttcgagtaccaaagatcacctccgagttttcctcctctaatgtagagcttcttcaggttacccaatttctcaggcttcaaccaattgggagtagtctcatgagggtaacattgtaaatccaacttctcaagatggctaaaaggagaagcagtttcagtattagtccctttctttttctttgaagcagtagaatcagtaccactagttgcattattatctgctccccatgacaaagtcaacctcttaagcccttcaagacatccaaaagtcttcaaatcttttgcagacgggaaatctttcctacttatgaaaagactcaatgtcctcagcttcttcatcttatccaaattctcaaaagcacaaaacttcttactctgattcttgtccttcccaattacgaaccccttcaaaacttggagattggtcaacttacttaactctctaggcatgtgatctatcatgtaacaatcagatacatccaagtgagttaagctttgaagatatgatatttctttgggaagctcctctagattatgacaagctttgagatctaagactgtcaatttagtaagccctttcatcgaatcttttagctcaatgattctagagatgccctgaagactaagaagccttaaagacgacatactcttcaaagccttcaagaattcaatattatctacttcgatatgatgcttacccgaagctcgccatgtgcccaagtaaagaactttgagagctttcattttcgataaccattcttctacttggacacgtttttcatcttcagtaggacatttcttatctctgcctttagctagccattctaatcgaagatcaggaaatggctcgtccacgttgaatattgtctccagattagtttcccattctttcgaataattctcattctttgcatctttcttatcatctttctcatctttcggttttggaggctgttgtggtcgggcatttgcattagaagagttggaagctgcagggatattcttctcatcatctttctcatctttcggccttggaggctgttgtggttggacatttgctgcagacatatctttgtcatcatctttctcgtctttcgggtttgttggaggctggtctggttgcggtttagaggcagctgcagcatccttctcatccttttgatcgtcaattattatctgtttcaccaaacaaatcctttggcaattgggggatctcgccttgaggttcctatcatcatcgtaagcaaagaagttttccttggccgcgagttgaacaataacagaccgaatgataggctgcatcttgtagcttttagcaatggaccatcgcttcctaaacactggttcaatcaagtgtttctcagtgaatttagcaaggattttcccagcagcttcttcaatgaatatcatcttatttggatcatcttgtatgtatccctctcctgcccaccaatacgtcagcatcctcttagtcagctcctcgttctcagtaaacactgcaaaacacaacaagcacttcttctcattttcttctaaatcatcgccattataaatcctttctatttcctcatgcaaagagctttgtgtaaagcttttgctggtgtataagctcaagagttcatcgacagcaatttgagtattcgggccggttgttgtttcctccgtcttcttctgggattcatcctcatgatcagtagtattttggaacgaagaaggaattcggtgcttcaactttgttatctccttgtttatgtcccacagcttgttgccaatagaatatttatatttattctcatcatcattattatctttggaagactcatctttcatctccttgatatttttaaaaagaagctcgatgcgattttgatgatcttcaatctttttcttgaaatctttctcgtagttttccagattagacaagtaattcgccatttgttcaagattgatctccatctttttaatctgttcatctggatctctgttgacgataccaccaccaccgcgtctggtgctaccacaaccgcgtctggtgctaccttccccacctgatttatctgtttttgccttacttccttctccatcagctggtttatgctttcgaacacagtcacaccatgaagatgatacctttttcggatcagacgcggtggtggtggtgctactttctttgtgctgatcttcttggtcgcctctctgtagtgtatcatcaatttctttttggctgtgaacaagggtatgggcctctgtttcgacataatttttcaattccctaacgatatcaatcaagatttttggtgaaacatctttttctgtttttgttggtgggttggcagagtttttaggattagaagttttattggatgaattatcagacatgatgaaatctctgatcttaactcatttcacagtcaaaatatatacatgcatgcatgcaacgaaaagaaaatgctaactttttctttattgagtattaacttattcttgtttgagaataaaatctgaggagacaactataatgattgtaaatcaagcaaatgataagttagcatatatatttattccaaaagataaaggtagctagttattaaagctgctttacagcttataattatgtgtctggtttagaatgagttccatgcttgggaggattgatatggaatatggtaccactttcaacatacagctgctaaagtaaaatgttccttgtatatgtcttcttatatacaagacatttcagcatgagtatacatacataaagtgaatcaagtattattatagaacaaataagaaataattaaagtgtgtttcagactttgttagaattttatctatttaaaattaataattattattataaaacagaaaatgttaactacttaaacggttactttatagaaagtgtgagtaccactaaaattcttaaaatcgaagtagaaatcttaaaaaactagtgggttaaacaaattcatctttataatgttagaaaacactaaaacaataacggttaggccaagcctccaaccagcatcataattgatgttaaagtctacatttttctctctaaggttagtactattttgaaccagaaatataatgtgcaactacaatatatacagtaaaatatttatttaagaatatatttgggttcaattaaattgtattctaattgagaagttataaataaagttacattagaaaaaaaaaaattaaaacaccaaaaaatatcattgtaacagcaatatataggttaattagtaatttttccccccaaactttgacnnnnnnnnnnnnnnnnnnnnnnnnnnnttttggccgttaaaaatttcccttgaac

SEQ ID NO: 13885 - DNA, 5241 bp, Cannabis sativa
atatacattatgataaaacaattattattttttaaaaaaaaaaaaaagaaatgataatttcttagcgataaaaacgacaaaagtaatattaccaatcttgtataataaatataatctacttaaaattagtatcattgtttgaattgaagtcatacaactcgtaacactagaatatcaaatatactaagtgaaacttactattaaatacacttggtaagaaaaactttcttatatgtcacgtaagttaaataagtagagtgataaaattccatattgttcatgtgacaaatcacggtctccccatttcagaaaccccaaactcctaagacaaacccatcactactcctcaccaagtccaactataaaatccttatcaattcttgggtctccttgagttttgtctacccattattcaaccttgtaaatatctttgtctactcctaatttaaatgtttttctactttaatggctcagaaatgacatttggatataatggcatttcacctgttcgatgaaatgcctcactcacaattatatatgcttcgtaatatttacatgattgttattgttagttactgatcaaagcactcatttttattctttctagttttggttttttcaggtttactgtctgttcaagaaaaaacaaaccgagtgggggacatcatgtttgggactgcagtaaggtattttgccacaaaaccaaagccaaaaatgaaacccatcgagctcaaaaccccacctgagcagacccagacaatcacaagagtcatcttcgacattgttaaggagcatggcccactcactattgcccaaacttgggatcacgttaaggtattttttgctttattataaacttaaaactattgtctttcattctatttttgtttactttttcaaaacaaatcctcaatatgggggttaagattttttgggtctcactctaagtatcccaaatttggttttttattttcaggaagttgggcttagaggactgacgagtaagagacatatgaagatagtattgagatggatgagagaaagacagaaactcagacaaatatgcaaccatgttggacctcacaagcagtttctttatacaacttggttcactaaacacaacaccaccaccaccaccaaccacaacaaaacagtaaatgatcctccaaaacccaagtctctttgaaacttatctactatttttgaaacaataaagactcttgttagttgttacacacattatatgtttaaacttgttgttgagtgtttgaattttgaatgtaaatttggtgtttggtgttcgttgtttgatgccacagtacagattactaagaaaccagatgctttgacatggctttaactttcaaagcacattatatataaaaataaataaataaaccaatcccacaaagcagaaaattacaacaaaaacaaatgtctacttagtcagtcaacgctatgcaagaaaaatttgtgttacttgtagttgcatcaactcttctatcaacaggctactgtctttatctctttatatgtacatcatgtacaaccctttcagtacagataagagtagccaacatgaaaggacgataatggtatatctgatttctctgtataatagttaacattccagatgaatgaaactagtagcattcaccagtcaccaccactagaattaagggaaatgagttaagaatctgtgtggctctttgacctgcgcaggacttccttcagaacagtcgcaattctatctgccatgtgatgttctaaaaacctctcttttaccttttcgtagcctctcttccccattgtaagccttctctcgacatgagtggcaagcttgactatattttttgcaagaggagtaactccttcctttccagcagggtgtaagaaacccgttgttccgttcactacaatctctgtggtgcctcctgctgcagttccctgatgattttttttttcggaaacaggaaaaggaaattaaattgttagaaaaattgatatactttcagatatgacaaaagctgcaagtggcaagtccattaccagtacaggaagctgaaatgccattgcttcaatggttatcctgccaaaacattcacctcgtgcctaccaaattagagtaaaataagtaaataagaagataaaaccgcaagagctaaaatgatgctacaagcatagacagactacctgagaattttgaacaagaacatcaattgcagctaaataaggagcaactgtcagagttttgttcacgaaatgaacacgatcttgaattttcttctgaattacatagttacgtagttctgattcgaacttggtctgagcattcatgtcgcttcccacaattacggcatgcatcattggcacctgcagctttttctcttgaatcatttgcaaactttcgtagaaggaacgcaaaaatagatcctgcccttttccacgtgaaacacctgtattgacatactattagtactaagtactaacaacagaaatccaaactagcaacaacaaaaacctttaacatcaaataatatcactctagccttcatgttcaatagtgcagaagccaaattaattactaatgtcatcaacaagattatttaaattttgtaacttaactagtgtctcgatcaaattaacagaagtatgttctatggaaaagtaaaataagtgttgtcagtttggtatgcatactgtttatgatggcaaagactatatcttcacttcgcactccaagggattcccggacgtgctcacgcagaacccttttcgctacacgatcttcagcgacatccattagttccttgctgtttccaaggtgaacaacatatgtatgcggcattttgatcctgcaaagaaaatatgatcatctaactattgttccaccattgataaaaaggaaaaactactaagagaaattcgttaaatttaatcttaaactattttatatgaacctcaaacgctctcgggtcctgttctcccaatattcagccgttacatgtgaatcaatcatagcaccagaaactaaaggaagatgcttgacataatctaatttgaagtaatgtcctcgcatctcatggatccaccataagactttcgggagaacacggccaacatgttccttgagaactaagtctaaccatttcccagaaacagcagtgttcaaaacaactaagtcagctttcagagctgtatccacagcttcttgaccccttgcagaaaacacctaatcatacaaaattacataataaaaaatctaaaaaccaactaaattttatgtctaaaaaaacagagacaaccctcaaatcaaaaaccatgtttgaaatcattacctgaactcctctattcaacatcttatgctctaaactgtataccacttcacctgtatcaactggcttttgaattgtaacccaataaacttcagcaccaacacttcttaacagaaatgctaactccattagcaataaaggtcctcctgtaagaacagtaacccatatatatatatatatatatatacgaaagtcatcacctttcctaagaacaaaatcataaaacgaaaaacccataaagataaaacgcaaaatgccaacgaatcgaaagattaccagaaagagagagctcatgggaaaccaataaaaccagcttagatttcataaacttaagtgggcttggactagctcccacgatgtaatcagagtagggtaccgtactgggcctcttatcgacgacatcaaggtttcgatcgcaagtatcgaaggcggctctgataaagaaggcgatcaaggtagagaccgaaagcatgacaaggaatgccagaagccaccgcttctgcgaggcgacccaaccaacagagtgtttggccatctgtgagagaactcgaaaactgaacaaagcttcctccctaaactgagtttccgcattctagggtttggatttgggactggaaatggtgagttttacacatttggctaaatggggtggtttgagatgaaaatgaatgacgtttcagagagttttgggattaaagatggaaactttgcattacatttgggtagagagagattagaatatatgaaatttgattgattttgattgaacagaggaagaagaagatgcaccaatttcaattgggttgagatttaaagggcaagggaaggctcagtggtcgtattctcagagaacgaacattcctctttagttgaaaagatgacaattttgtgtaattccatcattttattttaacttttttttctttttcttttgtttttctcgctggaatattatgctttcggagaacacttttcttttattttcttttttctattgtaataaatataaagaaaaagaaaaatgctattttctattgttgtaaagaatgaaattcattttatatggaaaatttgaagagacaagtacaatgagatttatatttgttttcaaattttttaaaaatttataagaataatattataatataataaatattattatgaaaaatttaaaagaaaataatatatatataattttaaacataaaaaattgattaaatattattttagacagttttgtaaatgttattaattagacctttttttgttaaatgataaaatcaattctgtatttatttaaatggtacaaatagaattatgaactgatttttttgtcaaaataaaaaatctaatttgtaaatattatgacaaaactgattatattttctgtatctattcgtaacaaaatataataacttttaacaaaatacataatctaattagtaacttttgcatacaaaatacaggatctacaataatatttactcttaaaaaattataatgaacacctttttatttgaaaatttattcccaatttaagatagatattgattttctataataaaggacaaaagtactcctaaaattgaaaatatactcgattaaaaaaagtaaatatatacattaatatatttattcctctcataatcttctatcaaatttgttttttaagtagattttcaatgaattttattaagagacgttttcaacctttcactacatgtatctcatttaatataagtcatttcttattgattttcaacacactaattggtataaaatttgactattactaataagggataattgcggcaaaagtccccaaaaggttaagattgatgcagattagtcctcaacctcgaaaattggcggtaatagttctcaaggtcaccatttttgttagtcc

SEQ ID NO: 13886 - DNA, 13343 bp, Cannabis sativa
  modified_base (4265)..(4276): a, c, t, g, unknown or other
aaaagttgtaagaatcatcttctttgaaaaactttaacgagtgaatcaaagaacccaatgaacacaaacatgagttcatgtatgctcaggattcaggctaatttactaatgatcattattgtgatatgataaactcttttcatggtaaacggaaagttaataaaagatgtttattacatatcgacctagtgatgcataatctaattatacacaatacatttattacatgtccatctacatatgtgatccaaatcaaaatcatacatactagaagtatagtgaatatagtaaactgtacttggcagttccatattaaagattcacaatactttaatacactaccaatttattttattcatatcgtataatcttaattctcttgtacatctacatccttacaagattataccttctccatatgaataaagaatttttagatatttaataattatactctcataattaatatatcatttatcttattattatatttcaaatattctccaatatactatccattaattacctaattttaggacataaatcctaacatctttcaactcccactcggggatacaattcatctttttcccaaactaccctaagtgctggctggataggtattctgggattgggctcttcaacttcttctcttaccataaacactgatttggtagagacattgtagcacttccatggactcttctgatcgtctcttctaatgctcccattatcataagggaatttcatacacaaatgtctgatagaggttattgctcaaaaatttactaggacgagccatcccataatgggattataggcggttggatagttcaccatgaaaaatgtgcaagacttgaatgtggaagaagactacttctggctatacccccatttagagtaattgggagctatatcttccccatgggcaacaaataatctccattaaagccctcaagttggatcaggcaaggcataagattcccttcgattatcccagcgactttaaataggatattgacttaactcccattgtccaccaaaacctgagacatcctttagttagcgatatgagcttcgatcaccagtgggttattatgggggagatgcacgtgtctggcatcctcttctgtgaaagtaattaacaaatttagcatttgtaacctttgagatggtgtttgtactagagcacatgtttccctttcctgcacaaactcattaaggtaccttttttgattcctagtgcttctaaaaatatgtgggcctctagaaatggttgcaacaaggatgtctagttactctaaatgtgggccactttgttgttgggccaaacgatatgtgattttggttagagcagctatttgatcttctagaccgtccaatattgtcatttgggagctcacgttcacggattttattgttgatattgtttcttaattctccttcgtaacacgttaggtcccagaagtcccaggaagatcccttccacctcttgatggttagtccgcgagttatagacatgaaacgaacattcgagataaagatgcaagctctcgatactctcaagtcccctgagcttgggggttaaatgttatccctgttcctaaacgatttctatgtgaaagttacagaagggtgccacatcggattaaatactgatatcataaaccttcccctaaacaagattacagaagatgctacagtactcgaaagaatgcttctccagcgaaggctgagatgattttggagattctcaccttatgcttccgatattggaagtggatgggagtcgcgtacactccaagatgatcgcagattggctaatctaggaagaccttagtcgaacctccttgaaacttcttaaggcctaatttggagctaagtttggcagttgcatatcttctgacaccaaatcaaatcctgtcccctacgtcagaccatggttgttaacgtacgtgcttctgtagttcttattgtccaacagcttgtctaggtaattgtttttaaaggagaaacccttgggcgacacgtataaagacctttacgagatatctgcattgattgagcaccacacaatgagaaagctacctaacaaactagcgatcagatggtcttgttattttttggcccttcttacatgttgactaagaaattctaggtgggtaaagggtatgcccttacccacacgtgtgcctataaatacctctactttctatgtacagagggtgaagaatttttacttacaaaacctttcctaaaattcctacagggctttcttctttgagagaaggaagaggaatacataattatcattgtaaacacttgtaatactcaaatactcactgaaaaggccaatacaactgactcgtggactagaggttattaacgcctgaaccatgtaaaaaatccatttgtctattatttactattttgcatttccttaagctctcattaattggttttcaaaaatcttggaaaacaccttgcaagggcttcttgcatttggtgtgaaacttcttcttggtgtgccaacctttcttggtatctaagaactcttcctttagccgtactactttaggatcttgctcatagtactcttcatactccttgtcacaacctttgttgtaatcaattttaaggtcctcatcatgacctcctcgctctttgtcaatgggccatcattgacgtgttcttcgtggtgttattccctatgaggcagacgactacctatctttgacgtttccccatcccccactgtacctgcctgagcgtttgtcaggggagttggttcacattgtcattggtagcattgtcaccaccatcacgagttgtaggcattgcattggtagttctggtaacgaccatggttgtagatgacaactatggtaaatctttctttaagctctcaatgaaaggaccaaaatatttactaaattttttataaaccaattaagaaataacttaagcttaaaaagaataaataaaaagtaatgcaacaaggatttttacgtggttggaaagttaataaaccttagtccacgagtcaatattattaaccttaacaagctatgtagtattcttacataaaagtgtccttacatagtcttaaaaccctaatctttagcctttaacttgtgagatgaatttctaacctttaacatgaaaagatgatgttttatttataggctaaagtcagctttatgggtaaaccagaccgactagggttttcttgtgttaactaagcccactaattgggtaaaatacaatattatagtgactttgggctagttaagtgagacccagtttgtaagataacggttatccgtacggggggaccacttgacaatgacaagtggcatgcgtcgccacttgtgcacagtattcatcagtgaagaaggagttggacaaaatgcatgtcccttttggtgcggtacgcatttcccaggcgggacaaactcccaattttgtgggatctgatgttagaaaggtgccacgtaggatgatatctggatggctcttcaattgccctttccagattaccccaatatggtctgactttattatgtttataaattggacttgtgtttgaatccgaaactgtgacccaactctattgtgggctgacccactggcttgattgggcctgagaatgggtttgtcttggttaatattaagcctcaaaagtacccgtgtcacttatttggaaacatcgaaggataacaccaactttgctagtgaatgagcactagcattatttatcctcttaaaataatgtattaagataagagagagatttccaagcatggaaaatatcagaaagcacaataacaaatttagtaaatcgggtttcatgacgccagttagagacaatatgtaaaaaagggaattctgttgtatcccagtaggagatagagtagcaagccttgtaacaaagctacaacatctacaacatggggctcaagcgcaccaaccactagggttgaagattggttggtttggtcaagttctttctatataaaaatctaaaattcagttttcggtctggattggtgcaatccgaaaaccgagtggtcaatccagaacctttcttaaaaccgaccgtttttagcctcagtttggtcagtttaaaccatccaaaacgaacttttttttttctttaaaatatgatccaatttattctataagcacattattctatattctaccactataaccatataatttaattgttcaaaaactaattgtcttattcttttaactttaannnnnnnnnnnnaataatatattattattatatattataagtaactacaatatataaaacaaaataaaacttaataaattaatatatatgtataatagtcgattttagtttttttggtcgatttattactaaaaaaaactaaccgttcaatggtggttttaaccgttagtggtttttttgatttttggttctgctgattttagttccgacagtgttttttatgtcgatttaagcagtttttttttcaatcttctagatttgatgctcaaccctactaaccactcgaagcattacagacaaaatttacccatcacgattggatatcacaactttcaacccgactttccaaattgtgaaacttgtgcttaaccatagttttttttttttcttggttccctttgtttatttaataaaaatcaaataataatttttccatatattttggagggtgaattttattaaaaaggaaaaaaaaaaaaacaaagtccatgctcctattattaatcaccgttaactaaatatattggcgcaaagtttggcaccacgttgggacaccatttttttaacacgtgctcctgtattgacatgactacatcattacatattacattcacatctacccattccataccatttcattccctattttctttttctttatcatctctttttcccttacctttttctatttccttctcgcgaatctacaatcaccaccatcgacccattaacaacttctcctaattttccaagaaaaattcacttcctgttttaaggtacccacttttccatttcccatttgctatttttgtgatttttctcttagaaatatagtggagaaagaaaaacgataatctacgttctttgtccttttgatttctagtttggtgggttggatttagatcttaataagtttacgttgtttgacatgcaatgtttgagtttctatgaattggtaaactggaggctaagattctgatgttgggtttctgtttctttttactaactttgtttatattggttttgttttggttgctggacaagtggtgtagaatcaaatatgaaaagattgggattttactgtatctgggtttaaacttgttgatctgaacagctactagtcctcaaaatttcctgtattcattttcagtaggaggccaaaatgtgaataacattctatgcaaatatgattataaattagcaaatttgtcatcttattgtgcatttttgtgttatgttcaaatgtgcctttatcttttaatgcctttcggaatttttttacatgattttgacgttgtcaattcagaatatgtagcttcaaaacattagtgcctcatggtcatttctagtgtattatctgtccttagttatcatgcaccttcataacagcataaaagccttgtggcttggtttcagcatttcagttatgttcttgaagatgtttggtatgtgtttgtttgcactttggacactttagatatgccttggtgtccaaccatgagttattagtctgtaagttttcctcttagtattagtttgaaaattctatgaagagtttattgactttgtatatctgacttcacatggatatctgcaaagtccatttttgacaagaaggaaatgattttcctgacactgtttttttctcaggttttggaattagtattattggactcaaaatgtcttctccaagtaaaaggagagagatggatgtcatgaagctgtaagtggccctttgctattacccctttattgttgagtgagggatctacattatttatgttaatgcaaatttatctatgtttttaattaatggttgagtaaatggacatatcactaaggtattgaagtgtttcttgagcacccttagtggtgataccatgttttcatatgatgatgctttctctagttattgcaatttgaccctctgtggagcttttagaaggattagattacgttatcattttatacatatcctttgacaaattttgaatgattatgtttctttgcatattggtgtgatggggattcactttttgtataaatacatttatgtatgtatatgcatttgtaaaagtatctgtagtttttgcgtttctagtagtacttttgtttcaataatctttgtattttactttcctgtaaatgttttgccagacattctttacttatgctaatctagtggcaactgctatttcaattattgaatctgatgttattcgtatattgttattcatggaattattgtcgaatgtcaatgcttttcaggatgatgagtgattacactgttgagacaataaatgatggcctcaacgagttcaatgtggaattccatggtccaaaagatagtaatgcttatattcttctcactctcttacattctagttaattaagtttactcagacaagttgtattagagcaaattgaagtaggaatgagtttacttagataactaggtatgcttattacattttcacttcactgctttggtttactgcacatctgaattatcttattaaattatggtggttacaggcctttacgaaggtggattctggaagatacgtgttgagcttcctgatgcttatccttacaaatctccttctattgggtttgttaacaagattttccacccaaatgtggatgagctgtaagcatcccacaattcaacgacagcttattttcatgtctagttgaaataaagttggaatgctaatgatcattaaatgctatgaaaatctttcaaagcatgcaacaatagcagtataataactgcatttatttaactacctggaagatggtttagatgttcacttattttgaatcttttgtctattgaactgactgctgccgcctaccaataattgcagatctggttctgtctgcttagatgtcattaaccagtcatggagtccaatgttcggtacttgccattctgtcttagtgaattttagaatatggaggcacaagttctttaattttatcctgcgaatctttcagaacaagttctttaattttatcttttatcattttctcatttttggattgacatgggttcttgtttttttttttttcccatcacagatcttcttaatgtttttgaagtcttccttccacaactcttgctttatccgaatccttcagacccgctcaacggtgatgctgcatcattgatgatgaaggatcggaagctatatgaccagaaagtaaaaggtgaaaatttaacgtgtaattagcccaccctttatttttggtactcttgaaatatggtatcaaacaatctatcccatattttaaattcttcaatctgatcataacaatggcattggtgctttggagatggattctgtttgtgaaagttgttgtcgagatccagagacagagaagacggtcaagctagtcattaatatattttattattcattaaagaatctctggtattgaaaatagaaaaaaaaatacctcatggtgataattatggctgtaagatactctagctgtgaaaccatgttacagttactcatatagaactaggtttctcagtagaagtctttttcaaatgtggtaccaagtccaaggctgtgatagcatgaataaactcattggtctcttaaagactgattagttgttgaaattatctgatcacagtaagttccacccgccctctctctctctcttgtgcataatttcatgtttatatatgattcatttgtgttacagagtactgcgagcgatatgcgaaaagggagcatatagccaacatgacacctgaagaggagagtgatgaagagcacacctctgatgaagaaactgatccaagtgatgatgatgatgatattgctgggcatgcagacccttaatttacgtaaaggggtaatatctttgttcaagccctccatttacagaagcagcagcatcacaaatacacattacatgtctactatttagttgctatactatttgtagactaaatttgatttccttgtaaaaaaaaatcagtaactgtgttagaggctaataatgccttaatatttcaaatgttgtaacagacacaatgggaaatagagggatagaaaggaaccgctgaatatttgtcattacctttcatattctgttagatttcttattcttttgcttagcttaatcatatattttatgtttctcttcaagtgaaccaacctgtttttggacaaagacattgatctcaaggaacttttctaacaattacaagaatttttttatcttggaaaacattgagctaaatgtcattaaacttttgatttgtaaaaaattatgaacttgaatatgtgagaatgaatttaagtcaatagttgtgttgtcctaaagcaaagttagacctaagtcaagataagttcagggatggtttgtctggatggtgtagtgtgagaagcctattactttcaaggcattgatacgaataatggtttgggtggaatcctagacaacgtagaaatggaaagttccccatggaggacaacttgctccaaatggaaagttccccgttgaggacaacatgctccaggcggaaagttcttctcgaaggcaacgacgaatgtctgacacaatataatgatttgttccttctattcaattgtcagatgtttttcatgaaaaatgaggataaacgtaggatcatgattccactactctgattgtaacgtcttactagtttaggtgcgctacaatatttttcttaattgttgtgtacacctttgctaataaaagagtttattgaaaaatgtgattaatttaaacttttaaataaactataattttgggatcttgttaaaagtttacaactactttcaaaatttatttatacaaaagctgtcactcagcgaccaacaaaaagtggaacacttaaagtctaaccgtcttgatatgtacaatcttcatacagctctaaactcattctaattcagtttttgtctttacttgcacatatacgtaataactgtgagtcgatagactcagtaaaaaaagcataaacataaacaacatataaccagattgtaaccagatgcccatacacctaatcacaatcctatcgagcattcaacgcgtactaggtttggaaggtttgtatgataaagcctagcatatatatgttgatatctcagtacaactctatgtacacttcaccaatatcttgatatgctaatctaatggctactagtttgcctaaaatatatatgttggtatctcggtgtaattctatgcacacctcactgataccctgatatattattctaacgaaaactaacatgcacactaaacgtgtacccatacacctaatcacaaccctatctcgcattcaacacgtactaggtctagaaggtttgtatgataaaacctagcatatatctattcatatctcagtacaactctatgtacacttcaccaatatcttgatatgctaatctaatggctactggtttacctaaaatatatttgttggcatctcagtacaactctatgcacacctcactgataccctgatatgttattctaacggaaactgacatgcacaataaacatgtactcatatatacaattattatactaatcttaccttgatttaaaatgtaagaatatcggtaaccttgagtggaaactgctgctcgacgatttaaggtcctaagtcataatttgcgtaaaactggtaagtgacctgctaaatcacttttcgggaacgtagacttaaaactaaaaattttcctatcgataaatatcgtggcaataccttaaatatcaagaaaacacataaaaataatacttcggaaaaaatactccaaaaaatagtaggtcgtttataaaaaatggccagaccgtttttttgagtctctgcctactaaaaacggtagactgtttctagaaaaaaggtatgccattttctactgcagattttcataaaatgtcatttttattttaaatccaccccaaaacttctacaaagctccagaatacctatttgagacaaaaggaacaattaccaacaaaaataaacaccatcaaggcccaaaatttaaatctaccattaaaggaccaagtttgagcttgaaagctcaaaccttgtccaagctcaacaacaaccattaaaactcacttaaaaaagcataaataacttagaaatagcatcagaaacaaaccctaaatgtcataagatcatgcaaaaaccaaatacccaaaaatacatcaaaacccatttttttctgaaaatttcaaaaggaaaagaaatataaagcttaccctagaacaatacttgaatccctgcttctaatcctctgattttaaggtcaaaattacagagatcacttacttctccttggttcttgtttgagccgaagctaaagggagagagatgggtataacttgtgatttttttcctattttggataaatcttatcaacataagttgttttattcagattaaaatattaatcctcatcttctaaataatttactaaaaccaataacatatcttatggtaaaaggatcatttcgctcttaacttatcacttaaggataaaatggtccaaaatcataaccttgtataatcttgacatgctaaatgtctaactatcttgccttgctagttttaaaatacccaactgtatccaagtgactcaaagtggccaaattatagcattttactgttaccaagcataaagtatgaaaaacgtaaaatttcatatataacatacataatacatctagaattcaaaagtatcaccataattgtaaaagtaataatttaaagcctatttctaacggtaagccttaattatctactaagagcacataatcataattaataattaaatccttaattatctactaattcccataatataactatgctgtcattacactaacattctctttccctcggtgtcaggtggtaggtacagaccgtatcaaaaagaaaagtgacaaaactccaaacttggtatgttgaaactatgtcaggtgacatgtcgcttgaggctacaatttcaaaaaaaactcttccacaacatgggaaaggttgggcttgtttctaacttcattctccaacatttatgaccacatttacacctatttaagggcttgcaacaaccatggtattttggaagtttgaatattaaaattgtggtttacgtacactataaatagagacctatggatttattttttgagacatcgatttctattagaagaggacattgctagaaactctattatgcttgataaatctaaagatctatttcgatcctttttttttttttgcttgtggtaggagaaaataagatccgtcctcactagatctctccgattcgctagagtttgcacattaggatccgtagctactagattagttttttcaatgggattgcccctccttatggttacaacaattttcgtgtgttctaaagagattcaaaacaacgaccgtgtttttgatctctcaatgaaagcaccaaaatattgatttcacttttagcaaacgacattgagtctttaaagcgattaaaataatagaatttgaataatgattaagcaaattaagaatacaaattttttctttcaaaaaaaaaaaaaaaaaaagaatacaaattcgttaaagaggttcggccccgtgatggtggtaatagcctactcccttttacttgtattactcatgagaaaagaagcaagacgttattgatctctctcgaaaacttacaaagattttagcagcataagtgctcttctaaagaatatgattttagatccctgaatagtaaaatgactccactatttatatgaaataattacattcattaggttttataaaagaaataaataataaaaaggaaaactaattactttcccaaattacatcatttatgtgtggaaatcccatgaaaatagggatttaattgactaataaaggaggaaagtacttaaggctttctttcgcatttactctgggtggcatacgcgaagtggccgtaaaatcgacgctagtcagatggtatcgtttgctctgtgtgacacctttaccttattattcaaatagattgtatatgatgagtaattcaatctgggtggcatactaagtgatgatttgagaataaatttgtattggttttgtttaaaataggtggatatgtggttaatggtttgttgtggtaatgtagtgaagtagggaagttgatgagtagttgttgatttagtatatgaaattagtttggcttagaagagagagttgtatgtaaagtagtaagctcttattgatagtttggaaatttgattttttggtgttggttacaatttggaacccttgatgggataattatagttgctcatccccagggctggccttgaggtgagacgaaggcggcggccgccttaggccccccaccgctcagggccctcatttcgaaaaaaaattaaattatagttagtaataaaacaaataataatacttttaatgctaaatatgtgttgcagcctagtggtaatttgattagtttaacaactaagaggttgagaattcaaatcccaacaatctcactttttcactgggccccaatttttacttttgcctaaggcccaaattaacataggcctgaccctgctcaccccttacactttatggttagaattatttcttctagttctttcttttactagaaggaattatatccaaacaaatctaaatatttctagagttcaacattactagtatactctagacttaatctaatctagaaatctcttaaaatcttagataaatttttttctataagtgtatagaaatttctagactatattgtgtagaaatgtgtagcaaattctaatactcctctttggttgacatttcggtaactccgatcatatctcgtagtagcttgaactttcctcttggtagcacctttgtgaaaatatctgccaactgttcttcagtcttgcagtgcttaggttatatttctttgttagcttctgcttctttgataaagtgatacttgatgcttatattgttgggaattattttaccaggatcttagaacttctcacaagtatgtttattaac

SEQ ID NO: 13887 - DNA, 7501 bp, Cannabis sativa
atctttcaaattaaataaaaaatctgacatgaaatgaaagtgacatgagagtaatcaatcaattcttgttaactttttatatgtacaaattgaaccaagaccaagttagtatactgccaaaataaacaaaaaaaataaaaacagtaaaaaagttaactttgccttatcacagtatatttgaaagaaaaatggaaaagttagtaaaggatgtaaatttccctaagtttttttagcaacataaacccgataattattttttaacggcataagtacttactgtttgtaaaattataattttccactctattttgaatttacgaaaagaatagttagaagtaatctcaaccttatatatttcttgtcttagacaataaagaatttgtattagtaaaattagaaaaaaattacaattttacatatattaaatatttatacagtttaaaattataattttatttatacagcttacaaactcaaaactttaaatctttatgtcgcgctattttaaatggttaaactaaaatttgaatacatttattaatcagccaaagtcaactgcatattcacattgtataaaatataggaatcaatttccttaaaatgaacacaccaccatatttcatccttctcaactgtcttacagtactactgttctcgtcagcctgagcaattgaactgatacagaaaacttccaaatcttcttacatttttgtatgaataacttcatttagccaagaaatttcaccattgttgaaaacaaactcataaaatttgatcaaaaaaatgcattattgtttagaaacaaaataaaataaaacactactttagcatattattgttgatgtagtactagacactagtgcataccgcataatattgtgtccccttgatcaaggtaaaaaatggcaaggggaccaaaacagggaaactagtttatcagaaaaagaagaaaaaaggtcaaatactacaatgtattggatctcacttcttagtagttgcatttaaaatataggataagcacttttttttacaacttaagctttcataggaagcgctttttggacgtggttgatccctttatgaccagatgccaccttcccattccctctcattaccctgcatttcataacaaacaccacaatcattactacttgtttaaaaccaatcgaagcatatggtcctaaaatcatgtcattgcatagaactgtcataccattgtgttgttagcaatccttctactccaacaggatctcgaatgtgaatcccattcgaatttatttcaacctgttaagtgatataatggaagctgtaatgaaaagaagagtgaaaattaccattcaagtgcaactaggattagtaaggctccataccttagcatcaatttcagagcttcctccattacaggacactgtgcttccattatggcataccccagggctgtggatttatataaatgacaaatatcaagaacttgaaacactcaatttatcaagaaaattactactcgagatcttagttgaggaacatcattgtaaaggtatgagaaaagaactgccatatcaataataaatacctatcaaataccatagtattggagaatcagtagttttgaaatgtcaaacaacaattgatgatcaggttatttttcagaagtttcaacactataactggcactaaggcaaaccaaactctaaaagtgattaggtactgaaatttgatgattggtatgtggttcatgagaaaagttctgttattcacatgcattctgtgtcattgcactacattttcttatcccaattaaaatgtaagtagttattgacttattgtgtagcacaaacaatgctggtcattgagttgaagttgtaaagtgaaacattgaagtatataaatggtagtctctggcattcatctaaaatgtttgcttgaactgttagccatctacaagcaagaaagctaaggtacctgtttactttattgaggaaaagttcagcagcttcttcgtcttctgcgacaatagaatcagaatgagagctgcaagagggccagtaaacaatgttagtaacttcccaatattcaacaggctaagtggaaagtggtcaatggcatgtataggaaatgtaacttacctcccattttgacgaatatggtcaatggcagcataaatatcctcaacaatttcgactgtgcaagccaccttatcgtactcaagatggaaagggctagcctcagcaatactaaacaaggtgcttgctttaggaccaccatacattgaaacgcctgcgcccatgacttaaatatgctcagcaattttgtatggtgtttaattaagagcaataagacctataatcatgggctagtgaacgaactttcaaagaaaccattgtttgaagaattaaacataacggatacctttaacttggagttctgcaacgagttcacttaattttccactacttgacacatccttgtgtacaagaagctttttctaaggaaaaacatggtataaatagaaaaagctaggtgaggagttcatagtggaaatataagagaaatcttattaaagcttttatacaagccaaagaaactaaaaaccgaaaactataaaatcaaaagggcattaatttctactaaccactatattagatgtatcagcatatttgatctttgcatcaagaacaatgctcctcgccatatccaaattagccgacttatcaatataaacatggcaaactccacctgcaataatagcataatcaacttcagtagtagctctactttgttagttacagttatcttcgatctggcagtttttcttaccagtatgaccaagaacagggatatttgttgattccttgatttgagaaacaaggtttttattgcccctagggatcactagatctatcacatcttcgagctgtggcagaataaatcatcaaaagtacatccctaaaaccataacaaaacattttcaactgattatgcataccttgagaagatcaggaatttcctctcttgaggtcacaagtccaataaggtcgtcaccaactgtacttgggattgctgaagtgattacctataaaataaaaatgcgaagacactcaatagcttctttcccaatgagatatgaaataagaaacaaaaaaagaacttcctcgaaggaatcaaaccttgtgaaagattgcattcgatctcttggcgtctgtttcacctttaagcagtaaaccattgccagtgcgaattgctaatgaagcaatctgtttattcaaagcgaaatggtaaatgataacaaaacttcttcatgttatttcatttgaaaatccatcattctttactaatttccatgcagccataagtttctcagtttgacaactctcagaaaaaaaaaaaaaaaacagaacaagagtttctcgttgacaacaagaacaatcaaactccacatgtggctccaagaatgatcatgtatgagaaagaaaaaataaataaagaataaccaaccacaagacacactaacataaaatagaagagaataagtaaattatttcagtatcataaaccaaccaccagaaattacactggtaaaatgtataatgaatattagttgatagttataactttcacctgaactaaggcatcaggtcgagactcataaacaaccaatagaacacccaaaggacaggagactttctctaagataactccatctgccagctgtgtgcataagcagtcatcagaagagtacaaaataagtaatgatagaataaaaatactaactgcatcagaatttcagacctctgatctctccgcaacttgaccaataggctcttccatgtcagcgagtttacgcacagatcttgcaagactagatatctgtgaaaaggagtagcctaaatcaacatgaatttcataataaagagaacattgaaacaagcgcaaaggagaatgaatggcatatgatttagtggaagtgcaataagtaaaacataaacggtagaagtagcaatatcagcttggctttataaacagcttgcctttccggccttcaaggccaaacgagaaagtacggtcttgtcctttccagcctcaattgcagcagcaatatcagcttgattctcagctttaatcaaattttcttttgcttccagtgaatcagctatgtcaagcaaaatcttcctcctctcttgagatcccaaggcctgcaacataaaacattcaaattacaaaactgaacattgaacaaaacctccagaaagaagagttctatatgtgttaacagaagcatgacatggcttcacatgttcaaacaaaaacatagtgttgcttacttgaagccgcgttgaacattcccttgctgcaactgccatttctcgtgcacaaacttctttaacaacaggccataaatgtgcatcttgatgaaatacagtaccaatacgctttccttggagaactttgatgatattgtctgcggcaaagccactgcaatgaagatggaaccagtttgaggtaaccaataaacaatgtacagttatgctaaacaactctgtaacaatgacactaatctatgaggattgttcatatatacgatcatacctagtaataacaacaggtatgccagcatcagctgcactaacagcagcattgactttagcggtcataccacctctgcccaaccttgacttgtctccaaatgttatttcgtcttgatgtttctctttgacataagtatgaattaacttcgacttggggtcatttggaggaccattgtacagtccctcaacatcacttaacagcacaagaaggtcagcatttagttcctgagctaacaggccagccaagctgtcattatcccaaaatataccagaagaatcctgcaaacattttcaataagataatgcttgttaacagaaaaattttagacagtgaaaaaataaacagacaagcaactaaaacaattcaaatgaaaaataacgtgtgctaaacataagatgtccataccattaagggttctcttctagtgctgacagcatcattttcattgaaaataggtataaccctcagagataccaaggaattcaccgtatcagtaagttgcttcttgaaggctcgatctctgaaaacaccatctgtgacaagaagttgagacgaggtgacatcaagctgcatgacaaataactttatattagaaattaaaaataaataaataagtgtacacataatgattttataattttggcccaacctggctgaacatggtatcatacagagccatgagactaccctgcccaacagctgcacaagcttttccatcatcaaactcgccttgtaaatattggagatcagcaaaactgaaaaaacaagcatggttaaatgaaacatttaatctctcatctatatcaaataatgctaagctataaccactactgaaaataaaagaattattaaggattgtgaatttatcataaaccatgttttgtttattagataatacttaaaaggacttgtactcgacctcttaaccacctaaccccttgagttagtgtcaggaggctataaaccatcactattaagtgctatttgtactgaggctactccttttactgttgttatgcttggcatatttgaacaatgctttttttaaccaaaagcatgaaacattgcttgtacctagaaccaagagcaacccatgtgcactcagagaagctattgtatttatatatatatttaatataattataataatataacttttgtaataaacaaaagataatattttacctggtattggccaatctcctgtatttaagcctttggcgtccaagaccaacagctcctgaagtcactaaaataacgtcgtagtcttgagaattcaactctttaagctacagtaatttcatcgaagcataggacatggtcagttataagcaaattttcatgattaaaaatgaaataaaacaaaatccagttgctatagaaagaatcaaatgagagccacagatttacaatcttttattattattacagatatgtctctcattggaagaaagagaaaaacaaaaaaaaacagagtacctgctcacacagagccccaagtcttcccaatgctaatcttccatctcctcgagtaaccacagctgttcccacctgaaacaaaaagcaatcatcaacacatttgatccacaccatacgtttccttttcaaaataaattaaaaaatatataaacaattaaaagaatgaaaacctttaattaaagattatattaaatgaaagaaaaaggttccgaattccaagtattaacctggattaactacttcgtatgtttaaagcctaaaaagactgcagttttctcaaaagaagtataaatatatacgataaatacgagtattttttttcttttcatattgatcttcaaatgtttcaaaccgagcttcaatatttatgatatttcccaaaacattaaaataaagataagcaccatattgatctataacaagattactgtttgtacaaagctagtttcgatcaaatcggagataaaaaaacaatacattttaaatttaaaaacgtaaagattagaaaagagcgcattgcacacacaaatattatgtcacttttgagtaccttaacaaccagacgcttaacattcttgacaaaagctctagtaggatccatggaatccattaatggcgaactgagcaacgtcacagaaatcgtatcagagagaggagagagagaaagagaaagagagagagtgagagtcactgccgctaattagaaaagatggtacagaaatgaaatgacatatatagtcagaggaaatgaacatggattaaggaagcaacggttgagattaatcatacgtccaaaaaccgaggacataatgacacgttgcacttgaagtgacgtggggactcggttaacaaatttttatgactcaaattatatgaactaacgaaaaatttcaacagttaaacaagtgatcccattgggccacttgtttcataggttctgagctcacagtattatcagtgggacccgctccactggattatgtgacaagactgaaagtaacgtgcaacgtggcaattctcatacgatattttatctgttttcaacgattttattattcccgtgataatgataattcttttgcttttaaaaaaatttatattaaaaaaaatactaagacatgtctggtaaatgagagggagagtacgatgggagtaggagtaggagtaggagggatggtgaattttttgatattcggagtaaagttaaaacttaaaatgatgaagagtaaattagttgttaaaattttagtatatatattgtttagtttttaaaggttaattttagtatttttttttccaacaatgaacttaaatagaatataattagagtttaatacattagagcagaagagaaaaattatctatctaaactagtttttcatttactttacgtgcactaattgctaatttttttaattttagtattggataaata

SEQ ID NO: 13888 - DNA, 3169 bp, Cannabis sativa
aaattggcttgtaatgccaccagatacagtacaggcaatcagctttgctgggcttgttggtgatggagcacctctacttgcttcatctgatggcaaatccggtcactccagatctatttttgacaagtctgtcaaatcagtagatactcgttcgaataagagtggattttctcactgggcaataagtggaaatccatttctgactaaactagttcatacttccaaagaaggtcactccaatcaatttaatggaacagtctttactgaacttggtggacatctaaatgataatctttttgatgagaaggtatctccacgaaagagcgactcaagccaattgaatggtactaattctgttttagaagaagaaaatgaagatcttcttgcggactttattgatgaggatagtcaactcccaagtagaatttcaaagcctaaagttcgaagaagtcattcaagtttgaaggatgatgagtgtgtagcccaaacaggatcttctatttgtgttcttcggtgagataatattttatatattttggagaaaattgctctaattatgtgtcaaacagttagtttatgttttcctttgggtcatatttatattgatcaagtacatttacttgtcagatccatggataagtatgcaaggcttatgcagaagttaaaaataatcaatgttgagttctttaaggtaagttcttacttcaaagaaaaccttataatttacatgtactttgagtaatgtttactagtcttttttcaattttctctgaaaaatttcctgattcagtatattgttgcaggggatatgccagctgttcgagttattttttcattttgtatttgaaacgtttggtcaacaaagcaatatttcagctggaaaaggttcggttgacttcattagcagtaagtgattttgtctcttctttcgccatttaaaaacaaacataatggtaattttgtagccttgccttatctttagaaaactttcttagacatcaacttatctgcagtatggttattttcaatttgatatgcaattcacgctgaaagatcttatcttgtgttatccaggtcgactgaagatggcattatctagaataacacaggattgtgaccagtggataaaaccctcatcctctacacaaacatctttgactccatcatatacacatgcggatgtcacaccaagtccccccaattcaaatttcggtcatgcaccaggaatatcttttggtctcaaggtacacaatcttatttatggaatcttgtaatgcaatacattaaaagtaaacgttgtatttatattagaattagagataatgtatttggaattcggtatatttttcatgccccaactcattgcattatctatatatgaattcgtgctgcttattctactgtgccttagaaagggattactaattttaagccatcactttggtccccattttccggagaacaagattttccataagagcaatgatataagacatatctgtcaataaaataagttgttgcccaagttatttactagatttcatgctttcaaaaacacaatgaaaaacataatttggtaatataaaagtcttcaagtcagaataaattttcattgtgctgctgtcttcaggttaatacaagcacaagattatgtgcagtttaaatgggcctataaataacatcattgttacgatgcaggaaagatgtgcaggtgctgacactatatctcttgttgctcgaatgttgcatagatctaaaactcatctccaatctatgtttcttcaaagtaatactgctgttgttgaagatttctacacaaatttggtatgttatttcttcattttttcaatcattcttcaaagttaatttaaaaatgattatatgtgtatttataagaaaagagtaacgacaccatgaatgattaataaagattcattgagagtaggagaagcaaatcaccataagtagattgctacattttgttccaaattgagaaatctgcatttgtagcagaaactttatctgagcctatactgtttaggatttacaatgtttcaggcaagccgcccctgctgtgcagcccataagacaaaaagaacttacaggtgttatgaaatgttttaccaatatctgtaacttccgagtataatccttctagattcttatagaaggatggatgcagtcatactctcttcgaatcaccatactgatacttttctgatctatctttagcaattgcaacaagaaagaagggagttctgatactttaataatacctcgattaagcattcaaattataatcatggtttaatgctttgatttatttagaaaagcacactaggaaagaaaacgctccctcagttttttcttttgcttgttatttattattttattaaaacttgttagcagttgcactaaactacttcattgtccggttatattgtagctatggtttctatcccccaatctagttagctttcttgttttgtttaaatcctttcattggttttcattgcttgactgaaatacgtgggaaaatcattcgtaaattattctattaaaaataaaatatattgtgctgtttgttatgttaggtggatgctgtacctgatcttatagagcacatccacaagacaactgcaagactattacttcatattaatgggtaaaacttgaaagcttaattttcctttttttgcctctcttgtatttaattagctcaagtatggctacttgctttaattgtcatcgtgtttttctttgatgcatttagcctattaatagcaaatcccttttattaatgttgttgcagatatgttgatcggattactaatgcaaagtgggaagtaatagatcttgggcttgagcataatgggtaagttttctttaaagcaaattttgagttaactatctcgctgaatgtacgttattatccataaacctagattcagcttgatcccatccctgtaaaatttggtcagatgtattttgttaaataatgcatattaattgattactctataatactttgtatctcgagtttagcatatccaacgatgaatcttagtcatttaagctaatttgctgcagttgtgagatgggtcataatcttttcaggggtgctctgttctctctctttgtttttttgctttattttgtgtgaattaag

SEQ ID NO: 13889 - DNA, 1001 bp, Cannabis sativa
atgtaggttggtaagggccaaaggggttgggttggtgatgttgtgtcattgctgccatctgaactgaatgaggagcagcaatgttgttcgacatggcaaatggatcttgtgtctcgaatggattcggtgctggtgctccatatacgggttgctgagaagctcggtatgctccttcttcatacaaactgttcagagtgagtgagtccaatccaccaccctggaatttaagggaaagatataagttagtcttatctttgatcttcggaaaaggcctccatttagtaaagtctgaagatggcttttagaaaaatgatagaaagaataaatgagcattgtaaggacctaccaattgtctatcggtaggtgctgaaatgtcggtgcctggagtggttactaaagcgagttcccatccagtgggatcaaaatcttttgatacaacagtgccagaattgaatgtgggagcggaatctgcagacatgaaatgtctaactttaagtcaccacaatcaacgatgtggtaaaactggaagggaaacgtgaaacttactggcttcagatgttacaatggctagggccaatgcatttctgtcctcaattacagatacatcaggagcatcaaaccctaaaccctgagctcacaaaagagaaacttaaatgaggggaaggacataaaaacaagaataaagacagaataaagctgaagttgagtaatattaatttctgcactgagaacctaccagtaaatctccagtgtctgtgttgctttgaggaggaggtggtggaggtggagttggtgctgctgcagtctcgacatcagacacaatatctgaaggtggtggtgcaggttcatcgcttggtaattggttttcttcggaagaaccttcgtctggtttgtatgttaactgaagctgctcagagtaaacatataccaattacttaatttattctttctataagaggtaatagcttggtggagtataagaaaaactgaaaattaaacaa

SEQ ID NO: 13890 - DNA, 4658 bp, Cannabis sativa
aaatgaaaggggtcaaatacataatcgtttagaaaaatatgcattttaatataaattttaaagtttataaccaaagctttttgtaaccacatgatcccctttttgtaaccaaagcttatagatttttagtgttataaatactgcatactgaaatctttatttattaaagtaggagcagcgtttggcttcctcaaatgtaaaaacttaacttattttgcttgattataacttgtaagagtctcatttatgtcttttattacattttatcgttttgaaattaaattttatgctacaacacctgcaggctgttcagattggaaagcagcttgccaaaaagcacttcatccatcacgtctttgggtaagaaaatttctcctgccctggaagtcattctttagagactaaacattcagtagtcattcatgtttctctgttacatatttatgcagagaaaatgattttgaagatggaaaccatttctaccgcttccttgaacatgaaccgtttattcccaaatgcttcaacttccggggatcgacaaatgatgatcagcccaagcctgcagcccaagttggtgaaaagctcaccaaaattatgtctgcaatacttgaggcctatgcttctgatgacagacgcagtgttgattatattggcataagcaacagtgaggaattccggaggtgagatttttaattatgtttcctttttcctttgtaataaaataaatatcatattgacaattctttaaacttgtcttccttttttctttctctcctgatatcagatatgtaaacttaacccaagagctgcaccggataaaccttgtagacctcacaaccgaacagaggctagccttcttccttaacttgtacaatgccatggtgatccatgcagtcataaggtcaggaagcccagaaggaataatggataggaaattcttctccgagttccaatacatagtcggtggacatccctattcacttagtaccataaaaaatggaattataagaaacaaccgcaggcctccttattccttggttaagccttttggttccggagacaatcgtttagaggtaaaaacaacatttaccagcatcattatacattatgattttctattttaaaatgtttgtagattcgggatatatgtactcatgccatgtttactatttttaaaattttagcttgttcttcctaaagtaaatcctttgattcactttggactatgtgatgggacgaagtcaagccccacagttaagttcttctcacctcaaggaatcgaaactgaattaagaaccgccgcaagagaattctttcagggtattggaatggaggttgatttggataagagaacagttcatctcacccgaatcatcaagtggtaagcaaatttttttcattaatttcatcattatatcaacacagaaatgaataataaagttatgttaatcttggcataatgtcttgtgtttcaggttcagctctgattttggacaagagaaagaaatcttgaagtggcttatgagttacttgaatgcaactaaagctggtcttttgtcgcatcttctaagtgatggaggccctgttagtatttcatacaaggattatgattggtctgtgaactcttaaaaaaaagatgcccaccacctagtttgatgtcgttgctgtggcatttagacgggaaaatgttgtatataattactgaaattttgagaacttatattattaagtcatgaaaagggtttgatttttaagtcaacaagtttgttaatttgttgaattggaatttatatatataggtcaagtgtttgaggatggaagcttataacatccaaaaagaaaatgtaaatggggtgggatgtgtttccctagtaattgactaattgtgtcctaaaatgaggattatgtatgttcatatatataaaatttgataatagcattccctcttggatgcataagtgtaatgtttgtttgatatctatactttattttctttctgaatatatctaaagttcattaagctagataggacattgtgtcttatgaatcttcctattgtagtaaacatacccaaaagtgattaggtcattaacaagcttgtcaaaccagtctcaacttgccctttaaaatggcattgtttcaccactggattaaatgtttatgagaaaccaaaaccaagtagttgataaaaaccccacttacatccaattggatgtcttccatcatgattcatgtggagcaactaaagacaaagtagcattttagtttaaagcacctaatccttgcagttttcaattggatgagcattggttgaagcaatgttgttttggggtggactattagttgatgattcacccaataaggttcatgctgttagatgattcattttgttgctactaaagaaattaagatgttgcatatgttacataacaatgagtcaaaccaaattataagactactatagcaattcaattttcaacaaaattacattacaaataattaatttcctttcaaaaaaatagtcatgttttttactcttatatttttttattattattttaattctgataaagtaacaacccaactagtttaacggtcaagattgaagaaaccgttattctaatcttttcttctagtctaattatttcagcccatattattgtgtgggttcaaaaccatttcaatgaagtgataagcaacaacaagactcaagactattctttgctgtatttccttagctgcaagactgatttcctgaaattcctcctggtgagctttcttctatctagattcctatatgagattctatcaaccctaaattctcttaaatttcctaatctgtacaaatctaacttgttttgtttcgtctccaaatgtcaattctagtttagttctttcaatttgttagtggcttgaagtttttgaggattccttttccagtttcctattcatttattcatgtgtgtagttattttagttattctttgtgtcacaaaatttggggatttttcacataattagtaaaaggaatgatttttttttgcttctttctcagtcatctacaaaccctttttctttttatatggttaaattagatataacagtagatttgtagtattgtgtgccaaacatggtttttttcaaatgcatatgtttggtattattatcttattaaaaaagggtattttttttcctattacagatcttactttgacattggtttggtgggtatgtcaaccagacgaaggagtattcaatatagccttctccataatgatgatgattataatgataatggtaatggtattggaggagaacatgagagtgggtttgattattactctccaaaaggctgtgataaaatcccttggaaatccatagctctggctcttttcttgctctttcttggctcaatccttctttttctttctttcttcatttttactggtcatatgggtggagagaggtctcaagcctatggcctcttaacacttggcattctaaccttcctcccaggtatcaaaccaaacactttactaagtcacttgtctaatcattctaactaagtctttacttttgtagatttgcacattatgtctgtcttgtcaaaaagatattagaaagtaattaaaagaaagaattactgtagtttgaagtggtattcttagctcaacaagtttcactgtagtggaatgttataaatgaatagcatattccttaattattatatggcttgcaatctttattaattaatcaatcttcaatacatgagctcagttatacaacaatggagattaaaactcctttgcaaaactgagacaaagttttgtccaagaactgaaaatgaattaaacaaatcccaattatctgattttgctgctgatgtggcaaatgtctaactaactaaactaacttccacaatagtatttatgtataaaagttggtctgagtgaaattttggtgaacagggttttacgagacaaggattgcatattatgcatacagaggtgccaatggatatcattttgcttccatccctgattattaggcctttacttctttctaatcacacttcctctcctttctcttatagtaatatgtaatttgtaaatgtatctttcccacttttagttttcattagtctttctaatgttttttctttttcaccctttgttttgtatttattttttatttttcccaaagctacaaaatatgatctcatttagaaaaaaaagccgcactaaatctgcatagtacaaaagagtctaaaacttgggtaactagggtgaagtgaagtttttattggtatatttaaataaatttttaaataaaaaaataataatttaataatttggactaattaagaactatcatgcgacttaagtaattatgccgtaaaatactctggaatgagcggtgatctccctcacttccgccccatcccagttaagaacccctatacttacccgtacaagataaggcgttaaattaccatctctactccttcccatggtaccttccacccccaaccgtggagtggtcagaaaacaaagccaaacttcatgtagcaccaccagagagatcacatattttagaatgcttgatttggtattattgtaagttttactttgagcaaattacgcatacggacgaaattt

SEQ ID NO: 13891 - DNA, 4478 bp, Cannabis sativa
tataatttatattttgagagtaattttccctataaaagaataaaatgcaacgttttatatgagtagagtacttgaatcatgtatgattttaaattacaatataataaatagtaacaaccgagtatttacagccttaattatggtaattggataaatataattatataagaaaaaaaaaaacaaaaaacaaaaaaacaagtatttaccatcctaagaaataaaaccttgtttcttattttgctaaccaaactcacaggacaacagatgtcagatacaatatcaattacctcatctttaattaaaaaagaacaaaaacaaacaaccttgaaattcttgtttcatacaaagccatcataattcataaattcccaagtccggccaacaaaaaggagaggataaaaacagaagcaaagcaaaacaaaacaaacaagatcagaaactgccacaagtgaaggctcatttggttagccaacctgggcagtaaagaccttacttaaaactcaagagattttaacttacaaacaacaaaacttccaggcacctaattactgctgcttctacatcaaaattttcccataaaacactgtacaattagaaggtattcacggtttggcagaacctgactgaaaaataagcagggatccccattcacttcaccaaaatccctggtccttctgttagtaaagaaaacatggctctgttcaggtgaatagtggaattacatgacatcctctgaagatgaaagcactatctttcgagtggcttcggtcaagtattcctcttggtaatcaactgtagaatcacctaataaaggaatgtaatccatcaagagtgctacgatatatgacaactttttttaaggaaaatgcaataaagggggggctcatattgaattaagattaattactgtgagctgagtcagtcgaagatcgatttggttctgtacttctttttgtgcctgtaataaattttaacttgttagataaaatatttgtttgagatgataacgaatatgaaacacacaattcggaacaaattatcacttcaagaaatcctggccaaagaaaataaatatcattatatttccctttcatgcatttactttttaagtgaaaagcaagctataaaattgtggccatcctcttctgcagagcaaagaggatgatgtttaaaatttgtataagtaggaaattttctatgaagggagctacatttcgcggtcatttagggggttataatgcacaagagccaagcaatagaaagtaaaagccatactgggatgaggataaaaatctcgtaccaggagaatgatgtaaccctttgacggcctcaaaattcttgtacgtatatccaacaaaactaagatcttttggagtcatcaacatctgcataattgagttacagaataaatggatgaagcatgattatataagtctgcgaaaaacaatttcataagaaataaataaataaaaaagcgtaatgttttgaacaattggatttgtgttgtttcttcaataatgccatgagagcaaggtgtttattattattattgtttttgttgttatttggtgtttatgtgcagcgctggtatatttcactggctaacaatagacatccaaagcataaaactataagaagtggtattagttataccaattaggtctatagtatcctttcatgaagataaatacataccttcctcatggctccggatccacttcttgctggttttggtggatccacctgtatcataatcagaaattgcaagatgaatattagtataaagcaaattaactatggacctttctgtgtaaggaaaaagaaaaggaggatccatttgaaatcgaggacaaacaaaaccaatatgattaaataatatgtacacaacaacaccttacctcgtcaaatttcataaaattttgagtatcaagttccccattgacctctggtttaaatgcagcctccatctcataaagttgatcccatacgatatctttgaaccaaggatgagcctggtcaaaattaagattaattagtatatacaggaaacaatagaaaactaattgcaagttgcagttaattggaaagagcctactttaatttggtcagttcctcctgtaccaagtctatgctcaacatcacagagcaacctactgatcagatcctttgcttcaggtgacaaccttgcctcctccggaaatttcaagtgatttttccaatgcacgatctgaaatatagtagacagctaagttaaatgataacaaacaaatgacaatgttaataaatttgaattgaaaatcgttacagaaatcatgcagaattttaatctcaatagttactctgccagaagcaagggatctcaagaaaatgacaaaataattataagaataagagaagacagaaaagaagatgaaaaaaagttacgggaataataccctcatttagccatacaactcacaccttcagtaatgagtaacatgtaatgcaatgtgtcaaactaatgtcataagtaatagaatttccataagtttaggcgcacatatgatattaaattgagcttcgatgaggtgacatagtacttcaatagtttacgtatgtgacatgtcaaatagtgaggaagtaaacctttctacatgctgtaattggatcatcagagtagaagggtggatatccaacaagcatctcatacattattgcaccaagagaccacctgaaaggaaggaagaaattagaatacagggaaaagcatatttttcttgtatctattgaaaacatcaaatgcaatgccagtggtcttgatggttcgcatcaaactcagagtccccttcaaagagcttttattgggataagagagtttgtcctgcaatttattagctcagctcaacccaataatacagtattgcttattaaaattaattttccaattaaaaaaaattatgagttgtgatgaaagaatgtaaaagtagaacaacggaactaatgatggacttctacagaatatataacagaactaatgatggacttcacagaaaatatctaatggttcacacaaactgaccaatcacactcaatgccgtagcctttcttcaacaacacttctggagcaatgtaatccggagtgcctactgttgaaaatgcctatcatccaaacagtaaaaaatacatgaacatatgactaaaacaagtctaaaagaactacacagattgaacataatagctctacaaaacttctgcatcatcgattattatggaaacccatttactatgcattattgtttcttgagaatggtacagtacttctccttatcaccatgtttcctttaagccatttcagaatcaacctactttggactattgggcctacctacaactgcaacatggctaagtgtttatgacttattcattcacttaagattcaacagtattagttgaaacaatataatcaaactacacccccacagcctagtgaatcacggttgatgtataattttgtcacatttttattacatgtattccaaagggtcaacgttttcagttaaaaaggatttaggttgctggtgtacatatttacctatttcattattgtgatattatgctctggaaattttgcaataattgaagaaatagttcctaacaggacaacatgattggagccactttagtaagactaatttcaaggcaacccttaacctaccaattttctcctattcatctgccaatgtttaagttgttccaggggacttttccagcgtctcccacttttcatatctgtagagtatccttccaggtccgttgtatcattcaagttatcatcatcaaagacttcattttcttgaatgggcgataaatttgagcagtcaagaggcttgcaaagaccaaaatcagagagcttcatgtgaccatttttgtctaaaagaaggttgtcaggttttatatctctgagaataaaaggaagagaagggttgcataagcaaaaaataattgtcaataactgatcactctcttcattgcttgaaatggcaaagagtagaggaaccaacctgtggatgtagttatgtttatgaatggattcaatggcaagaacactttgagcaatgtaaaatctagctacagtctccgtcaaagtttcttctcttattagtaaagtcattatgtcacccccaggcagatattccattatgagatataagtattcagcatcttgaaaagaatagtatagtttgacaatacagtggcttccaacctcagcaagcaaattcctttcagctctaacatgctcaacctggtatcaaaaaaaaaaaaaaaagataccccgcacaatatgttaaatatattttaagaaagtgcgaatcgaagtaatatcagctttaaggtgtatccctcctattccagtcatggaacatatgaactaaatcaaaaatgaacttttgttcaaaaatgaaatcttattggaactgtccatatccagttcatccttc

SEQ ID NO: 13892 - DNA, 4440 bp, Cannabis sativa
tagaactgaagaaacatcaaattacagaatgagttcgagtggagagccatcctcttcagttggggtaagattttgaatatcgtttttttatcatgataatgatttgagctgtttaatgcctattataacgttttcatcaaaacaaataagtcctactattattattattatgatcacaacactaatactttcttgtaaactacaggcaatcagaagcccaaatcctgaaaagaaagacttcactgagttcactcacttcatttcacttccattgggaatacatcatcctgaattcgttaacaagctgaataaattccgggaatcaattttggaatggaaaaacttgacaggcatgagaatcgaccgatttctatttactagaccaagatctcttcactttactgttctcatgttaaaactatcgaacgacgacgacgttgctaaagcttgagaaagttttgcaggtaaagttgagtgagaatttgatataagctgttgcctggtagtctctcacaaattattaacttctttttttcaggatgtctcttctaaattgatggaaaccttgaacaacaggcctgtctccattagacttcggggcctggtaagattaccaaaccttctaatttctaagttgtgtgctagtgacttcaacatttgataacaagaaattatccttcatatttttctacttttacagaaatgtatgggggatactcctttgaatagagcgcaagttgtgtatgcaccacctgtggtagatagtggcagtgaggaaagacttcttagtgcttgccgtatcctaaattctagagaaattcattacatttcattttatatttttgaagtaatagttcgataccttggttgttttcttagctttctgctttttagatgtcattatcgacgcatttgctgaagctggacttgttgacaaagatgctaaggacagattgaatttgaaggtatgatgttcgatcgaaatatgatataatgttaactctgtcaaccacttccatgaatgggtttattgaacatgttaacagcataatctttatttggaactagtatctattggtactcttcataaccaaagctatgaatttgggtggtgtataattccaatctgtgttacagtcaaattgttttgccacaattcagtgtgtgtggttcttgaagcttaattctaatatggaataccaaaaaacagatatttgttacacagccttaattatatcagatatgtacttgttgaattaactgtttattgtcttttaaattacagctgcatgttactttgatgaatacaacttttagaagatggtaccattaccttttgactctctaatatttctcttttttcttttcttaattatgtttacaattatagtgaatgcacagttttgtttgttttttttttctttttttgttaatgtaagaatttattattcttatgggctgaatggccaaagcagggaaaaccccgattattttgatgcacagtccatttttgagcagtttggatcagaggaatggggggagtatgctataagggaagctcacctgtctcagaaaggtcggtttgcagacgattatttttactgctgtgcttctgtgtcatttcctgaaacttgcaagtagagtaattttccaatccttcttttagaaaatgtgtttacttttctctttacttgattgtcaaagttttataaccctataaacatgtataatttgtatgtgtatgagtgtgctttttgaagagactgtgagagtgagtttaaagagtgagaaacaaaggttgtagtgagagtgagtttgaatatatgtaatatttaagttctaagtgaaaagctatcacttttcttgtgggtttggtgatctgcttttttattattttgccgctgagcttgaaaattatctttctttttcctaacatagtttagttttgcttctttgcctttctttaaattgtaaatttccgaaacctgagcccaacaaagctaatacaagttctctttgtgtaaaagcttaatgtttatgtttgttggcaccaatttgctgcaatgctattaaccataccgagtatttattgacataattcaccatggctattcctattctgggacatttcgttacactatgggatattacttgcatagcagagctactagctagtactcactctataagcatttatcaatatccctaagtgggatttcgctaaaataactaatttagatatgaaatattgaattgagctggaaggaaaaaaaaaaaacaaaattgacaggaaaaacaaggtgtttattaccacagcgtatgtgctggggatcccagcaaaattacaactttcaagaattggcagaattgtttattttctttctctctacactcgttgagactatatatatataagtgaatgtagaattaagtttctaacatttgaagttggtttccaagtgggacacatgtaatgagtctgttctcagacagtggtatatatataattgataagcaacgactactagataattaaaactatgtcagactcatcactgtattgttgttgttattgaacatggtttgtttggttaggtaattgtataaaatttatgaaattctttaccaaaaagaaaaaggagtgagttttagctggatctgaaacaacatatatgaacaaatggtacttgttcttgaagctttcccttcctctgcctcacgctaaaagtggttgccctgaagctttttctctacccaagatggtgacaatactggactcaaaaccggacttatatcgtcagcaatttctctttgcggatcaatagttggatcttctaagcttgccttttcagaagggaaaactttaactctccacaccttaaaagtctggtccaaacttgcactataaaccaataatccctttactccattctctgtttctagagaaactgccaaacatctcactggtccatgatgaccttcaatgactgcaagacaagaatggaagcaattcccttctcttctccaaacccgaatagtggcatcctcagagccactaaacaccaactctcctatggcaaccagacagagaacagcaaaatgatgaccttgcataaaacctccatggttatatctccctgaggtcttctctttttcccaaaaatttatgatcccatctgaggaaccagagtacaaaagacaagtccctggtgacaagctcaaagccaaagcgttaacaggagaaagttggaacttaagggtcattgtcaaaatatgagaactttctccaaaaacccttctccagattttcactgaaccatcagatgagcaagtgaaaacacacccatcttcatggtttataactattgcgtttatatgaccttcatgagccacaaacgagtcaacacaacgcttttcattgatcttccaagctttgaccgttttgtcccaagaccctgtatataaaagcttgtcatcatgattataagctatgcaagatatgtactccttgtgctgcaatacattctttttggagaacagcattaatggactcctctgaggtaaagtcgtgatctttttaggcctaaaactctctctatcagaaacatcccaaacacgaatcttgaagtcaccatgagttgtgaagagcaattttccataggctaaaatggcacgaacatgaccagaattggcctttatatatcccatttcagtgcaatctggttgtttccatgcatgaatacgactactctcggagccagtaaaaatgaaatctttacagagtgcaatggagaaaatgttaccttcgtggcgatgaagagacgctatgcaatggtaaagaagtggctgagttggagaggttcgaactggagagagcgtccatggagtctcagatgtccgctctggactcattggcggcctctgaggcaggtgctgtgtcggaacagaagtggttgtagcagcagagggtcttgacggggcatagtgaacaccgccgcgatcaggcgagttttgatggtggtggtggtgatgatgatggtggtggttaccaaaagagagtctcctaggcaagttgatgctttttctctcatcgtccatgaaattccattggttgtttctctctccatggaactccatgggagatgaacatgaactgaagaagaatctgacattgaatttttttaaaagagtggttaattaaaaaataaaatgtctcattgttgtttgttctggtgttaaatttgtagttgggtggtttatggctattaaagatttaaaatgtatcccctattaggctatagatatatttcatttcaatgaatcaatggcacttacctaacaatgtcaagaaaagctttcacccaaagtcataaatatttatgctaagttgattaagagggaaaatcttgaccattaaactgattattatcaatgctcatt

SEQ ID NO: 13893 - DNA, 5914 bp, Cannabis sativa
tggtacaatgtttaaaaaaataggtaaaaatgatagattttaaaaaagagggtaaaaataaaagagaataatataaaaagggtatagactgtaatttccttttaaaaatctcataacttttttgcacacaacttataacaaaattacttgaattttcaaaaaaaaaacttataacaaaattatgaaaattggggctggtgctgctgttggtctctgtagcccagcccaactatccggcccatcacgaccttcccctctgctctcttaaaaactctatatccgagtcggagagagaagagagagaaaaaagagggagagagaaatggctatggctggagaagaggaaaacagcgagttctacttgaggtactacgttggtcacaagggaaaattcggccatgaattcttggagttcgagttccgacccgacggaaagctccggtacgctaacaactccaactacaaaaacgacaccattattcgcaaggaggtttacgtcaccccagccgtcctccgcgaatgccgtcgcatcatcaacgatagcgaggtcattcacccttctctactattctattctattgtattcttctcaacatttgggagtttaagttttttcattttggttattgctctttttttcctgactagggtttttatatttggttcggagaaattgggagggggttaggatttgtcaatatttatgggagaaaggattggttgggtttagggtttgttattgcgtgtgatttgggttttaatttttgggaaggtaaattgaagttaaacattgttgaggttttagggccattgttgctcatgtttttagggttttttctgttttggttgttcagacgtgttaacttgattttgaggtgggattgagtacaaattagtaagaggctttgggttagggaagcgttgttatcttcagctaatagagttgaactgctcttgtctagtgttcagttatttatccatttatcgataatggatggatgttccgagttatgggcctcccaagttgaagctaagcttgcatcctagctattttgtaatatggtatgagtcaatgaatactgtttacatgatattaagaattgaaggaaaggtttcatttttctttaaaaaatttagttttaaggttgctcatactaaagttggggacaaccagccatgtttgctaagatagtttaggcaatggatacatttagttggaaaagagaaaagatacaattttgtttgttaagctttagttaaagttaaattgcggaagttttttttttaaaaataaaaaaagagaaattttagttgtagaaaataaagggagtttactttattcatatgttgaatgttgcaatgttacctagacaaaggttatgcttttgttgtcatcataaagccttgtagagaaaggtgtgaggttaagtcttggcatctctgttcctttaagcttatataagttcagtgctagctatctaatatggggggtatgtatggccttaagtcttttcgttttcatgtttttctactcttacatgccacgatattttcttcatcctgccaaacttgatgaagataaaaagcctaatagctctctagtaagtaatcagggaatatgatactcttaaactcatgctgtgcacactattctgaattttattagttgaggttcggtaggttctttacttatcttatcctattcccactcctcccttattttctttagttatggattgaaattacatgtgaccttgtcttaattaatggtaccattttttttctttttttttttttttgatagatttcaatcacacacaaacatttatcgaattaccaacatttttttttcctttagatcttgaaagaagatgataacaactggccagaacctgaccgtgttggtcgccaagagcttgagattgttatggggaacgagcatatttcctttactacttcaaagattggatcccttgttgatgttcaaagcagtaatgatccagaagggcttcgtattttctattatcttgttcaggtcagatcatttaaacgctcctctaaaacttgaatgtaataatgttatttgattgataattttcatttgcggagcatgttctttaacttctgattttgctcaattgtgtgttagatgctgaaaagtagtttactgtttatttcatctgtgttatttttatctgaaagttattacaactctctgcaatctggtagagtagttgtcttgtatgagaattttgacttggatattcttctcttgtctctcaatgaaaatctggtagagtagttgtcttgtatgagaattttgacttggatattcttctcttgtctctcaatgaaatctcaaaacttaatggtgttttttttttatgtgattgcaggatctgaaatgttttgttttctctttaatctcacttcacttcaagatcaagcctatataaacatgggttgtaatgtctgtctgccttacaaatatcttgagaatttcattttgtgcctgtactgcaagtaggctttagttgttttgaatcgtctgcagatgtatttcaatgggttattttgtgttccattatttgattgtgatttgttgtggttcatgaaacttagttttgatatcatctctcagttgatgtggtaattgagaagcctatacggcatttatttatgcagcacccgagccttacttcgataagactcatcaaatagtgtatctgcagacatttaaatgggttctaattcttacaactttatattatttaaccaactataagaaatcaaccaatatatatggttacgttatttttaactgaaaataaaatcaaccgtgcatttccctttccattcaactgaaaaaacaaggtcaggtaataccaaacaaatatattgcaacctccagtccacgagatctcatgtcatctatatccatgaaactcatatttaaatgttttctcttttggtctgcacaacaacctaaaaagaaatttagatcccagtttcgaaactaaatctaaatttatagtgatcaacatacgtgtcctgatcttgacagaattttggtttcttgaagaccttgcgattcaacctatagtggacttgattaagaactataataggaagaatgcttcttcgttgtgctttgaagatttgacttgagtaagatttgaagattccacatagttggaggagttattaagaagttatagatttccaaccaaattcatctactattatggtttatctgcgggatacttcctatgttctcatgatgaatggtcggttacaaaaagttttcaagggagctaagggactggtaaggagaccttatttctccgttgttatttgtcttggtcatggagtattttactcgaatgttgcagtatggtgttaataatgagtttagacatcatcctcattgtaaaaatctcaagattattaacctttattttgcagatgatctcattattttctgcaaaactaacagaggttcggtgacttgtgtaaagaaggtctttgaggagtttagcaatagcacggggctaaaagctaatgtaaataagtctccggtgttctttgggggaatttcaaaggaagacaaggttgccttacttcagattttacaaattgaggagggggaatttcctcttaaataccttggtattcctatgagacctacaaaatagaaagcggaggactgtggggtcattctcaagagaattaaaaaccagctgcttacttgggaaagtagacacctctcttatgctgggaaatgtcagcttattaactttgttcttttggggctgagaaattattggatgaataacttcttacttcctcaaagtacaactaaggagattaataaactttgcatgtggtttatttggggtaacaatggtacgaggagaaatctccatcttacttcttagactaatgtttgcttacctaaagatcaaggaggcctaggatttggtgaaggctccaagtggtacaaggctatgatcgctaagtatatctgggctattaatcatcaacctgaatctttatgggttaaatggattaaccatgtgtacttaaaaggtcaaagattctgacagtaccaattaaaggttgacaaaagttggtattagaaaaaattgtgcaatatttgaactttattttctcagcaggaagtggaggaagctacctgtaaagggaagttcagcattaacttgctatacatgagcttcagcagtggagcaaaattcagattttaaaaatttgtttggaatagaattgctgtgccaaagcaccggttcatttgctggcaggttatgaataataggctgctcactcgtgatcatcttcagcaaattttacagattgacagcagcctttgctcgatctgctgcaattcaaatgagaacctggctcatttatttttttcctgcaatttttcacagcaggtattgaagcatgtggattggttttaactggccggtgatgatagagaattggagatcttgggctgaaaagttgaacaaggatgtcaaaaatatgattgctgctaccattttttcagcaaccatgaattatatttggcatagtaggaatacttgtgtgtttaatagatatacttatagtgtaaaaaaaattgtagatatgattaaaaaggattctaagtatagatttagcaattttgtttttaagaagctaaaaggagaggagaggaatttgttgatgaagattgactcattgtagctttcttgttgttgctgttctcattatctcctgtgatatagagtagtgttatcatgaggtcaaataaatccacgtaataacaaactaactcagaataagaagaatttttaaaaaaaaaacaaacaatgatcattgctgattcgtgtgatgattgttgtgtaactttcacagcacaaatacgaaattgatataattttacaagagaagatatatgtagggggaatgactaaacatatattctgatatgtaagtaaaacactcttagcttttgaaaacgaaaccctgcataatgagacaaaacaacaaaaatttatatgtatatatattaaaactttaaatattttttttagtttttttaattccatgtcacaaaagattgtatatacattagtttaaattggtgtattgttgaaactttaacatgtgtatatttattgtgttggttaaactttaatatactatttatttatttattttattatagtataaactattaataccacatcatattttagcaattttatttttacggttttgaaatcttgcagtgggctcgcaatgtgagataaaaaatttcatgtgcgatttagttcaaaaaaatagtcaaaactcacactgtctgcactgtgaaaaccttaaaatatagagttaaatttgttcttgtaaaatttaatgtttgcaaatattaaatttttaatatttttttatatctaaatagaatttttaataaaaaataaatattttttaaaaaacatttaattagttttaacattttaatttttttaaccattcaaataatttttttcaaaatctaaattaatttttaagatttactaaaaaaaaatgtttaatcttacacatttttattttgagagggtaaaatttgatagttgtcaaatttagggaataaaattattaatttacaaagacacgtcatatttaaataaaataatgagacgaaatttaatagaataattaaatttctataaatgtaaaagttcaaaaaaaaaaattaacaaactatatattttaaagggtaaaattaattcaagtgacaaaattactaagagatttttacacctcatgtcaaaattgacaccttttttacatttttatccatacacggttttttaaacttttttaacttttacatttttcaatttta

SEQ ID NO: 13894 - DNA, 1604 bp, Cannabis sativa
tcggccataggatgtgggcccacctcttacaattttactatttttctcaactatttatcattttcttttacaaatgccatatttttccaattcaaccacttaaacatcttctcccctgtcgtaagcgtctttcatccatatttccaaataatatgaggtgtattttttgtgatgatgaggaagattcggttattcacctctttctcaaatgcccgttggcccgaaaatgctagtttagcacgcaatggggaattagaagtgattgtctaaatttaaataatcctaaagagttggtgttgtggctgttaactagatctccgggccaggttattcccccggatacagagatgttcacccaagtggcggttactctctgcatttccttgtggaatgcccgtaactcttgcttccatgaaggaattgtggtttcccctgaggtcattctgtgcaaagctttatctgatgtgcaggaatggagagtctctcgttccaaattgattcctgaagctgctgacctcaccctgaattctttcttgccttacagagcctctgtgagagccttcattgatgctgttgttcgaggctccttagcctacactgccactattatcctggatttagagggtcaaattttgggtgctacgacctttaatttccaggttacttcgcccttggaagtggaagcccatggtcttctctcggctgtggaattctgtgtttcctcggggtggaatgaagtgcaattccattcggattgtaagattctggtgcaggccttcgaagaccgcagatgcccttcctggagactttcgcctcttttttctagacttttttcaatgatgtgtaatggtaatggggttaatgtatcttgggtgcctagaaaccgtaatctcccgactcacgagtttgcaaagtgggctgcgtccctaggagtttgtcaatctctttctactgaggaaattctcccgattcttgggggtttgaacactttggtgtaagttggttttgttttaaataaaggtttcccttcatcaaaaaaaaaaaaaaaaaaaaaaattcaactttcgaatatagcttaatacaattttttaaatatatatatatgtttaataaaattatatttattttttactttttaaaagaagaactaaaattttgaaaacaaacataaattatttgaaaatctgttcatatataattatttaatcatagtttattttgtacttttttttagtaatatttactttatttttttattattattttctcccattacattttctgactttactatctctattcccacttaaaatataaataaaataaatttacatactttttcatttttctgttttaaaatcaaaaaacaaaaaatagttatttaagtttatttttcaaaataaaaaaaaaataaaaagaaaactattttgaagtgtaaaaattaaaaagtcctttttatttttgtggttttaaaaatttaaaatacaattttaccgaatatattatttaataattttaaaaaaaatacatgaagcactttttttttttttttgagtatagcgtaatggtattttacaatcatttaatagcttaatagcttcaag

SEQ ID NO: 13895 - DNA, 4986 bp, Cannabis sativa
aaaaaaaaaaaaagctactgtctaaaaaaaaaaaaaaaaaaaaaaagccaggagggagtgaaggactcgatgcccaacaagaagaacagcattgaattaatctcatttgtctatccaaaaattgcatcctcaactttaaaagtacaactgagagaaagaagttcccataaattttacagtatatcagggagcttccaacctcaaactctaagtttctttcctggttgtaaatcatcatcataatgaccaccatcatcaccctctttgtcattcttttttctggcaagtatcttgttaatcttgtgaagctcattagtgagtttctggtccttgttctgctttcgtgtcttccgcccatcttgcattttaacaccaaattggaaagcagcttttggcatggcttccttctgctcattgtatgttgcccactcctcttctgtctcaaagtcccaccgatgaagcctgccttttgcctgttgaaaagtgatgatggttaggtcttctaaagcaaccactattatttgcttcacaatgtttatacacattcattttgcaaggacacacatagtttcatttgttacgcttaagcacaacagtacataacaataatcttaccagtcaagcatacaaatgaacccctagatatgagctacacaggtaaaatttaaagaaaatatattcaagttactctactaaataaacaacaaaaaaaaaaaaaaaaagaaattattaaaatttacccgtccacccatgtccatttttgataggtcatcttcatcatcactgtccacaacctcacgattatactcctgataaccagggtaacattcagaatagctctcagaaataaaattaggatccttttctcgagcgtctctttcccttaactgttgaagtctctgatcatcccgcttaaacacagatcccagaccacggtccttctcttcttgggtcataaaccgtggatcttgcagaacattgtttgctgcttctgcttgcatttcaaatgcttgcatgtttggctggatatactgatcgggataagctagttgttcagcatattggtactcttgccagtctccctgataggcaccaggcaaggcttgagtttgcattgcatcatacccattctgaagtttgacacaaagtaaagtaagaaaacagacattctacagtatatactaattcttccttgttctctaaattataaaatttaaatttttaagtcattcacaagcttctacttttatagacttgacatattatacaaataagtactgatcaacatactgcttcttgccattcttgaggtagcgcaggaggttggactggaccataaacaggttctgtaaaatatgaaactttctccttatttcgaggagattcttccatatcctctgacagagggctttggctcccatctttaccaggaatgtcatactccacaccttcaccaacaaatatgtcctcttcttctactctagcaacagttgttgggccttggtgttctcttgaatccacatgatttttcctgggaggaagagggggtgggggtggcaggatttctcgttcagtttgaacctttggaaacccactatcaggctttgagtgcttatcatcttcatcataatcatgagccagagcagatatctttgctgtaattaaaattcacacaaaatttcttccataaagcataaccaaaggtaaaaacaatgacaaaagggtgatgtcaagaatatagaagtcaacttctagcatggttaaatattctgatcacttcattgggaaaatgtgttttggatttccaccattgcatatatcacgtaaataatgtgaaactatacattttaaattaaaacaaatctacacgcttaataacttccattagcatcaggataatataaatacacaaataattccttgttcggacataaaccttttctctctggggtaactgttttatgttatataaaatgattcaaatctgactactgagacacttgatatttacctcaaacaagaataatctctatactatttatgaaatgaaattttctaacaatggcatgcttggcaacatccacaaatttctagctacaagttgattatggttattacctttcacatctctatccttctttttctttttgagaaccttcccggaagatccaagacgtaaatatgacatgattttagaaattcgatcaagtacagaaccatcaacactgacagtaaccatttcctgcagaacggtaattacatgaaattttgaataagatgtccgaaaataagattgcacaaaggttcaacaaacttaaacctcaggctgtggacagtcagctctactcctatgcacagtagtcggaatgtcatgagaatatccattttcctggtataatcccccacaaatggaaacagaaaaagtgtcagagcacaaataatctcacaggattaatcatctggaacgggcctatgaccagaattcccattgcagagctttgatatgtcttgatagtagtagaaatgaaattgaaaagcaaattaagacgtccgtcggccatgataatttaccatgttaaaaatgaaagccattctaccgggaaggaacatctcatttgatttgataacagtttggggcttcactatccattgataaacagactgaaaacacagacatatgttaagcaatttatgatctaaaacgaacaagagggatatttctttattcagaaaattaattgaacctttgcagtcgccgtgcgaaatgatacatgttgatcctccttagatgccctgtcataaaacaacatgaatctgtcagtgcaggtgctacaatatagctacattactacctcagatgaaatgagaaagaaaggtcctctgttttcaaaagttgtatcaccactagcaaaaatacaaaacaagaaaaagtaaacaaatattgagaacaagaaatgaaagttttcgattagataaatctattttccattttccaaggcacactaagtgaggtttcattaagtgtttttaatttaaaacagactttcgtacatttgttacagaaataggaaattaatgtatgtcagttgatcataacaaatgaaattacacttttccaataaacaacctggaattggatgtcttaaacttcaaagacatattagagtagaccacatatttgcaaaatgcatgtgcatcttattatccaataaatatggctgttaaaattgtcatttagttacacttgatcgtgtctcaaatggtatccttgttaaatagaatctacatagtcagaatccacagaatatggcaagactataaaggccttaggaagttggcaacaaagaatatgcaagttacctaggttgttttccatcactttcctcacccgaatccggcttcttgtcaatttcactccgaattttattaagtaaagcataatccaaacctttcaccaggtgagtatgctccacatcacctgagcaaaagatagaagggcttttagccataacaactaagaatctctaaataataaaatatatttcatgcacagcaccaaagaataccaagaaaaaaaaaggacatgatgttttcaaattaagcaaacacatatatgatatttaactctaggattcaataccaaacagaacaaacaagtaagcatatttagctctagtaaacaataacacaaacctccaaggtacttgctcttctctatggaaaacttctgtgcctcagctggcctataaatatcgttaaaacagataaccaaccaaataatctgaataagcaagaaagcaaaataacaccctttttaaagttcatcatgaaaaatggcaacagtgaataaaatccaacccgagatcgacagttccaggtggagcaacggcatgaaatgagcccaattcagtaggttcataatcagggttttgatcctccctacgctctttagctcggtctctgtattttggaagttcgggctgttctgctgctttctcttctctgcccaatccaaatatacattaaactattaactgtaatgcatacaaaataacttcactttcatcctaaaactccacaaaaaccagcctcttcgtcaatcacatccagaaccagaaccaaacatatttggaacaataaaatttcttacaagaaaaaaaaaagaaagaaaaatgttccgaaactcaatttagatagaagtgagcataattcgaaaagaaaaaattgcatagttataaatttaaggacgaaaattgattgattttggttaaatttcattgaaaagaatactcacttgcgacgaactttttctttgtaatttttcttcgcagaagtcattgtggagactaacaatgagaaattatctgaaactgttttgctttctttctttcaaattttgctttctatcatcagaacagaatgaattgagaaggactgtgttcttcccctgattagggctcaaccaaatacaggagaataggggatttgattatagtttgctccaaatattcaatatttatgtcgttttgtaacattgtcgtttcatgaggattttttttcgctaaacgtcgtttttccaaggataaacaaactatagttgtagtaaatacgggccgggtttccaaattctgcgtttccttgagtgctttgttcattggacaatgaacatggttttagttttagttgttggagaataactaggattaaaaagacaacatcattccttaaaaaaaagtttgtaagctataaaaaaggaaattaagtttgtaataaaattccctttcaaaaaaaaataaaagattataaaacatgttttttttaattagtttttataatttaatatatgttttttaacacaccattctaaaatataatttttttattttctctctcatccacataaaatttgacacattttccgatcaaaattacttggcaactttaaggctatgcagggccggtcctgagctaagatgaaggaggcgg

SEQ ID NO: 13896 - DNA, 4146 bp, Cannabis sativa
cccctctctctctctctctctcgcgttttggtaacctctcagccactcaggcaccaatagaggtaatggacattcagcttctacgtttcaatcagagtagctatttgcttaattccaattccaactcttcgctgcggtttcgagttactagggctaatcctaaggtctcacatcttcagtctcattgctcttccagaggtaaaacctatttcattaggtcatttcttatgtttgttttccattaaatagattatataaactgagtttagggaaattcaaagcatatctaaaagtagaaagaagaaactatcccttttgactttatttattgaaatgcaaaacatgtcatttttgcttttggcaatgccgcattggctttgttgatgaaagaaagatgaatttattttgtgttcaggtgggttcgggtgtaaggggataaagtgtgcaatgaagtcttataaattgtcagaactctctctttccgaacttgagaacctcaaggctcgtcctcgaattgatttctcttcaattttcaccactgtgagccactgtttgtgttttaaacttgaacttgaaattgctcttagtttttttttttttttttttggtggtgattgacctttttttgttactgtataaggtcaaccccattgtcgatgatgttcgcaaaagaggtgattctgcagttcgagagtaggtgcaaagttcaattttttgagttggtttatgttaaggcgtttgtggtttatattgccattaattaattttatttgattatatatctattgagattgagatatatttagttaagatttttgtcctcggtaggtatacagcaaagtttgacaaagttgatttggataagatggttgtaagcgtttctgagcttccagacccggaggtatgtctatttacaagatttgttgacttgctaaagttattaatagcttctgaataatttttgtttgtatgagcatctataattgttaattatttgcagcttgatcctgttgtgagagaagcatttgatgttgcatatgacaacatttatgcatttcattttgctcagaaatcagctgagagaagtatagagaacatgaaagtgagtcaattttctgccctgtctcttgtcttttgctctagtatgtgatatagccttttaaatatattttatatattatatcagggtgtgagatgcaaacgagtggcgagaagtattgcctctgttggtctttatgttcctgggggaactgcagttttaccttcaactgctctgatgcttgcaattgtaagtttgtcaaattaattggatcagttgattttaatagctgaaagttttataatattcacataaaaatctataagtaggtctccgagtttcatagatataaattttatctctgtcaaatagcctgcgaagattgctggatgtaaaactgttgttctagcaactcccccaagtcacgatggcagcatatgcaaggtacttggttacttggatgtgatgttttaggtgatgtcatgcaataagtagctaatgcctttccatttctgcaggaagtactatattgtgccaagaaggctggtgtcactcacatccttaaagctggaggcgctcaggtatggaaagttaaaatttgtaggttaagtaattgttagtaatatgaaggttttccccgttatttaagagtcctattaaagataatccaactattctcaaactgcaggctatatctgccatggcatggggaacagaatcatgtccaaaggtactaattaaacttagttcattcatattttgttaatttcaacaaatgttctgaatgtacgtatttattatgaattatgaaggtatgcctactggttggtcgttattcttgttggtcctctgctaatgactaatgcaactgctatctcatggttgttgcaattttttgctaatgacatttttgttagtcacatagttagcttattattagggtatctttttcatattagactatggattatgaaaaacctaactagaaaatgaaaaggaaacatgtgaaatgcaatctttgaatatgacttttcctcatctaattattatatatcctgtcagaaactaataattgtgtgcatgtgacaatttttattgctatcagtctatcagtgtttgtacatcaggtgtacgtaataatatagtttttttaacatctctgcttacaccaaaaaccgttgcagtttcatttgaacatatccagtatttggtttattaacctattttcttttcaaatatatatttcaggttgaaaagatatttggccctggaaatcagtatgttacagctgcaaaaatgattctccaagtgggtattacttcttgttacacattttttgcattagaataatctacaatattttgaatagaaaacggtgtggttgacccatgctttgttcaggaattttaatttgattttatttgtaattttgtgtccttagtagaatagtgaagccatggtgtcaattgacatgcctgcgggtccttctgaagttcttgtcattgctgacaaatatgctagctctgtccacatagcagctgacttactatctcaggtggttacttctcctcatactattgttttacagatttgattgatcgagttcattgtttttacatataggtgctttcacactcgtatgcttctgtaatgtttatgttttgtcagtatgcttagttggtccaattcttaaacctagttctacacgatatctttttattcactggacattttaaacatggacaatgacaaacttctgctatttctattaaatttctcatggaatctgaaagatgcgtctgatgctaatattctgtaatattgagaaagaaacttattcatatgatggaaatatacccatttgtaatgcttatcagtactgaaatttaacatctacagcctaaaataaacacaggtttcatatttataaaattcaaaagacctgcaaaatgcttagctctaaactatatttataaaataaacatgggtctaacagattaacataatttcaggctgagcatggccctgatagtcaggtagttcttgtaatcactggagatggtgtagatttcaaaggtatcgaggatgaattaaagaaacaatgcaacgacctacctaggggagaatttgctgccaaagcacttagccacagcttcaccgtatttgctcgtgacatggttgaggtttgtgatttgacttcttattattatatgatacttgtgttatccaagcaaatatcatacagcttgtttggtagacaatacagggtggtgattgattttttaatacactggcatttgcttgcaaagatatcttaattatactgtgcaatgcatacctgatattatgagtaaatgaattgtagaagtgttttcacgcagcttatttttaatttgcagaggtgattgcctttctcttaagctgttattgaaattgaaactagtcagggtaaaaacaatagtttttcaagttaacggtaatataattcttatggtacttttctttaattatcagttaatacaacaccatctacttgcatggaaattgaatttcctcgagtactcgtgaaatgatttgtttcatgatttaaggatttatttacatctcgtttgacactcaactttctcatgagtctcaggctgtctccttttcaaacttgtacgctccagagcatctaattatcaatgttcaagatgcagaaaaatgggagggtttcattgagaatgcaggtaattttttatgttcttcattttttgccatatttatctatttttgcttagctccttttgtttaacggattacaatgtccttccagtgccgcctttgcattgattttgaaatttggttctcttttacataaacatcacctctaaagtctagagaccaaccaatgttctattgaatgatttgtaagtaagacaagaatcacgttgctaaaaaactccagaactcatgagtcaattttctattggtttttggttttgtttttcgtaacttcatatatatcatgaattttcttgacggctgactaatcatgagttaatttgattgaaagaggtgacattctataattgtaacatgcattcgttaatgattcttttagagtg

SEQ ID NO: 13897 - DNA, 3324 bp, Cannabis sativa
aaaattacctcatctcggatccatgaggtattcttcaaataggaaaatcgtatggtggatatgattataaacattaagggctctgctattttaatattttcatttttacttccgcattttctttttaaaatttccccttttggttttgaaattattagagcttagtttttcaccttatgcagcttctttgcttcttggtatgaatgatggtagatctgacaaggcaagtagacaaagatcagatagtcccttctcgtttccgcgccagaagagatctgtgaggccgagagtatacctttctattgacttagactctgaatagagtggatccttgctttaattaaaggagaatgttatccacggtcttattttgcctggagatattatattatctgcctctttgcaactccaagttttgtatttaggcaagtaagaagaaaaggttgatatataataagcctttccattttgaaaaaagataatatagttgaaggtaaaaggacaacaaaaggaggacctgtgctggtacctgcaaaatttctcattgaaccggtaagctgtggcgtgtcgtctgtgtttgtgtgtgtttatatgttcgctcactcagttcagtgcttcccctttcctttctaatgttgatccgccatttttcgtcgtctctttcagttgttaacgaggattgcaggtccagcggcggattttgtacaggattttaaatctggaagaaaacacatctgtgtttatggaatgaaatgaatgccttcggatttatcgggggaaccccataaagtaatacccaactatcttactttttttttttatttcatttttgtttctgttcttcctattttggtctcggttttatggtgagagaaatagccgcctgtaaattgttcagttcagccaaatgaaatctcagatttagatatttaatatctaatgatattactattcttttcagatgaatatatatttgttataatgaattatttcagcacaattgcaacatgaataacctttgatttatcagctacaatacaaccatacaaaccccatcaaatgaaacagtagaaagtcaattatttcattctataatattattagccattaaagaagatcacacacattctaaacttggggactcattgtattaaaatgcattttcataccattccaatttcgtgctattattatgtttgtcatagcactcacaacaacggcatttatttttttttaacctaaatgtgataaaagaaaagtttctatcactcaaacaaatgtaacttgcatgtattttttaaacttaatttaataatatataaataatataaacaatattttatttgtttatattgtatatataataaaataaatattgctttattagtgtagaaaataaaaataatattaatttaatgacgatgaaaaaaaatataaaaaaactaatgtgttgtaaaatagagaaaataaaactgttagaaatgttcttaagatacataaatttggttaatagataaccacttgaggctagtctcaagtggccataaagggtgtggggagtgtgggatgtggagtgttttaagattgaatttcaagttgtacaatgcaatgtaattatatagaagcgtcaataaaaaaaaaaaataatgcttagagatgagatagaaacgaaacaaatttaaaacaatttgctttgctttttgtttttcggttcctagtttattattcagattatttcttagaaaatatattcagattattctatttttttttccctttggatcaaaatataagtaggaatcttagctgggactaatttatgaaaacgatctttgaacaattaagaatattctagagctgcataattgtgatgaccttataactttactgcagtttttgatggttgtatgtattaattgaagaatttttaagtgtgtgagatagaaacaaagttggaacatgtaaatcaaagttgtgggtagatttacaagggaatggttcttatctttggttagtagccaaaacttatatataacaagaattttcttaaaagtgaaaataatccaacttctgcaagatcaaaaaaaatctaggtctgtcatttaacacaaatgaataatgtcctgaaaaaatacataggcatgtgagttggtgcagtatcatgtccatacatgttctctcaagtatgtagggttctcatatgatgaattggttggtagcagaaaaatattcggacagaagtcgattcggttatgtcatagtacttgattattcttctgttgcagcaactggtttagaatgccttgcactctcacaacctgggcagttgtgtaagctctcgtgaatgtaaatgtcgcagtcaaggcagaaatgctgcttgcatttcgggcaagaaacacgaggaccgggtttatttcctgtgtcaaaaatatagagcatatttagcaagacgatttgtcgagggatagaaaatattcggatcaacataaaggtgtcgatcttagtaaggaataccattgtttcttagtttcaagaaacagacaattcaaatttttctcacattttaaaaaacatatctaatcctcaaaggagtcatgacagtaagataataagagatattaacttagtttgcacccaaatggttaacactagaagaaaacacatattcactaaatatgcaagtaccattttactgcacaaaatcttatactttctccattttactagattcgcttatttggaactggccccaaaatcttattgtattttcggcattggccccaaagtttttgagtctgagaggatctgaaccactagactaccccatgacttgggttatcatggagcaaataattctaaaagtacacatctttatttgttatttgccatgtatagtaacttaccagcattttggagagtctcttggcagccaaagcatgatcttggtaattttagatatggatcattaagtagtgatggagaaacctcatcaaacggtacaataggaaagagatgatgataagatcttgccaaatggggagaagaaatgagcgtcaatccacacgttcgacactctgtaggtaaatcacatatgcgcgctttgcatctaggacaagtgtatccgcctccagcctttgcttccttgtgacaagaacatatggcaatggagctctctgccgctctttgtgggaagcccattttgattaaattagcaattgcaaattctgctatggcaggaggtggaggtgcatgctccagtattaattctttgaaatgtgactacaaaataatgagcaaatgaaaattagcagaattacataaaaa

SEQ ID NO: 13898 - DNA, 3387 bp, Cannabis sativa
ttttttttttttttttgccatatttaatacttttgaaaacataatcaaatactctacattagttgtagatggaggttcaaatgtcccctattgtatctctatttttaggtgaagctaacaaatgaatatgattttttaaccaagctttttttttctttcaaatatttcaattcccagcaattttctctttgcagaaaaaataaacatttttataaaaaagaaaattaggtaggcatttccattactagtggatatttatttatagacgaaagctttaattacaaagatagaatccaatgaaaacactatgacaaattagaaatattcagattcaagaataagaacctctttacttatggagacttgcttctatgttttgtactttgattccaaattattagtggaaagtttaaattccaaatgctcttaagagaataatacttgacaaaaggatatatgctccattcatctctatgacaatttgttgaaacaaaaatcaaatgaatttcaaaggctgataatttgaagatgataactatatctaactccgcccacgaaccctttgaagcgagtcgcccccatgagccctaattaagcggttagactctcaaaggagccaccgagattcgagagtaagcactttgtcactagaccattcgcttggtggtaaatctaaacacatcttaccaacaagttgggtcaagtagtttagtcactagaattgaaagacaattagacatatttgtgaaagaatggtgaatagcatatcaagcttcataaattgaaaacaagaaaagaaaaataaacaaaaaggtgaaaagaagaaacttgaaatatataaaagaaaaaagcacaaaaattacaagagagtgagaccctattttgatttcctagaaaccaaatcttatgtaggatgcaaagaaagaaacatatgcaatacaaggaaagttaagagaaaaggaaaccaaatccccaaccaaagagaaacactatttcatcaacaaattaattctagtcaatccaatacacagaggatagaacccgaaaagggccaggtcagattgcagaaactggttccttctttttgtgttaatctttcttttcttttcttttttttgagaaaaaaaaaatatagaatcttacttcaacaacccataactgcacagttgaatacaaagacaccaccatgttccttcacaccttgaatcttccaatccaaaacgccatccctaacaacgcctgaagttgggcgccaagcgttgagaacaatactttcaccttcgggacctctttgcccacccacaactagaagttcttcaccacaagccttgaaagcgagcccccaaccattagcggaatcagctctcacaggaagccttcccaaaacatgccatgtgttgttaaccttgtcatactttttaaccatgttggtgagatgctcaactgcatataactggttactcacaactgctacaagagggggcgcctgagccgccctattcgcctgtggatacatattctctatccttctccattccttcgtctcaagatcaaactcctctccacaagtcaatgagacagtgggacttgacatcccaccaatcacgtaaaactttccatccatgaaaaaccccgagcacaatcttcgcggggttttcatgttcggtagcatttcccactcacctgttgcggagtcatataactctgctgatttcaatacagttccgtttttatcactcccccctgcaacaatggcgattgaaccaagactaccggacccaaacagacagcgagggcggttcattccctgacatttaacccaactacgacgtatcaaactgtacttccaaatagcaaaatccaacatttcacgaccaaacaccaacaactgactacccacagacagagattccttatctgcatgattgaaacactcatcacagggtattctaggcaatgtaatccatttctttttcgacaaatcgaatgcctcccaacctcttggatcacaaacaagataaacccaatgctccacaatccccaactgtttcctcaacccatacaaatacccactattaattaacgtactatactttttattaatgcaagctaatgaagcataatcagatctacaagcccaagcaagacagttcaaagccacatcatcaacaagaccagggagaaatgaatcacttgatcccaatctaagacgaccatcattcattctaccctcaaacctcacactattatgattagtatgtacttctctttcctcttcaatcatcaaagaattcctgtttggtatctctgtcatgttaacaaatctttaaaaaagtatacccttctctttacaaaatcaaaaaacaacaatcttcaaaaagaggttcatgcaaataagaatcccacttatcctgaaccaaattctcagaaaccaaactctgatttttgcacacaatcaatttccatcaatctattattctccatatgaatttaattcataacaaacttcaggctccaaatctcccaaatatcacagcaaaaatcagtttttcgtatataaaaatcactgtttcaaaaattatttcagactaccgaattaccaagaaaatccccggaaaactttctccctcgatttccagctatccaaacagctttcctgaaagaaaaaaaaaatcagaagagcacaaatcaaaacgacaaaatagaaagaaaaaaaaattcagcttccacaacaaaaatcaataagcaacaaatttctctcaacacgatccgaatctaatggagaaacgaactttccggatcgaaattcaaacaaattattcggatctcgttcaaataaataaattagttaatgaataaagaaccaaaaattaaaacacttttcatatctgagaaatgttttgaataattatataaggaaaatcaaatcaatgtctccataccttactgtatggatgaaagttccgatctcattttcggttcaccggagaatcaagccggaaaacaattgcatcgagcatatcgccgacgccggcgagaaagaaaaggtttagagagagaaagaagagagagaaagagagagagagtttgtaacgaataaaaactaagataaaagccaaaacaaaggcctggcttataaaacaggaataaataaaatatatatatatataaaataaaataataataatttataattatataatctgagaaagaaaaattctattttgtacctctaaaatacaccttaatatattaaaaaaattacgattaaactaatttttaaaaacttatcaaaaaaaaaaactaatttttaaaaatcatgcttaatatttttttaaaatttttttgtcatgttattttcattttttttaaatcatttataatttt

SEQ ID NO: 13899 - DNA, 3408 bp, Cannabis sativa
caagaggaggctctacaaaattgggcatgagcaaatacccattcaaagtctttattgtcctatttttacaatccaaaaaatctattaattgtttgaggaacacttttaactcctaacttataagttcaaaaacccaaaaagggtttttaacactcttctctctcttataaactattgttttttatagatgttcaaccaaaacatcaactatcaattgctcaaacagacctgcctcaatttccaaagccaactcctcttgctcaacctcaaacttgctccattttccatctttatgcatctccctgatatatacctccttattgtagtctagcccccacccaagtacccccttttgttccctattcaaccaagatttggccaaattcaccatctccaaattgtattcatcatcactctcttttgcctttatttcatctctaaaaaagtcaagtaatacttggtcttcttcactcaaacatttatgtgatgaactcattgtctccttgacataaacaaccaactctcttgccatttcttctaccaataattcatactcttcttcttcatcatcttcgccattgttgtattcttcttcgtagagattatcaaattggtttatattctgaacaagtgtttgtcttctccctaatgaaacataataatatgacattaattagtattaaacgaattgagatctttatcatgatgcttgtaagtattgtgttgtgaatataaaatgaaggagaataaaatagagaacatactctccacattggcaagactttgatcaaaggtagtggaaaagtgttcttcattttctctcaactcaaaatcaaaaactgaaactggactgtgctgttcgtcatcttcttcgtagaagagcatctctctatcctggtattttaaaaatcatcatcagtcacaataattagcaaaaatgaaaaatccttaaataataatgactcagcaagtaaaatgttcttcttaattaaaatgctaaacaaagttaatttgttgtttaaccaatgtgttatctctttttttttttttttttttctctccatatatgatataatttaacattacataagtatacattcttatacttaattaacaaacacaataaaaaaaacttgtttctttaatgaaataataaatatcagtaatatgattataatgtttctaatctaaaaaaatataataataaagacaatggtttcctagtaatttctttcttgtcatattcgataaactacaactaatttataatattacaatattaatatatgtttccaaactatatacggtgcacgaacgaaaccaaaaccgacatggtcaaccaaacctcagactctcacagtagacagattactattttctaatactatattctaaaatctattattataaagcttccaaaaaaaaaataaaataaaataaatcaacaacagacacttcaataatacaaatatatttcatttatacaaaactcattaaaataataatgatgtagatatgagaagataattttacctctgccgggtccacatttgctgtatgtgtaattgcatccacagaatccatgccgacacaagataagtcttttttacccatcttaacttcattgatctcctcagagttaccactccagcacggtaaaagctcctcagtaaaatcactctcgcaccaacttgacccattgtcactactattgaaagaagagtcaattgatctagtggtggtggtgtaatgatgaggtgaagtagtgaaattcaacggtgaagatatctcctcaactaagtcacggaacgatgtccaccgtaagatgtctttgactttcactgaaatttcggcttgatgatgattttccttctcttcttgaacttcctgccttttggacctggagtggcctctctttgttgacagcttacgagaaaggcttctgggtaaaaatgagggagattttaccgtggtaaatgggatgttttttaccgcgttgaacacagcttgaatggctgacattgttgttgatgatgatgatgatgttttcgaacgggtttttctgcttggcaattttatggtcacttttgagtttttggaatccatttgtgtaagattgaagggttggtgtcttggaattgagttgaacccacttgaagagcatgaattattggtgtcgttgaggaaatctttgaggagtttaggccttcgctcgattgaaaaaggctttctttgttgttgtagattattcatgtgacaaaatgaaatgcttgaagaagccatttttaattatattgactcaaaagaaagaactgaaatggtgacttataaagagagagattgatgagaaaagttagtgaagaaaagaagtgatcaagaccaagagagtgtgatgaatgaagagaaaaaaagtgaagctttatatctaaaaaatggtgaaaggagaagaaagagacaggtagtttctaagtagtaaagatctccatataataataataattttaaatgaaaaaaaaatgacagattagatgccaaagagtggatggttcttttctacttgtacaattattgaaaggactagcgagtgaggctgtaagtgaaagattgagatttggggaagatcttatggggtttgtgttgggacagaaatcacaagaagcatgtccttttggaaattcagttgaccctctctcttacttgcaagttacaatttcgcagagtttaataatgatggagtttatatgtattattgtggactaaaaaagataccttgttaactattagaatgtttctataattgtcaatacaatttaacggtggtggtgaatggtgatatatttacatttcagttatatcagcttagatataaataaagtttctaaggccattgcgaacaccccatatattataagggcttaagtcacaaatttctgctcatattaaattttatttatattctcattttttaattatgtacgtctgtgtcttttacactatattcggtagagatgagaaaatgatggatggagaaaagaggtggaggaagaagtaaaaaaatttagcataagtaaagaatagattcttccttcaaaattttaaaattcaatctcttagttttggaaatagtaaaaaaaacaagtaaattaaaatttaaaaagtaataaatatttatgagcaattacttctctcatttcaaaaataataattaattttcaaaataataataattaatggtcatttttcttcacaaggtgtatcctctttccaattccaaataaacatagcaagttgagatacgaattgaatgctaatagtaaaaaggaaaaaaaaaggaaaaaaaatattttttttttgtaagtataaatattttaattataataatgttataaaataatataaagtagatga

SEQ ID NO: 13900 - DNA, 2703 bp, Cannabis sativa
gatataaacaatccctcccctctttacaccctaagcaattagaatcaagaactgtagaagcatacaatgaagatgatccttcaagctaccatttgccatgtactcatacataagaaacctgtcatgaacaaaattaaacatttaacttcacagctgaatcacaagttcaacaaacagaagtttagacagagaaggaccgacctctcgtttttatcaatgcaaaaaccacgcaaggcaacaagatgacgatgatgtagtctagcaagaagctctatttcctggcagaactcatcttccccttgctctgaaacttcgttcatttgctttactgctgccactaagccatcattaaaatgggctttgtacacagttccaaatcctccttgtccaatcattgtattgaagttttccgttgccttctttatctccttataactgaattttctaaacattgatgaaggccctgcatgttaatttatcacgttaccatcctaaaacaaatgatctgttttctttctctaatcattgttagcagcaagaagcatataatcaagagaaaccaagaattacaccttcttgtaatttccgtgcaggacgaggaggatggaatgactttgaagatgtcttgtccatattttcacagtcctccagttcttttctttttctacggataagaaataacaagaccacaagcatcataacagcaatgactgctactgctatgaaaataccaggaattagtgtaaggtggtaagaatgatggtgttgatttaggggagctgctgtcaagttctggcttggattatcagcaactattggagttggagaagctcctggcgttatcaatggtggagatggccctaaacaatcaacaggattccaataataatagttggaaatatctcttcagattatacaagaaatttgagtgaatttaacaaaacaatgaatgaacattatgaaacatcaaagcttaatggatgattcacagatcaacccacgatttagaacaccatgttaattcaagacacattataaactcatttgaaaagtaaaaacatgctaaacaatggccatggaatagaaacagaaatccaacatgtagtaaatataaattcatttatgttccaaacctataatagctggaggaatattgagctcctgaactccaaaaaaacagcgtgcaatgtcaacagctgatgtattatcaacttgactggcaaggctagtaaaagtagcatcacggcaagtgctcactgtcaaattatttaccgttcctaccagatgacgaaggtatgaaatgccagagtttaaacaagtgtggcatctactttcctctgaaagtggtaccttgcaattttgtgcaacatctgaaaattttggtgactgcagcatctgagccattgttgttcggcccatacagtcataattaactagaacctttgttccaaatccacaaaaagccgatgcattacgagaaactccatgtagttccaatgttcgcgatatggactgaagacaggtatcagataagtctgaaggaacccctaggttgccagtttcattcgcgtagcgagcaatagaaactgcaatgaatgcatttatatagcggcaacatttccctctgtcatctgggtttgagcataaagaggctaccagagtaaagtttgatccactcaaatctaaaggacactctgcaaagcaggttttaaggttaataatgaacaatgcaaaacaagattatacaataaaagtacttaagtcaaactaagcacactactaaactaaggtcatgggtccaagcaatcaccatttgagctagaagtagtactatgttataaaggaaaatgcagtaactaaatgagaaaatgggaaaggaattaaagacattaattcctccacattaatgaatatatttctgtagatttcagaaaatcaaaatgcaataactaaagatgttcttacatagatttgaacatgccctttaataacttaaaaaacaaaatatactccaccaagcaatacccagttccacataactgcataagcaatatgctctgataaaaagggggtcatagaacccacaaagccaaaaattaatgtacattttgatgcccactaactcttaagacaaatttaatgctaaatgaataaaaggagcaatcaaaataaagggcataagcttgtgctccaaaaacaaaagggcaaagagatgaaacaggaaatgaaggaaagttcaaatctttaaattacaactaaacccagaataggattaaaatgaggtaaatgaggaaacaataataaataaatgcaacttattgagtaattaaaaacaaagaaaagtaaaatgggaaagagaccaacctgccattgttacaggaatcaggtgcatacccaaaaacgagacaagacccaacagagaggcgagaccgtagaccgccatggtcgagacaaatagggaaaatttcagtgacccagatagaaaaagagactgaagaaatgtgggtcaataatggaatataagaatgcgtgcgaattagaagtagagaagagcaactgttactgaacaactagccaaatattgcttcgagagagagacttttagttagttttctttgggaagagagagagagagagagagagagagagagagagagttcaagcaagaaagaacctgtgcttgaggttgaagaaactgttttt

SEQ ID NO: 13901 - DNA, 3488 bp, Cannabis sativa
tttttttttttttttttgtgtactctttgaatctgattttaaatgatttaggttatgtatatatgtattcgagttcaggggcaggttcaggttagacctgaacccgatcatgcataaaatagcaacctagacctagctgcctattcattcattgtgaaccggtacaatccgactcgcttgtaattatatatacaagtgtttttcaatttttgagtttcacgggttgagtacaagttaaaatcggtccaaatgttattaagttgtgccttaatataattcacagtatattttccactagcaaaacaagtcttaatccgaaaatataatagtttataacaaataaccctaaaacaaaacctaccaccacatgacaatcgaattgaacaaaaagtaccaaaacaaatcctaatttatatgattctaatattacttcaattttcattttagttcaatgacataaacccttaaacaatagaacaaagcacattcatatctttacagtactagtgtctacacatgtgtacatatatatatatatatatatatgtattgcacaccacataaaaatatatatatatataattatgtatatgtacatatcactttgtataatgtataaaccattgaaacttttttgtacatgttttgtgcagactaattaaataattaagaacattttaggtattacattttttttagaataacatatataagtctttttaattactaattaatccaatttggattcaatgcacagtcctgtgttatatatataatttatatttctatataacactaattaagattttacctctttcctatatattttcatatatttttaaaagaaattgagaatgaaatattagaagatcaattatatatcgatctgtaatttgaaaaaagagaaagaaatcgataaaaataagtacatacttagaaaaactataaattgtaattagctaccctaattttttctgtgacaaaaactttgtattgaaaatttcgagacaattaaagcctcaacatataatatttgcaaaacaaaaatcattttccattttttggagccaaacggtacttataagagttaataagaaaaaaaaataattggcataaatttgtttttaaattttacttatatagatttattagaagacattccatagataaaacatacatgtaaacataaaagaaacaaacaacaacaacaaaagaaaatgcacatatatatatataacctagctaagtatatattccatatatatatatacatataaattatcttctttcctaaaccctaaaactttcaccactatagtactactctttcgtctttccttctaagtgttataataatgagattttaagagataaaagtatgaagctttttttcaggttttgtgtttatagaactttaaggggtttcttatatgtgcttttgtcataaaatgagtcatgaaattcgagtgaaaatattaatttgttctatgggatagaaatttatgaaattgaaaatacttaagtgtatgatttatatgacacatattttggattgaaaagaattgcttttgtctggggattttgctattgctgtgttgtttgagttaattagctgattatttatcttaattatgaccatggatgaacatttttatgtgtatatatattaatcattgtgaaaaccttgtaaaaaacaaactaaaagtttgtgcatataaattttttggaacaacaatcccaaacactccatcaacatgattctccatcaacatgattgaagagctaactttgttcttgaaataaaataaaataagaaaaaagttattctatatgtctattctctcacaaaattttatcatagaaaaatctagtcatgaccacatcatgaccaatctcgaagcctccatcatatatatatgatataatcttaaaacaaaaccctagaattctatatctttaaaaccacacacacaagagattatacaaacaaaaccttaaaacaaacactataagattatctttcatagatctaaaagaataaaagagaaaaaaaatgatattcaatgaaattaaaatcattaccacaagatgaccaatcttgtcatcgttcatatcaacactttgagaagcattgaaagatataggatgagcatcaaacacaatatcctccacaggtttagatttcaattcttcagctacaatctgtgctcaaaaatcaacaaaaattatattcaaaaacccttttttgaacaccgaaaaatacaaatattcatagatctaagagtaaaaataaacatacattgagagtctgcttaaccgatttcttaagtggttcacgcaacacaccatctatccatttcataaaaaaattgtaatctcgtcttgggacatagcgaactatctcccaacctttagtctgatgattgtttacacgtctatgttgacgatattctactctatatcttgatccactttcatcgtcatctgatgagtcttctaaaagtttaagtacgaccatcttagcagagattgaaagtgataataacgaagataggtttaggagattttttaggattattacaatgaagctagagagagagagcaaaaataaaaagatgaagtaagagaaagtgagagaaatatatagagagagtatgggtatgaaaaaggagagaaaagagggagagagagaatgaaaaatttgattagacagagaaaattatagttaggtgtttttttttttttttaattgtgttaggtctaattcaattttataattaaatatttggtatatagagaaaaaaatccaataataataaatttgaaaaactgaaagtttgtattagtacacagttttatactaattataatttgtcattatctttaaaataacgtaaatggaatatgtaaaaatagaaaaagaatatccttttaacaaaatttgaaatttgtattggtgcaaagttttaccttttataaatataagaaacgttttcttcattttctcatattcttcaatattaaatgttttgtcaaagaatttcctcctacattaattatattttgataaaattatcaaatattatttgtttactatgtaaaaatcaataaaaaaaaaagatttattttcgcataaatgtacaaaatatatcactgattatgatgcccccattttttaagagaaaattatacaattacttaattttgtttagttcttgtttattggtatgttaactattaaatcaagtctcataatatatagctactaagaaccatcaatgtttttattcagtgaaaacttatataaaataataataaaaaaagattaatgaatgaatatgtattaataaacataaaaaattacatattgtctacttcaataaaaattatataattattttttaaattatagatatattttgtgaggcttaattattataaattaaaaatatatattgatgaagaattttattaaattttataacaaa

SEQ ID NO: 13902 - DNA, 2599 bp, Cannabis sativa
gaaccaacctgatcctatagcaagaagaccacgaagaagacctcgaggatctaggaccatgaggcaggaaacaaactaggggaatccccaaaatacccaggatgaagaacctggagatacaagggatgccccaatggataatcaaacaaatcccactaatgcaaggaatcaagaacatcaacgagatgttccacaaacttcccatggatttgctaaccaagggaatgaacgacctgacgtgacagaagcatctcacaggaatgaagaggcaaggcagcctcgaccagggaaccagggaatccctcgcaataatgagagaaactcgggaaatcaactaaggacaagcgggcttcctccgagacatacttaacgtccttctcgagcagatagagaaagtgtacacacgtacttgaatagaggacgcatttctaatctcttccaaaggagaaggtcggtgcgagatgaagcaagctcaagctcgagacaatccaggtctcgagggcatagtcggtcagatagacaaatgtgagaaggaagtagatctcgacgttattatgctgaccaagaaagcataagcaactcacagagttatcaatccaagagttactcgaagacaagatttgtgagaaattatgaaagaaggcagcctgaccttcgtgagcacttaaatcaatgacaacctgaccttcgcgagcatctaaaccaaaatacacctgatttacgcaatcagctcaatcaaaatacaaatcacaagtggatcccaactacgaataattgaactgaaggataaattcagaaaatatcaagatggagaatatgaaaaaacttcaaaataaggctggtaattcttttcctttatcttgacatttaaaggagaaatgcatttccaactttgtttaactcaatcttgtgataattttttattctgttgttggagaaattaaacttccgcccaacccgacaatatttgcgatcatgaaactatacctattgttaagtaagtgcctaatcgtttgagttaatcctctcgggtttgtgatatatatatatttgaagtatgataactgtatcaataactaatataaagtagaacagaaaaattattatattaccattcattctctaaagtttcacttgacgatcatctgctccagacacaatcagtgggagtgttggatggaatgaggcccaattaacacccgatcatgaccttctaagacatatttaataacagaatcaacacctccaaataaatctgagttcatttgacccaaccgtaagatgtcatcaacatgagcagatgtgcctgacttcttcttaagagcactgatgtcccaaacacgaataattttatctaaggacgctgagacaacaaggtccttctttggatgaaatgagacacacatgacataatgattgtgcctggtaagcacagaaatgcatgtacgagattgccaattatatgcaaacatataactaaattaagataactgacattacgaccctcgttcagagatatacaaacaccaacctcaccatttactatattgtcaatggcttatattagtagtagataagaagaatatcattataaaatgctttaatttttttgcaatatcaaaaggcattaacagcacataagaatacattaaatctcgtcaattgcagtaaatcagcattctcataattcatattaggcaagaaatagaacaagcaagcaataataatattttatcagcgttgaagaattctacccccgaaaataaatagtggctgcgacttatggaaatgaatgccaggaactggcccatcgtgctcatcagatcgattaatgagagtccccatcctgtaatcccagagctgaatcacaccactatagagacttgccaagatcgatggccttttactacgaaaacttgcccattcactctattactcttggtatagaatttcatcaacttcgttcccgctcaattttcaaaccataacacattgaaatccaaaaccaaagctaaatcaacaaaaagtaaatcttgaatgtgaatcattcgaataagctatccaaacaaatattaagccagctccgttcagtttttgaaaaagtgatggacagtaagcgcatttgggattgcttgacaaaatttcgatcgaagccaagaacttagctttgcttcaatttgagccaaaatcttaaggaatgagtttgggattacattgcttcaatagaagatattattaaaaggaacaagaaagagagcagaattgtacctaccttagatcttagaaagaaaagagtggatcaatatgattcgggcattgccagccagggatcagaaagaaggcgtagatcaaaatcagaatgcaaattgtagacaaaaagagatggatttgggttgtctggtagatctgcttctgccttgtgcttttcttggggagtagtaaacaagtttcaatgcacactattttgcttcctccactctactctcccattttagattgagttaaaatcgcgtcatgtgtctaaaaataaaattttacactttttttcttttttttttgggggggataatttacccttcttcttttttttttctttttt

SEQ ID NO: 13903 - DNA, 2747 bp, Cannabis sativa
agagagagagagagagagactggtaagggatcgaatggcggcggaagaggcagcggcagtgccactgctgacggagaacaccggcccggaggaggaggataaggactacgaggcagtggtgagtgtgagggacgtgcgtaatgtgttctggaaagagtccgtcaagctatggacgattgcgggtccaatcatttgcaccattgtctgtaactatggcatcaattccctcaccaacattttcgtcggccatatcggtgagcttcagctctctgccgttaccatttctctcagtgttatcggtaccttttcctttggtttcatggtcagttcttcttcttattctctctctctgttttattatgtttgcttagttttccctttaatagattttaatgccttagaaatcccttaaatccaaatttggaaactgggttttccatttattcttggaaatcattaatatttttagtataatattgaatgcacgatgcatgcttatagatatattatattataaacaatctcatgttttgtttttttgtaagaataaacaatcttctgttgattatttatatatttgagttatagattcgatgtaataaattttattgttgagtttaactaaacactcaatcttggtttcaatattccttttaatatgttactatagtgagtagggaataaacaataatgtttcactcattaatatttctaaaactgaaaaatcaacttttgcagcttggaatgggaagtgcgttggagacgctatgtggtcaagcttttggagctggacaagtccacatgcttgggatttacatgcagcgttcatggctgatattactagtcagctgttttttcctcttgcccttttatatttttgctgcaccaattttgaagatccttggccaagcagatgatgttgctgatcttgcaggaaagttcaccattctagttattcctcagttattctcacttgctgtcaatttcccaactcagaaattccttcaagcacagagcaaagtcaatgctctagcatggattggctttgtggctatggttcttcatgttggactgctctggctcttcatttactttttcaattggggtttgactggtgcagctgtggcctttgatctcaccagttggctcattgtcatagctcaagttgtgtatgtgatatgttggtgtaatgaaggttggagtggtttttcaatgctggcatttaaggagttatgggcatttgtcaggctctctcttgcttcagctgtcatgctttgtcttgagatttggtacttgatgagtgtgattgttctcactggtcaccttaaaaatgcagtgattgctgttgattccctttctgtgtggtaagttcataaaccttacagtaaaagttttccttcatttgtaacatttgctcaagtctatactattgatagtgcaatgttttgaattgaatcaaaaactcttaattaacagtccttttgtgttatttatatgtttatagcatgaatctcaacggatgggaagccatgttgtttattggaatcaatgcagccatcaggtataaatacattagtcacaaaagtttccaaacatacaaaaactagttcgatggcccataatggtacatactgcatagctaacaaagtcgattttctctcaaatttcagtgtccgagtttcaaatgagctaggaatggggcgtccattgggagccaaatactctgtatatgtgacagtatttcagtctctcctaattggtatattctttgcagtagtaattttgttaaccaaagatgacttttcagtcatcttcaccaacagcaaggaagtgcaagaagctgtgtctcgcctcgcatatcttctcggtatcaccatgcttctcaacagtgtccaaccagtcatttcaggtaccaatctctttgttaaaaaggtcataaattaatagtcaattaagtacattttgaccatgatattttttgttctttttttacttaaaggtgttgctattggaggtggttggcaagcattggtggcttacatcaacttaggatgttattacattttcgggcttccattgggagttcttcttggatatacagcaggccttggagtcattgtaatcgtttcattgaccctaatttttgtctttcttctcatttcctcaacatggtatatttttttttaaaaaaaccccaattatgttaatgttatttatttatatattgaagggactatggggaggcatgatatgtggaactgctctacaaaccttgttgctcttgattgtactatataaaaccaactggaacaaagaggtaagtcttcttatcactagtaaatacatgatgattaattaataccctcaaaatggtcatcaataagatatttgggaatttaaatagatgtatcttgagttcatgatcttattaatgtgttacaagaaaaactcagttatgaaaacttaattttggcaggtggaacaaacgacggaacgcatgaggctgtgggctggtcaagacgttattgagaagccagctgatcaacatatatgatctcattttcattttcttttttcttttatatataagaaattagtgaaggattttccattgttatggttcaaaacagtagtagatttttgggtgacactaaccagcaatgcttctcattttactcatgttaagcggatctgttttgtagttctctttcaatctctaaatatatataagaaagtgctactgttaa

SEQ ID NO: 13904 - DNA, 3326 bp, Cannabis sativa
agttccatcttaaaattaattggcgatgagtggagtagtccatattcttatatatgactcaatatttttacatttgatccatgtgagacaatttttgcttgctaattcttgttcgcggctgtgagtaccattttgctcgcttgcggctgactaactctttgataagtgtggatcggaagcttgctaggaatatgactctgataccatattgaggatcatggggttctatcaaaaccaattggtaatgagtggagtagcccatattcttatatatgactcaatatttttatattgatccacaatattgtccaatacatgactcatatccaagtaagttgacgattattttatgggtatgcaattagcggcaaaatggaggaatagagaagattgttcgggaaaatgactatgaaaaccataatttcttcaaataatacaatcttagctagcactgtgtgtatttcaggaacagggaaattaataattgataaggatttggttctttttgaaattaacaaaccaaaggtaaaagggggattctgtgacccaaaactcaatgatgtcgtcaagttatatattcctatgtttatgttgggacatatcccttaatacatacgtactccaaataagaaaacatctacgtactctcatcaaacccaatttggcaactttggacgactcttattgattgcttacacactcatcacatcattgtacaggtctgggctccaaaagcatattgtttgttacacttcaattatatatatatatatatatgttaaagtgggaagatttagctagcttggaacccaaaccatacattatacgcgcgctcatataattttgtctagcatatatataagtggtaagagacaccaagaatctttagatttagctagctggttgtaattggaatattaagctaaacagcagacttcgtacatatatatatatattattctctgttgaaattagaagtagaactcattctaattctcattaatgtaatgttgttatattatctacatactacgttggaaaatggagcatcttacaacaaattgaaactctttattaatgcaatttgattaacattgccttctagctacctcatatataaatgcgtttttaatcttatcagcaaaatatgtattagctgtcttatatatgtatatatattatattatattcctcttattgatttatatatataaagattagattgcaaaccaacagaaaaatgttgaaagcacacaatcgagatatatattctctaaatatttatcttcgacttcttatctctttaacatatattctacagcaattttttattttattattattatgtgatcatcttatacatatattgtagaaatagcattcttattagacataagtagtgtccagcattttctaaaagtgtcgctttgtgattaacttgcaatactttttaaaaataattccattaaataatatgagatttaatacttaaaccaatagcgatattgacatgtaaaaaagtgttaaacctcaccaatactctttaacatttctcttacaaatattaccacatcacttttactcaataggaggagtgactatttgcccaatgtctgtttttaacatttagagaaaattataacttaaattcttttagtataacaatccatattctaattatagttgttatttactaatttttaaataatttactgcgaattatttagggttgtgggatggccatggcctctcaattaatctttaatttggggataatgtttttaatacatataatttatataagttaaattaagttaaataactttttgttcttatgttaaaaacaaatatttgtaatatagtagttcatataataaaatgaaaatagaaagaaagatctcattttatttctaatattaattatcttacatgttaataatgatagttgtgtatagtgtaaaagaaataaataaataaaaatattattcgattggcatatgtatacatattttttcttgttacacacgtgtacataattaattattttgaacataaattattttcaacaacatataaatatacaaaaaaaaaaaaaaaaaattaaaaaattagtgagatgcctactgtaaatctaatatatatactattataataaaaaaaattgagctataattttttcaaataccaaaaacaaaaatacggtaaaaaaaaaatgaatggcttctactatatttccctctccaattttatctttttagagaaaggtataatagtaacgatatgtatacacctatgatatatgtcttttcattataatatataacgtcacttccactctaaatgaatcataactcattttatttggacaagtcttgttttagaaggattctaagagacactataaagtccattaagaagatatatcgaatgacacaaaaattattttttaatttaacacttggaaaaaaaaattgcatggctgtgcttactcttttggtatatgggatagtgacaactgatgatttattcagaaatggtgaataataatatgtactgttaattagcacatattcctgtccaaaacaaacgcgttatctacataacttttgaggcagagctgagttgttcttattatcaactccaacggttctgatatgatcatatcactatatatatatttgatggtatattggtaaataatatgatcaactcatgtgattgtattttttttgccttttaggcacacagtgaaaaatttcaacaacttattcttttggttaaggtgtttttttagtattattatttattcttctattgacaaagtgaacctgcttttacgtgtggtggttgggattgtgacaggggttaataatattattatgtcaaaatatagagaacttaattatatatatatatactaattaatttaaaactagctcaggtaagattaacccaaaacatttatcccattaatcgtatagctaataaacttcccacgatttcacaggaatattcatttgattcaaatacaagacactaaaacagaaggaaatatattctaaataatgcttaattaatatatagaattattttttattttttatgctctaattaacattttccattgatagtagtgatcatctcatcattattcagagctggttgaagctgtttggttttgtcattatcattcttctcaatatcccatttcaatggttcttcaatcactcccttattcttcctatatatgcaatatagcacaagttgaagaaagcctaatggacaaccaagcatatttggtgtctgcaaaaacaaaataccaaatg

SEQ ID NO: 13905 - DNA, 4227 bp, Cannabis sativa
taaagggcttcactttttttttttgaagcaagggcttcattttctataagtgtagaaaagtatcatttattttcgactgtgagatgccactaaatttagctgcattataaagttattattattatataaactttatgcaggaaactttatctgatcatatcttcagatgaaacgatatggttacagttctgataatgatttaacatctatggtaggaagaggacctttttacaatgagttatggccttcctttgaatggggatggagatgataagtgcttaactgtgctaaatgctgttgaagaaacactatgtcgtcaattgcgtgcttgcaaagcaccatcttctagaagaaaagtgttagaaggtagacattgaaaatggtcaattattactacaccttttttttttttttctctatgtatttctaaatcaataattatatatatatatatatacataaagaaaaaaagaaataaaaagggtctaaaagtgggtcacataaaatacctacaaagatgagtattgataatgaaggaaaatcatttagtcactaatagtttggaggaagaatattttcttcattgatattgaactgagaatgtacgtagttatttatagaatacatagttgactaacaacttggagaatttgaactatacaaggaacggtacagtctattcctagaaagtttcttgaaaaataaggacaacttgctaatacaaaattcaacacgtggtttgaacaatccctttgtgaaaatgttattcgtctctaaagatgttagtacgaagggcaaacaaatggaacatgcctcgtttcttgatgaaatgatgatcaatctctacatgctttgtttggtcatgttggattggaattttagcaatacggtaaagtttcattggaagacacaggtaggtttagctcctccataatttgatgtagaaaaatcacctcacatacttcatttgctattgctctgaatttggcctcaatttttctccgactacaacaattggctcaccaattgactccgaaggatcctatagatagactgcatccatgtgaacctttttgggagaatgcataaagtggctcaccaatccacaacaaaagcaatgtcgggccttggataagataactaaattagtcccccaaccaattttttatatcgagttttatcaactccttcctcaccattacccagtttcacattaagacgaactggtgtgtcaacaggcacccactcatccctcatcctagtgtctttgagtaggtatagaataaacttcctgtgggatacctaaacatattttctttattgatattgaacttagggtatatgtagttatagaatacatagttgatcagctaggagaatctgaactaatacaaggaaataattgtataatctattcctagaaagttcctgaaaactaaggagaagatattctcctgattaattcttttttgtctacagtcacatacatgatgagtgatctgctgactggtaagtggaaatgccatttgaacaaatagtctatatactcgagttttccaacataatcaatcgtctcatgcaaggacgaatgccatcaatgggcaaaacaaataaggagaagaaaaagaggaagtgaacttctcaactcatgaaccttaggttgataatgagaatattaatatttctcatgtcaccaagtaaaattatttcccgaactgcctacatttactttgagatgttttaaagtataacttattccttgttactttgatattgtggaatgaacaatagcttttctttttgtttactgcactctacattctcagacctcatggtgtttaacatctccttgttatatcctaattttggatgcagatatagagccattacaaactattgtcgatctggaagaaggctattgcaaagctttgttgtgccgcttacgccttcgtaaggttttagcctgtgttattcttattaaatgttctcagcatagcatgtatataaatatatatattttcatattggctatgtaaaaattcagattctcgtctgtgcattgtttctgggtacaaccatactcaaaagaaaatttttcatcatgtggtacatacattaataagaatttgttggtacaaatcatataatttatattattgttttccatgttaaatgttattgtagaatttagctcagagacaagccagcattaaccgttttgcttatacgtgtccataaataattttccttttgtgataagtttaattcaagatcagtcaccatccttttatttgctttcagcatttttatcatgttcttacatgtatgaggcgtccacaagggagaggcttggagttggcgagaaaacatatagcctcctgcatatcagagttacaaagcatcctttcttcctcggaattccttcgatttagtgcttcaggagcttccgatgatggtttagaagataaaactactgcttctggttgtcaaccgattgggtttgatgctagtttaaattgtaggttggctgcccctacaccaccacgtgctattaaaattcttagctggaaagaggtaaggcttaaatagttgcttttacttctatgttgttttctttcttaacttctcatttttttaatgcaggctgtcaaatattttatgaaactttttcacgatcttgacattatatgttcgtattcattggacccatctttagacagtgtattgcactttgtggttcaatttcaaaaaactcaaccagatctagttgccaggtctcatctgcaggtcagattttgatgaacttttttctttcgtgttggacttcatggtgcaaaatttgtgctaaatttgaagtgactttatatttattttgaattgtaaacattgaacatttacaccatttcccctggtgcaaactttgtgctgaatttggctaaaaaaatgagccaatgcgatatttggcctaatttttgcaattgtactctaatgcatttggtgcaaattaacttaaaaagtcaacaaaatcatttaatacttattgaaagtaaagaaaaaaaatagtaaataagtaaataaaaagctaaaaagctttaaactaatataaacaatattaattagttgcaaagagtaaataaaaaaaaagtgatatttattgttaaatgtcaactgggattgtcatgtgtacacctttgtacacgtgacagtgaaacctcgaaaccaatgaatacatgacacgtatacgcaagtgtacacagtgacaatccaattggtatttaaactggtgcctcaactttgcaaagaaaagtgaagtttttgccacaaaataaaatattagggggttgtgtataaaattaaaacataagagggtttcgccgccaattactcatttttttcttctaaaacctttagtattattgtttagttctctaattattattattattttgctaaagtgttctgtaattgttataatcatagtttctcaatcccttttacttctgatcagcttcttctggttcaagatgcgaaactccatggtcgggatcctatctttgctgttattactagagctgcagcattgcctgaagctacaaagaaccatgatattcaaaaaaatgaattcgttatacaattgggacaggtgacaggcagtgaattttctgtctctcaaggtgaaagaatgttcttctaattcatgccactaaatctttgtaccaattgtgcagttagtgatcaatctcctcaaaattatttgtaccaatagtgcttggcaaaggcgtaagcttgggaagattatgcaagattggcgtgtaatatacttacaggtctgttctaatagagtttgcaaaattctatctcttgggatgttatttatatttggtttcatttttctgaaagtcattcaaattttcaggaaaagggagtattcatcttattgtgagcaacctttatcacttgttgttgttgttgttgttatttaattgttttttcctttagggtaacatatgaatttaaactaggagaaatttctatttattaaaaattagattcagtaagggtgctaaactatcataacaagaggctatttccattgctttggatttaagggggtgtctgggagtggggtgagaacaaaacgggagttacaatcctaagacgggtatgtgttctttgggttacagcggtataggatggtaagaaataattgtggattgcaaaaagcag

SEQ ID NO: 13906 - DNA, 1495 bp, Cannabis sativa
  modified_base (47)..(50): a, c, t, g, unknown or other
  modified_base (1431)..(1436): a, c, t, g, unknown or other
aattaaatataaattagaggtagatttggttaattgataaataaaannnntatttttcaatatacccctaaataaaaaataaaagcccattagagatagattaaggcccagagcttattctataagctcaaacaaatagataggtccaaatcaaaagcgtaaaacccattatgaaagcccacatatacacatagattaaaagcaggcccaaagttgatgattaatgtacgtagctcaattaaggcacaaaaagagcttatataattccacttaaacattaatctcacaatacagaaaaaagaaaggagatacaaataataatgcatgtgataattccttgaactacaactgaatgtgaaaaataacttttaatttctttggatgacaccccaatttcttcttcatcttcttgtaattaattaattcatcattaatagatgatattgatatttgatgatgatcatcatcatctaaacatagatgaaaatcttggaggaagaacttgagatttgggataacctgtacatatatagtggattttatgtttattaataatgaaaacctacaaataataatcaatacatagtataccttcttaaagaattatatcggtactctttatctctcttggataattttttagattttttctttttattttaaacactgtaaaacattcgaaattttctgaaaatttacaaataatcttaattaatacaacgtacttaattaaaaaaaattagactaaaaaatttggacgaaactggtatagtgttacaaccgaaatttgtacctttgatagggtctaggcctcttgatttgagctcagcattttcttgacacagagcacatgggtgacaaaagaagtgaacacaacaatcagagcaagggtgagctggtaatccatacttggctcgaagtttctctctatagaaacaactcagcaaccactgaaattggaacatatatagcaagcaatatccacatccaagacaacagcatgctatatatatttatgcattaattaattaattaattatctataatatataattaatgacattataatttgtacttacaatttgttccctcgtccacaatttcaccaactctcccaaaagtcacacatgggaagaggcaagtcacgcaacctaatcacaatgcgaattaagtaattaattaattgatctcgttatagcttaattatgtcattataattaagtgcatgagttcatagtaaacttaattacatgtacaaaaatcattgccacactcgcaaaggccatgagaccatgttggtttcgcaatattccgaaatatattcataactaattaatcttaattaattcacaataacatactatttatatttttttgtaagaacagaagaagaggtcatgtatatgctccatatatctttatatattaaannnnnntatctaacggcatttcttggtttaacagaatataccttaaaaataaaagaatattctgt

SEQ ID NO: 13907 - DNA, 8479 bp, Cannabis sativa
gccattaaagctcagactttaactttaaaaagttccaaacttgatttctaagtcacaatcacctcaaattcaacaagtaaacattgaaactagtcccatagctaccatagaaaaattctatgaaatcagaatctccgtaactactctaaatcacaaagtgactataaaaaagtaattgtttttaacttaaaacgaaaccaatccttacctcaagatttccctcttcaataatttactgtcccactactagcggagcttaaattactaggttttgaattaaaaatcgaaaaaaaaaaataaattaaaggaaaacaggatttcgttgtaccgaaaaaggaaagtttcgttcctatttatgttttaaaacataatataaataatcatatacatttttttaataaactttattattagtaataatataatattaatattaataaaaactttattattagtagttatcttatcgtttcttagccattaagaaatttttatttctaggacactaggtcaaattctatatactcctaattacttcaatacttacactgtcaacttatcataatattcccatcaaatctattaattaaacatgttatgatatttttagcgcctgatcgagtctcaaaggctgctaatcctataaatatttttatttcataaatagcttatattaaattcacacatgctatataattctccgtaattaataaattacgcttatttatccacttataacggatttaaaatttatactgaaacaaattagtaggatcataatctcacttattatctaattagccaataataaaaatataaaccctaatcatttaccattaggcttattgggatattacaatggtaatcagacctttgtgggagatttatgaagaactttcgctttttaggttaatgaacaagatctaggttcaaacttggtgatactctactacaaaatggaacaagctttagagtactgaacagaaggagatattatattctactaccattaatgtaagtaatcttaaattttaaggtgttatttgattgttttaagtatgtcatattttaggatgttagattatatattgcataatcaaataaacatgttagtaaattaagatcctagtaaaataagttcctacaggttggtgagctggactcacgtttggatctggaaccatagcgtgactttgccaatgggcgggattgctatcctgattggctcaagtttaggactaccttgactgaaattggactttagaattgtacatgtcatcactccgaaagcacgaataacaataataattctaaatatttgatgaaacgcaaatattattttaattaatattttttctaataaataaatattgtgaagagaatacaacatcttggtttattttttaacaaattactaattaatttttttttattataaaataaaaagaaataaaaaagaaatgggtgggtcgggtcaggtcaggtggcccaccctggttcaagagagcttacgggctaagtcgggtcaacttgttaatgggtcgagccgggtcaacatgtcatcactccgaaaacatagataacaataataatccaaatatttgatgaaatgcaaatattattttatttagtattttttccaataaattaatattgtgaagagaatataacattttggtaattaatcttttttctataaaaaaaatgaaaaaaagaaaaaagaaatggatgggtcgggtcgggtggcctacccttagttcaagagagcttacgggttagaccagatcaagtcaacttgttaatgggtcgggccgggttggggttggaccgtcccatttgccatttctagacaagatgtagtgattttgatggcctattacaacaaataagaaactatttggctgctaattgtgtattggaattaagttttatttataaataagcaaattatgtatagcttatgttttattcaattatactttggttaaacaagcaaatgtattgtagattgggatttgttttcctagtgctagtcatatgctatttgtaattgttgttgaatgtatgaattttatttcaaataaataaataaataatacaacaaaataaataagagcggtgctctttaagatggagtatttgtaggaattccactcctacgataacaacaacaacaacaaaaaaaaaaaaaaagccaactccactttccgcctcaaacatatcccggctctaaatatttatatatatgtatgtaaaatatttgaagctcaaataaacttatcccatttttttatatgttgttttcggttttgctgaaatgaaaatagtagttggagtagcagtaatattgttagttttgttgggcaccattaataatgtagtggtagcaaaaataaagaagaacaatatcgagttagagtattcatactcagccagtataagttgcagatcccagagtgtgtcgttggctgattttggaggagttggggatggaacgacatcaaacaccaaggcgtttcagtctgcaatcaattatctgagtcgtttctcttcacaatccaaaggagggtcccttctctatgtcccacctggaaaatggttgaccggcagcttcaatctccccagccacttcactcttttccttcataaaaatgctcttctactcgcttctcaggtccataatttacataaacattttatcaaaacaaaagtctttttttaacttggtttgtataaagaaattttgcatcaaaacccctttatgaaattatacaaactgaatgaaatctccaatctttttgttgaaacttgtcaataatacctgaattgatgatatttatgtttaggatgagaatgaatggccactgcttgaacctttaccatcatatggtttaagagggaattcaacaggtggaagatttagtagtcttatctttggaaccaatcttactgatgttataattacaggtaatggtaatagtaatactactattttttttttcttttttatcatagaaaatgttcagcatataagaacccttttctttttctttcatattactaaatgtttatgtcaattatatcaggagacaatggcactattcatggtcaaggtgaatcgtggtggaaaaaataccgtgctggagagcttaagcatgagaggcctttcctgatcgaactcttgttttctgagaatgttcaaatatctaatctcactttgattgattctccaaattggaacatacatcctgtttattgcaacaatgttattattcaaggcatcacaatccttgctcctgtaacatctctaaacactgatggtatcaatcctggtaaggatcatttgctctgtggaaagtctttaccatttttttttcttttcataactgaatttatattatgtgaaatgttttttttttttttttcttttctgttttgttttttagactcttgtaccaataccagaattgaggattgttatattgtctctggagatgattgtgtggcaatcaagagtggtttggacaaggccggcattgcttttggtatgccaaccaaacacctcataatcagacacctcacctgcatatctccgaccagtgctgtgattggtcttggtagcgagatgtctggtggaattcaggacgtgagggcggaggacattgtcgccatcaattcagagtcgggagttcggatcaaaacaggcataggaagaggagggtttgttaaggacatctatgtaagaaggatgagaatgaataccatgagatgggtgttttggatgacagggaaatataaccttcatgacagtagtggtggttatgatcctaatgctctccctgtgattagcaacattaattaccttgacatggttgctgagaatgtgacaatggcaggctccttggatggaatctcaggtgacccttttactggactatgcatctccaatgtcacaattggactggcaaggaaggcaaagaaactgcaatggaattgtacagatgttggtgggatttcaagtggtgtagttccaaagacctgtcagctactaaaggaccagggctcagagaagagagcagcttgtgatttcccacaagatatcttacctattgatgatgttaaactcaagaattgttatttcaaggcctagtgttttttgtcaatatcatcttgaagcaaggataaaccaagtagtcaaaataataataaaaagaaattacatgttatcttgttttaaatgacatttagcatcaaaacaatgttgtcacaatagcagtttaaggaaaaagcattggttatattacattaccacatcaataaaaaagaatcaaatattttgagttagaaagtttaaaactataaaagataccaaatatctcaccataagaacaagtgtaaaatcttatagcataaagaaataaaaacatactttcatattaatatactggttttatttgatctttgaaagaacaaatacccttctgagggcaaatgcaacatcacaatcattagtccaaagttttatgttatatgtcactggaagttggcaatatttcttgtccctttgaactctgctttggagccttaatagcccatagcctcacacaagaaccaattaaaaccaaacatgaccatccattggagattgctgatattcagtcaacactaaaccggctcagctcattgcacattttagttcttagttgacttcaatttaagacaaacaatctctagagctattcctatcatccaggaacaatataccatgtacagggtcaaggtttttcaccatataattctacaccattaagcaaagcatgataatttttaataggccgggtctgggttgaacttcactgattccctccagatgagctctttaatgtgatcttcactgcacgatggatgctcgaaatcaaaactaaaaggcctagggcagacaggctcatcacccatatcgtgaagggatgccaagtatggatgacaaagtgcctcttcaactgtgaatggtgaattcaaaaacagttagttgcattatgaaaacaaatgtgaactttaatatactaatttgggactgatgatgttgaacatgtgaaattttgtaccagtaatgcgtttagtgggatcaaagaccagcattttctcgagcagatccatagccccaggagacatgttagggaatttagcagcgaattgttgcttccggcattgtggaaattgtttcatgtatcttcgagcattatcgcttcggagaaatccaaggctagcatcatcaggtgagcctattaacttttcacaaaaaaaaaatagcagaaaatgtcattacatcatctaactatagaaaacacatcttcgtataaagaacaagcagtactcactataagaaaactgcgttcaagaagatatactatatcaaaggaggctaagaacaaaggaagctcttaactttcaaccatgaaagacaatcacatatgccacaaaaaaaatcttcatataaataagtagtacctctaagatgagccttagctgatgaacataatctttcccagggaacaaaggttctctggtcataatttcaccaaggatgcaaccaacagaccatatatcaattgcagctgtgtactctgaacagttaagaagcaattctggtgctcggtaccaacgagtaacaacatactcagtcatgaaatccgcctcagatgtagtccttgccaatccaaagtctccaattttaaggtcacagttagaatttagaagcaaattactgggcttaagatcacggtgcaacacattggctgagtgaacatatttcagtccacgtaacagctgatacagaaagtactgcaaaggttgtacagaatgtcaatgttatgcacaacaggaaattcaaagcacagcaaatgttgcaatttaattagaaacaaaacatatgttgaacatagaacaggacatttttagtaatatactcttagcactagagaaagtactcgaaaaggaaaattaactcatccattcccttcgtatctgagcactactgagatatggggccaacaggaagcaatcaggattgcaactctattaactatgcaatgatgaaatgctgttattagatatattaaagattcaaggacctacaaaccttatgtttataggagaaagtgaaagaaaaggaaaaaaaaatgtgcctttatctgtcttctacatttatcttcttgtcaagaagcaaagtagttgtaaaggtccatcaattgacattgtgaacacaaacatcactaaagtcttacagattagttattatcagaacagattagcagagaatcatcaataaataatcagggtgcagtataaacttaaatcatattaacctgacagtgatcatcagttagttgttggtcagagcgaatgatctgatgaagatcagtatccatcaattcgtaaacaatatacacatcattgaaggtctccttctttggtggccgtatgatgtccttaatagcaataacctgaggcatggaataagaagatcaatagttacagcagaaatagcaagcaaatgcaatgagaatacccatgtcaatgaaacttatcctgcaatatgattatcaacatgagtccctattgactccatgacgaaaagaggaaacatttgttaaccatatacattaatacatatatattttcctaaagaattcaatttgttagattaaagtaaaatagaaaaagaaacatgatgagacatttaagggactctatcattgtaagttttttagttgggttatctcaaatacttaaaacaagatgtttcactacatggtaaaacgcaacaagagatcaacaaagatttttccccgaatggaaaggataagaaaaataattataaagaaaagttgattcatgtaaattaagaaagtggttaagagcctaaaaagcagctctaagtaatcttaacaactcttacttacattttcatggtccatgtggcgaagaagcttgatctctctcaatgtccttttggcatctattctattgtcaaatgcattaccaatcttcttaatggctacctcctcatgtgtgtctgaattgacagcagcactaaaaagaaaacaatcatattaccactcctctatttatcaaattagtaacttaaaagggaaaaagtaagtgaaaaacgaaaaacatatctttcccaatttagttgaaccagctccataggagcagataataagaaagagcctaaaaggaagccgcaaacatcaacttcccaacgagcaaaataactcagctttataaaaagtttaaattctttaaatccaaataaagagaaagcctctcagtcattctataaaatttatatcaacaaatctaacaaaagaaaaagccccatgctggcatgtttgctgaataaaattcttacagaagagtcaactcgtttttgcatcaaatctaattactgttcacataacaaaacagagacttgatgataaaggaaacatctatagtatcttattaatgttacccgaatcataaaaaacaacataaagtttcatactaaaaactcagggtcaaatacatactattctctaaaaccattgacactcaaccaaatttgaatcttatgaaacaactccccagagattgagtgaagataaataaaataataaccccagggaaatacacacgaaaccaagaaagaaaaaagctcaaaaatattaacttgtgatggaataaacttaccaaacaatgccataagcacctctaccgatagggcgaataggaggaacgtacttgcttgaaacctcaaacaagttaccatacacattatactgaacgtatcgaccaccatgggtgaggacgcctttgattttagtctcatttggagaagcagaactcgactctttggtagccatagagaaaagaaagaagcccaacaaaaaaaaatgggtgttttggaggtttgagaaacgttggtgtatagggggatttgaaaaaggtggagctaagtgatcaaagaaagttagctgagagttgggtgtggtacttagcagcagagcatggtaagtaaagtaaagtaacgtaatagagactagttgaagataaccattaatgggtttcgtgtgaagttgaagaagaagctgtggacgccatgagacttggtccttctctttttaccaaaagcttttttcatctgaaaacacctctaaaacccgtgaaatgaagcagacttctctttcttttcattcaaatctttatttaataatattaattaattaaacattaatataataaatatgaaatgaagcttatttgacttggcattgggaataccgttatgtcaatcaacttttctaccaactgtctagagccaataggtctttcatttcactatgagtagttttttttttctttattttttttaagatttgatcatacaaaaatagcatttatctaacaaaaatttcagcatgtatgcttaaaactt

SEQ ID NO: 13908 - DNA, 919 bp, Cannabis sativa
gggatgtcaatccctgcaataaatacttcagatagaaccatttagatgattaagcccgagagatggagcattggagagtcaaatgagacctggtttttcgacatggtataatgctgttaatatatttgtgtccgattatgcttgtagcctaaagcatgcatggctttgcctaaatagaatgcggagcagcactgaggtggggacaaattttttctgttattttttcctttctgaagttgttaattgaaacggctaacaaatcagtatcagacttaattctgcaaaaatagatgaccctgtgtacattacagctattcaaccatattttatattataattgctaaataaattatggcaattaccttgtagagaacaaccagatatgatttgttgggaggcgccagtttctacaaaaagcaattatatcaggagttgagtaaaacttcggcttcccattgcccagttctgtcacagctgtcacaacaactgctccgaaaaaagaaaggaaaaagtgcaaattaagctaaagaactgaagaatgtttcacattaaaataagtttcatgcacaattcagcaaaaattactatgttacgaactcaacatatgagaaaatcacagtaccatagtcttctcgagggcgctgtccatggtcacctagaacagcagtaaccagttccattgatatgcacatgcggttcctctaaagaaaaaccaatattatcattgggttttggagagtattaaaaaatagtgattaaaaaaaaacaggaaaaagaattggtacacaaaatgtgagcagctggacatgtacactagcaaatcagctcacaaagcaactttcaaaacaaaccgacaaataatttactaaaagaatagaaacaactgatggatacaacagtgcaactacaaagaaaaaat

SEQ ID NO: 13909 - DNA, 3734 bp, Cannabis sativa
  modified_base (3197)..(3204): a, c, t, g, unknown or other
aagagttataataaagacagatactctacccatctctaacgtcttcaaagacattgttgatatatgctgaatttccctgactgtttaaccagaatcgaaatgctctctcttctcttgagatttggctgtcatctggcaaagtttcaagaaatgatatctgttttgtttggcttgagagaccattcctacaggtgaatgaagaacacacaataagcctttttaagtgaaaaatgcagaataagtcacattacatacatttctcagtgagagtgagaaagaaaaagattatcacctatgctggaaaatatgcgcgacgaaagccaagttaagattcggtgaaccttcaacaatgtctttagcagttaagtatctcttgcaacccatcctatcggcgtgtgcaagaactaactttgctctttcaaaggggtcttttgcagccaatgcagatggtttactatgctcgggtgcaagaacatttaagaggtgagcataagcctcggcatcctgcagtgagttttgattccaaagatttcaaatataagctaggaggactagtgtagcacatgcctacagcttcaacttatgattttgtaccttgacatcagtagagaagtttgtgacaatttttctgtactctgatttcttcaattgaaaattcatccacctcaacaatatcttctctggtggtagactcattaactcttccacatcctaattaattggaacattagaagaatatagtatcagaaaagagaagttgttggcataagaacctgaaatctattcctaaaggaaccaaaaacaagaaactcagtgcaatagtacactttttacctgactatcatcaaccaactctactaattgaggtgttttcttcaagttgaggtctgccaataattgaatctacacaacaaaagaaaacaaatacaaggtcaacaattgttttgaattcaccacaaagtaatgttgagaataataaagtcagtattcatgaaaaatcttaccttgattatctgggaaatcactccaagaaccagatgacgctgaagacaaaagaaagaggtcattaacatattgattagcaaaactaaaaagattgaatatgtatttgtctggtgtttgtatacaacaattgtacatacccttccttcaatgaaatcctgagtcccaatattgacaacagtgcatccaatagccttagcagagttgagacagagtgtatgattctcatttctttcccaaggattgagtactctcttagtgttgatagctctttcatcaattgttcccggaacagccacattgatcaacttactgcaaaaccaaacagaatgattttctacaatcaaatctacatcctgaaaacaattgaactgtaatcaaaacagaaagatcatcattaaacacaagatgatcaccataaaagtactccatccttaacgatctcgaatagatcgttcgtagaaggatcaagaggaaggtatctctttaaaaagtcatcttctgatagataattattgatatgagcaacataagatgccttttctgattcactgattgtatgaagcaaagtagtggtagcagctttgagaaatgcagaggagtttttagcagcactgccaccagttcttgcactagcgtggccattaagtttcaaataaacctgtcaatgtcaatccatatatacttccttaactcaaaaattctgaaatggaatcaatcaacccttttcaatatagtccaagattgatcaaaaagctatgaaatttactgtcacaaaatcggatcatattaattaactctgattttaacttctaagcgttttgatctagaggataacagatcagtttgaaagtgctaacaatatcccattaatgaattgaaaatagagtcaatgaaagagtgaaactgaccctgagaaagaactcaaaatcaacatcatcatcaagattatcgtgataattttggataagagaagctctttcttcctctgtcaaattctctcccacaactttcaaactcgacatccttgaagccaggtcaccaaccgtaagcctaccactctctctcctcatgctagtaaacttaaatcaccaaaacaaaacagagcatcagatctttaaaccaaaatataaactctttcataagaagaacaataaggggcaatgacttacgtgagatttcaagctacgaagctcaacttgggtgaattggttttgaagccatggatctgaaacaagaatgcccacgtagcctgacatcataaaagctcaagaactcacttgcccagataaagattttcacttcttcttcttcttctttaataagaagaagaaaaagattgaagctttgaactctggggtgttgtgtagtatctgtatctatggcttttatgagttaatatttttgaatgaattaagtttgagaagaactaaaaaggaggagtagtagtgtacagtagtagctaggaggaaaagagagagaggagggccaacacagttgggacggtgtagagctgtcagtgttcaaagttgttcacttgataaggaattcaaattatgagtgttaccatcatcttcactttctctctccttcttcttcttcttcttcactttctctctctaacaaagtaataacacagtaaacttgaaagagagaagagtttggctaccaattgggcctgggcccacaattatcttagtagagaattcaaattatgacccttgtgtccctagctactgtggtttggccgttagaaaatttcttctttaaaataaataaaatatgctccttcttattattatttgtttaaatattattttaaatttgtatcttgtaaaaattattgattgaactatttattttgttaaatgataaattggaccttatatttttcaaaataatattaaatagtaccctaactgattttttgtcaaaaaaaaaacttaataataactcgatctaaatgtattatgacaaaactggttacattttctacatctctttgtgctagaaaatatctttaaattaattatattaaaaaaaattattaaaaattgagctcaatgtgctatttatactatttagtattttggaaaatatatggtcaattttatcatttaataaaattgaaagtttaatgagtaacttttacaaaatacaaaatctaaaatggtattaattattattattattannnnnnnnattattattattattaaataaaatgtttattcattaaacataaaactagatttcatggtctttacaaaatacgttcatatgaatggagggaaaatctaacataccaaaatagttgtgggaataagctcaccttagggcaacaaaattatttaagtaaatactattttatagcctatattttataaatattattgacagaagttttgttaaataataatttagagtttttattttttttaaatattatagtatacaataatattatgaacttaattttttattaaaatagaacataacaataagttgatctaaggtgttggttactttgtatttattcttgctaaattacaagatttgaattataatttaacaaaatagtttatccaattaataattttttttaaaaaaaaataagatctaaaatgaaatttacttttctatctaaataaagaatattgctaaaaatatattttgggcactcttttcctttttgagatttctcccattaagtttactgaagaggctttaat

SEQ ID NO: 13910 - DNA, 10669 bp, Cannabis sativa
ataaaataaaaaaatcgtaaaaatatttaaaattctgtgaaactttatttttgtaattttttttattatttttatgtttttgtgaaataatctcttatttttagcaacataagtacttaatgtttgtaaaactataattttcttccagtttcgtcaatacactctgttttgaatttattaaaagaacatttggaagtaactgatattacatatttctatgtgtcctgtttaagacaatgacagagtctgacaaaattaaacaaaaaaatacaattttacaaacattaggtaaacaaaaactcgtccattaatagttgaacaagtaatattcctaccgaacgaattatatagctagagaaactaaaaaaaataagtgtaaaaacattaggaatactacaaattttgtggacgaataagcgggaaaaaaagtgtttaacgaagatagagaccaaaagcttttaaattccaattgtctcaactacatcaaagcccctatttctaggactttgctttaacgaaatcaaatagaaaagataaaattacatgaaaagctataaatagcacaagcataaaatggcacattagtctgatgcaataaaataatgcaaaagggcattatcaggagcccagccaaaacttgaattaggcagatatttcacaaaattaatataactaaattacctaaaagaattatcacaaccatgtacaacaggatattttaagatttcccctgtctccactaaggctagaagacccaaaacaaagtgaagaacctagtaagtaatacagcacgtgcaagattacattttctgattaattatggttaaaatgggagtacaactttgtgacaggaaggggggaaaaagggtacatcaccacaaagctaaacacacctttcaacgtgaaggggcaaatctcttttaaactcacctagatgatagtgagttacggcaggcaagcaagcaatcaaatgtttatggccctttccttttcttggtaagaaacccaaaccgaaaccccaggaaatctgatgttgcatctaatcacaataaataaataatctcctcctttcatgctatgctgatatgggttcataaggataagataaccatggatgtttcaaagcctccaatgcagatggacgcttcttcggatttacctcaagcagatgagcaacaaattcaatgaagccttgatcccccatcggaagtcgatgcctcaaggatgtcttttttggtatcaagtattccagcctactcgtttcctgaataatatacatggatacatcacttttcatcatttctcaaagaatatacaagataaaactaaaaataaaaatgccatgtatctatgctccacttcctggcttcattttgacctagtactttgactgctaaacctgacaaaatagttatttaaagataatgcatgccaatctacgccccatgtatttgctacaatttggagactccaaattgttgcttctcaccaatatcaatataatgaaacagttgaaagttttatatttcatactaatacaatagaaataaagctggaatactaaatgtcttaatgaaagaaaaaggaaattaaagagtatgaatatgataatgatattacctgattccgttcataaagcatgtgatttttggtaaaatatttgtatgtgtctcgacctttcactaacatgccttgttcaatggggcctatgattcccatcacccgtgccagtaacgtagcaggtgaatcattttggaataacacctatagaaaaagcaactttatcatcacaagctccagcgacaaaagaaatatgcatcttaaccatataatcgcacaaaaccatcatgaacatgcacaaattacataaagaacccaagtatgttgttgcataagacaaggtgattagttctcgtaaggattaatacaagtccaacaacccatacaccataaaatttaggtaattgaaggaaataaatagccaaggaattgatttagattaatttgaggttaggatgcaagtttgttctgtcaactggaaattcacctcccaataaaaaaaaaatgttttttttttttaaaaaaaaaaataagcaccagtaatccaaaaatgctatatcgataacattttagtttccttcctatccaaataattgctattatagccctattttcatatgctgaacacagatagaatacacatgcatgataaaagctttatagttataataatagtatgatgaggaagaaaacacctacattgccagtacaaagttctgccaagatgcagccaagtgaccagatatcaatcttcttatcatatgaaagacccaatataacctccggagcccgataggacctagattgaacatatgagcagagatgatccgtctcgaaacaactactcccaagatcaatgacctttacctcacatctactgtagcttttcaccaatatattctcaggttttaagtcacaatgtattaggccaagaccatgcaaaaattgaagagcctctaaacactgtatagtaattgactgcagagacagtgtttgcaaggttagtaaccagcaaagccaaaagttaaaagctaacatcaagaaaagcagggcctttgacacacctgcaatcttggcattgtaaagtaaacttcccctcctgattctctattaaacttatgaaactcatacaaatttgccttcagaagttcacatactattagcaaatgttcctgcaaagaaacacaagtttgcacacaactgagtgcttcatcaagcaaaaaagattcatatcacggtccatacagatttcatgtgttttttcttctgaaaggaaacacaataaaaccatatgaatgtaaaaggagatgagaaaaaataagaagacaagcgagcttgttaaattacaattatataaaaaaaatccctagaggtaggtagaagtacataaaatgagtacacaaaacatggaaattcttaatttaaacttttgaaaggctgaacaataacaaatcgattaaacaatttctgttatgaaaattataaattttgtagaacttgcagcaaaaatgtagagtgaatgaatgttagttcgttactctaacaaatatgattggaaagtgtcttcacaacattaattgaacttaaatcataaatactgtatacaaaaaagaaaaacttcggaactataaaatcagcatataatgaaaattattgaaaatgcaagtcaacgagagttaaaggtcataggaggatatcacaaaacacaaattgtaatagttgaaaattataatcatattcgtaataataataaactattctagttgtccgcctaaatttgtgctactgctgtttttagtttgggtttttggcctgtgttacagcaaggttccctttgtatttttcatcataaataatcaaagtttagtttctatttcaaaaaaggaaatcaaccaggtttcatcttcataagagtgcagccctaaatagaagaataccactcaagtagtagttaaaaacagggtaacaagttgtttaagctaccaaaaaatatttagaacaaattatgtactgcaaaacaaaagcaacataaataaacagaaaaccaatgctaaactgataatataatatcatcaaattggaaatgtcgacaacatagtttgaaatataaacaagttggaaggtgataacatagctttggagacaatatatgagctacagtcctacaagaataatagggcttcagggtctaaaattatgtatagcataaatggccagtagacaaaagatttagttaaatctggtattatgtggaagggtgagattttaactattttagaagattttgtcagagaaaacggtcacttttattaatacgtaggtaccactcccacttatgttctcctctgaaggggagaaaaagtttagtcattcttagaagcaaatgtgatggggagcaagtccaaaataaaactgatgtgcaatgttcgaatcaagagaagtaataaccatttatatccatatatggaactacttttctttcatgtgacaccacaaaaataaagtagaaacatttacttactcggtaataaaagtagtcatacaatcggaggaggtggtatttatctgcaggatcgtgtttgttgacatacttaagtagctttatctcatcaaggctttgatcaaagaagtccttgttgttctttataatcttcacacaaacgtccatgcctgtatgcaaatcatgtgcttgtatagctttactgaaagcggctgatcccaaatactcagtaacatgatagcgaccagctatcactgaatttaacaccacgtgaaagtttttatcctcctcaaatccagttctgattaacaaaacgtatagtccattagtcatagcaaatgaccataaaaaaataagttacaggaacgaagcagttttctttaacagcacgactatgaattataaatagattagagaaaagagaaatttttacaatagattcagatgaagacatactctgatagaattggattcaagctctcctcgtgggttccttatactatggagtttaatttacaatttggacgaaatctctaattttttatatttattttgtcttcgagaacagattattatcatagaattttcgtcctttaaatactctttcagactacagctctgagaacttggcaaaaaatcagttttttaagtagcaacatcaaactacatactttttccttttcttttcatcttatatatttatctaatattgataatagtactaaacgagattcttggaatcacaagtctaatgaactactaaaaacacagaaacagaagaggatactttcaagaataacatatcctgcaatgagttacttaggaccaccaattcagaaaaattacaagccacataggagccaataatttagaaaaaaaataacagaagtgcaagaaagctagttcttactgtctcaacaaactaagagcaataaaataaaacttacacagcaaaacctcagcaattacaacctcaagctttctatataaataataaattatatactttttatatcttaatatatatagaattatataaataaatattttcatacttgtcctttccaaaccctacatttgacaggtgaaaaactctagcaaatctatctcgggttctatatgattatagaaaacaccacaaacaatgctagacaagtatttcttactcaattcccaacagattagaatggccttttttaataataaacaatgcattgaaatcagcttgaaaggaaaccatgagatcttagttttgttgacattaacaagcggttttatggctttcaatgataaccttcaataaacacctatcatgtgatttcaccatattagcttaaaaagaaaccgtgagatcttagttttgttgacatcaacaagcggtttgatggatttctatttggatataaattttttccagtcataatgataaagcagaaatatttttcatcgaatgaccaagtgtgcacattgcttgcaaatttactatcaaggaaattttggagtgttgatttgaaggaaaacatgactttgttcacatttgcataaagagaggcacaaacagatataaaagcatagagaaaaaccagaaactttcaagtaaacaaaagcagtggtacccaaaggaaataatcggcccttgtaaagaacaaaacttcatcaaattatatttccaatgcatagcagttggagacatacctatttttcctgtggacaatcttaaggttgaaggtctcgaattcctcctcctgagccttaatttgccgtacttgctcttggacagcagctgcctcttcatcctcaagtgatgttgctgcatcttcctcccttgagatgccagctttttcatcatcttcttcctcagcatgctctctttcagcataagcataatttgagagtgttgagggagatgaattagtggacctaacagcagtagcattattgtcatcccgagaactcttggcaggtgaagaatcagtgcttttccgtttccatgacgagagcatttcatcggacctcattagctcattcaggcattcatcgttgtcatcaccagcagcagcattacaattgtttgaccacagagatttactagaacttgtcggcattaattgctcatctcttgatggtggaggaaatgagaatcccccgtctgtaagacttttcatctccataggcttttccttactattcccaactatatatttttttgactcttgtttactaattttctttttttcttttacgtgcttcatgttagaatcatgatgatgctttcttgatccaccaaatccaacatcatgatcttggaagtattctagatccccttcgctactacctccaaccaaactttccctaacttcactaccaatatctgcagcatcactgttaattcccacaccaattgatctaacagaaccatgctggtcctcttccatgcaaacatcatccagccgttgccttccactttcattaataaccttcccatcccccaacatgaccagctcatttgtctgagtcacaaaaccctgccagacaggttcggcacgcatcaaattcagttcttcttcatccatcagctgcccgtcatattgagctatcaaatcgttatcatcattcctcccatatagttctgtcaccgataatcctataggatcgtctgaagcagtagctggttcaacattttttgcttgaaagtactgctcaccagaaaagtaagaatcctcctcggcaaaagattgatcatcatcctcatcttttgttggacccctttcttgaggatctgggacacttgcatgcccagttcctttttcattgtcacttgggtagtcaatttcatgagccaaaaaccaggcttcatcctcaataggttgtctcatgtatcccacatcatcatcgtcatcatattcatcagagtcccagtactcatttggatagtcagaaccacttaaaccatcaccaatagtagcaaaaccagaaaccagatcagaagcatcttctgcaatcccctgacttactgacagccaactgcttccagcggtcctcctcccacctagtccaatattaaaaagtatcagcttaatccttggcatcatgataatccaaaaatatcagcttcatatacatatatagagattatgcataaatatagcatcataaaccctgatcacttgaaaataagtttgtgataggataagttggtccacaaattacaagtatcagaatctatttcaataccaattctgtatgaccttctgtatgtattaattatacacaaaaatagcatctataaaacctgtacattttaatacattatgagcggatggagggctacaacacgtccagtataaagtagcaacaagtacatcaaaagaaagatttaaatggttgtgtgagtgattttcaaataagaatatcaggccctaacttgtgtaaccacatcagacaatcagaacagttatgtatataaaataaaaataaaattgaaaaaaaaaacagtacaagtagtgtaagtaattggagaccaaacttgattataacaattcacagccaggctccaagttcatatcagtgactcatatggcaaaaggaatttaaatattcaaaaagtacattgtaataactggaataaaaaaaatcagggaaagtatggcctttttatttcaaaatattggaaagtatcagatcggtacttgactctaatataatgtttatagaactaatatgaaaaatagcaaataaacaaaagataacatgtttcactcaattatcaaaatacttttcaaggaaatcctagtacagaaatgcttccactaagccacaaagataggtttgcatacatagaaataagaagtaaaataaatgcctaaaaatgtacaattcaagaagagaaagcattacaacgaattgtcaaacaactacagaaatttcaaaatcaaaggaaaaaaggaggaagatgcaatatccagttcaaggtagaactaacctgcagagctaatttcctgcccgacaggtacatctagatatgatcctataagcaaagcgttctcagcactgctgagatttgtactaggtccatctctatcatatttttcctcccaattaacactcaataacttatcttctgagtctgacttaagtttgacaggcggcaaccttggaaaatcttctttatgattctcaggaaaaactaagctgctcatgacattgtgctcagaacttccttgcgactttcccaagtataaagccctccccacctcatccacctgctcctttattgccaccctaacgtcagttacttctgcttttctctttccttctttcttatcagagccagaaccgctatcattaccagttgaaaaatcacccttagagaatggaaaaacagttttaacagaacaatctttccacacgtcagatgatgaatttgcagcttcctcgccccttgaccgtagactatcagtaatattttccttagagtatgcaccggcaaccttatgttgctgatcaagttccttgggttcactcacactggttctgttgtacttaggttcctcaacaactttactggtacttcccacccaagaagttttcttttcactgtgaaaactgacatcttctccagatttcgcaatgccttttgcattaacagcagaatcctcaccagcgccatatggatttgcagtaccattgctagaactatacttccatgaatacaaatctagcacagtgtcctccggacctttataaaaagtaaagcccttgtcgctagttccagtagtttcatttgccttattccgctccccagtagaagaagaagcagtcttccatttgctttcagacccatttctaccagttccacactgaatctcttttactatgagttcctttgaaatgtcactggaattccgagaagacgtttgattttcagcaaccggtttgtccccattctctccatccaaagagttgccagaatccttgtcttcaagtgcaagtttctgaagaaaaccattcaaatcagggcgactaccaagctcactccgtaaagctgcctcagctctggtgaaccgatttcgccgcaggaagtcaagaatcaaatcgaaggaattcgtgtcactcattgtttaccaccaaaactgcaggcactcaaaagagaagcaccccgccaacctgagagagccaccaacaaaatctcatcctataaataataataataaattagaaagaaaaaaaagaaataactgacattcaatgctccattctctacgtatacaaaatgccccaagaataaacattaaattgaaaaaatcattgaatttattgcgtaaacttacctcgtactatgctacacccagcagcaacattttgtcttctaccgtcctgagcaatggaaagaaagatgaaacaacactcgagattcagaaacccaaatatagtttcatttcgtagacatttcctaatcaaccagagtaagcagaaaatggaattagaaaaacaaaatatgcatatgtacacacacaaaataaagtcctcaaaacttagacctaagttgtaaaaacggaaaatccaacaaaaagggcagccggcctagctcaaagaccaaaactagaatattcccaaaatggatccagcatcaaaacccaaatttcaatacccatatcccaaattaataaataaataacaacctcaatcttaaccccaatttcattcgagggtttccgaaagtaagaggattcgacgaacaccgaaaaggaaaaacaagtttatctcccaatgcacatacagaatcaagatctgaagactcctccactaaatatttttgaatttagaaagtgattatgggttgtaaagaggatcaaaacatagggtccatcacaatatgaaattaaaaaaaatatatatatataaaaaaatagatgaagccaaacctggtgagtggggtctgctgaatttatatattgttgtgtatgtaaataatacagatatatatagatatattagtttatatatatagatgaatatgtatgagtatgaggggtctcctttccttgtctctcgttagttttgtgagtgtctgtgtgaggcttttttttatttttagggtggaaagaagagaaatggtggtggatggagccaagcttaagggattttggacataaacaacataataagttaatgcaataatacatctaaatatttttgcacttatgtacaactttacccttccctctcccgctcctcaaattaatatcactctttttaaaaccattttactgcttctcttagtacacactactttttctcctctccctttttttatcacattattaagaataataaaaaaaaattgccatataatcttatacttttactttgctagcaattaattctaaaatcaaaattttaatggcaaaatactcaaacttgtattgtgttaacatttagttttttccatctatttttgacggttaatatatgttggattgtccacatatacatagggtttgtccacgtagtttacacatgacacaatttatttaaaaataaaataaaatttaaaataaacaataacaaaattttttttttcttttttcttctttcctctctctctct

SEQ ID NO: 13911 - DNA, 4488 bp, Cannabis sativa
  modified_base (812)..(818): a, c, t, g, unknown or other
  modified_base (1374)..(1374): a, c, t, g, unknown or other
  modified_base (4457)..(4459): a, c, t, g, unknown or other
tggcagtaaatctagatcctggtaaaacataatccaacacatttactcaattaaggccacatcagttccaactaagctggaaagtccctatcttcacagatgtccgcacagggacttggggggcaaatgttatcccaatttttgcccacttgatagggcatgtctacatggccgctatcagtgccacgtggtagtacaactcaccaacaagaaggccaagtcatctactcaacactttaacttatagggagtcctgacactcaaacgggatgacgaatgacggaccaatcacgttaaggaggttggcctgccctatggccggccagcttctggacaacacaaggccggccagcctacatcttgcaggtgcatggccagccagaacttggcctggcaggactttggtgtacagcttcatgcgtggtcaacaagctagattacgaattgggccttaacaactcacgaaaatatagggaaaatatctatttttaaagggcattttagtcatgtgtattttgctaatttaatatgtaaatatctacttattttatctaaaacaagggtttaagctctcctatataaagagccttaactaaactctaaaacgctaagtctcaaacactaagccttatgctttaagtctgacaactcatctcatctctgtctctcacacgcccatcattgcttctctctaagcttgagatttgccatctttgattcccacattgtaaccctaagagagctatctcagatcccacctatagtgatctaaatagtattatctctcgatatcaatacaactaaaaggagannnnnnnattacccgctaactaagggggccgaacctctataaaattctgtattcttttactttctattcttattgtgtaacacgtggcaagcattagtattaatacgactccgctgttggttggccaaatctgagatctttatttcaaaaattaataaaaattttgattcgattaatctctattatatcaaaccaaacatgacatacatataatgttaatccttttatgttgtttaattagtagatagtgatggaaaaaattatatggacttacatataaacaaacatatgatacaatttaactttggataccaagtttaagaaggcaagacctctctgctctttctcgtcttgtgtctcggattcgtttgctcttttccaattttcctgaagcatctttgcattacttgcctcgtcagttcatcacggacgcccatggtcttgcaaaagaagccatcaggtcgagggaagaagcttaggaggaatttatctaattccttttctgctgcttggtttttcgtttggtgtttttgcagcttgctttctctcaaaaaaaaaaaaanaaaaagagaaaaagaaaaaatttagcttcaagaagctaatttgtattacacttttcatatttaagagtaattagtgaaagtaacttacaaattttaacgaaggttactttcaactaattatcactggtaggcacgttagtttatatatattgttcaatacgttttttttttttttttttggaaggaaatggtttaaatttgtagttgaatacgaacccgccatttttgtttttcgaattgtctaaaattaccgaaacaggaaatttatttttgattccctccaaatttccaatattcaaattaggcactataagtagcagtcgcattttattatggtcgctctgtcagggtaatttttattttcatggcggactgcgaacctccctcgttctctctgggctttgattttggtttcgaatcggagccccgtatacctgatcatcaggaacactccaatccccctcaaaaaccagctccagatccttctgctattgagccaagtacgcctctcgatgacgacgaagacgaattcggacctgaagtcgcggactcggatatcgacacccgaccatacccgcctcgggttttcaaacggctcaggcgaggaaaaccccagttggccataatgccgctgccgctttgtggcgatggagaggaagatatcgaggatttctcctcacaagaagatatcttacgaggtatatatctatacattcaatgcttgtacgtttagggtttgtttttttttttttactattattcctgataaatttggaggtattgtatatgcgaatctttacgctgttgttctttttaatattctcaagtttaagaacataaggaataactgtgtcagaagaaacttcataatatgtggctcaagattgattttctgcgatgtaatttagtgttgaatggtatggcagaactttgactcttctttttttcttttccttttcttggatttatgctaatgaatttcgttgaaatggtatcagggacactgagaatttgagcatttttttgaaaagatcaaatgatttgagagcattgttgctcttaatagaaagttctttgaatgtgaaattgttatctctagttgtgaattcttggtagaatattatataatcgaagttcggaagttcatgtcttgtaacgttaggtatgaatcgggtctttttgtttctcaatttgactctcctccacgatacctgaattatgtattgcctgtgtgtttgtattttaagttttattttttattttttttttattaaatgtttagcaaaaatgtgtgcagcagaagtaaatccatcagcaccacatcatggcatgtgtagtagttcaaagatccctttacatggacagtggaaaacaataaaaaacaagccagtttcaactgtaacagcttctgcaagcgtggaatcaggtcacaatgaaaaattgttttgggatgtaactgttagtcctcttcgaaagttccagttaattgattctgattcagacgatacttccacaagtgaagaagttataatcagggaaaatcacaaacaaaacactagccatcctaccactacaggggaacaaataagaaaagcttcaggtttaatgccccagggactggacttatggaaagatttctgtccagttaagagtgtttgtacacctgttttagatgagttatgtgaagaatacttccgctctttgcatgataagaaatcatgtaaaaaaatgggaaagactgcaaatggacaaatcattgaacagtccttaaatgtggttaatccccttctgcctgcacatcgttattttctccatcatgatcctagggttcggaagttagttcgcaatcgcttatttaatttctccccattaggtattgatgaggacagtgaaaatcaacagagtcgatcgtcatttattgattacatgtaaatacttctacctgtgttgctgcttgtgttctcttaggaaatttatcatgtgaactatgttgttataacttgtgcttggttacctgttcaggggacaatttggtagcagacaagctcccgaacgacaagcaactcaacatgctaatcttgggagttcaaagagaggaagaaacaaagtgaatgaagtcttccttggctctcgaggctctattaacctacctaaaggaaacacaacacaaagtagtactgctaagaagggttcaaataagcaaaatggtaagtctgtaaaacaaagtgctgggaaagtttttgatgcttctcaaaactgggtagatccaaatgaagggagcacatcacgaaaaactagtgttaagagaagctcaaagagaggacgaagtagagcacaatcatccaaccctggagaaggcctccataactgggtggatcctagaagcagtgctggcactagagaggattctggcaaaaggggtgttcaaccagttggtcaatctgttggtcattggtttacaggctcagatggacgaaaggtatgttaagctaagcatattgtttgcttgattttgttaggtggtgaattcattcttctgtctaataatttacatatcgttttacatgctgctatgtgattatgtacttggcctatattcgtctttgccttagtaaatttagtttgaatctaatgctggaatgtttatcatcaggtttatgtcaataaaaatgggcaagagctgacaggtcaaattgcttacaggcaatacaagaaggtagtttttcaaatgcactagtattattttggtgtttatctcattttagttttctctttatatgtttctgcaggatagaggagcaggctcgaataaatccaaaaggaaaataagttctagaaggaaaaaagcttgacagtgtaaaaaaacctgttggtccctaatcatcaattgtcttttttgcctttcccttgtttgtggtgggtttttgtccaaaatttaaatacttgattctaacctttgataattgtagagagttgatgaataaatcacgattttgccttttttggtgaagcatcggagaacctaacttgtgtttttattatcggcactatttggttattattgttgagaatcatggggttcnnnctcaaaaccaattggcaatgagtggagta

SEQ ID NO: 13912 - DNA, 1263 bp, Cannabis sativa
aaaaattttgtggcctagtggccagacgagttcaaagtctttcaaatccttgtagctacacaataagtataataattaacatggcattaggatgcaaatctgatgtctccacttggaataatttgtttcaaaaattaagaagccttctcaatcgcttcaatgcactccaatatagtggcattctgtgtcattttggttataagggcctcatgcaaatccttgttattttttaaaagggttgccgcaaacaaaacctgcagtataataagccatctaaacttattcaactaggattaaaattggctgctatacttgtcatctaatacagactattgaaagtgaaagagaagaaattctcactttatgaattacatgaaaaataaattgtgaggaacttacagcccatctagtaagattctgttgctggtctttgcttatttgtggtttgcttctgttgataaatctcttgagatcaaaagaaaaggcatgggtttgagattgtagctcaagttatgctaacaaaacaacaaagagagagaagaaaaaagaaatagaccccttaggcaagtgagggttatgacctgaagagtgaaaagatcagcagattgtccaatcactttatcatatttaaggccctctgctgcgagtccagccattgccaccactgccaacctagaaaagataatacagttaatccagctccagaactggtaattgataaaaaaagtataggcgtgtaactctagagaatggtagacttggattttttgttttggtttgtttcttttctcactttcttgctggtaattgtcttctcctactatgaattgtgtaactacatatttatatgaaatgatacctgtctagttccttggcatctagctgcccactgtatataagcttttcaagcctttcatcaatgagattgacatgttctttcccgatatctagagaataccccagaattggtaggcccagcaaataaccaactaaatcatcaaataactgtttttattaagaaacaaaaatgccttatccgagtgcaatacatatatagtgatagtactagtaagaataatttgttagtataaggaacttaacatgtggattgagatcatgcatatctttgttagacatatgaatttcaatgtgaattacctaaaaaatgagctgcttcatgtctagcaatcctctcttgataatctggaaagaaggttgagaagccattgatggcagcttgaagaagcctaaatattttgcagg

SEQ ID NO: 13913 - DNA, 9489 bp, Cannabis sativa
  modified_base (9404)..(9447): a, c, t, g, unknown or other
ccatcggacccgacccaaaaaaaacaaaactgaaaaattttagggtaccatcgggcaccccatcgggccttcacccctttcaactattttgacagggcatcaggcccccaatcggaccagcatcaaaccccatcgggccagacgaaaaaattgcaaaaactaggaaaaattcacaggcagcaaacattttaacacaaaaaacagcaaaataacaacaacaatccacagatcaagcatcaaaacaacattctaaactaaatataacaacaacaacaacaacaaacaagattacacaaacaaaaaaaaaattacccattgcctgtagaatgttgctccgtgtatgatgctccctccaaattttaaagaaaataggtagaatagcttgtagtgtagtatattatagtgatatgaagttaagaaaatgaatggagaatgagtgaagagaaaaaaaatgtatgggtgggtagtgtgggaggggagttcggcgggggaacattgaagaattgagaagaagagagaggggaaggggtaatgtaaatggagggtaaaattggatttacaaaaagtaatctcattttacaaattatgcatagtattagtttaggagaccaatttttaggtttattaagcatgaaatttcaaatttcccttctataataattcacattctatccaatctaattgtaattaaatccaactttttataattgaattggcttaaatgttacacccttaatttaaaacataacaatataaaatttaattacttatccaaaccaaataaaaatactacttagttttattaaatattaaattgtattagatttataaatatctcatctaatatccgattcaaaattatgttcaaacaaaaaaaaaaatatccgattcaaaattaacatataacttgattcaatcataattgaatatgcattatgtggccatcgattataattaaattgaattaatttatacccctaattaaatttatgtgggcagtctggtgaatacacctagagcttattattaccactttagccataaaactagtaactatgccttgacaagtagtgatgccagataagtcataagcaaaatacgtacacttttatttccacttttttctttttttttttttttctttactttgaagaatgaataataatgttacacaacatagaagaagaatccgtgaatccatcgtccacacaacatttttctactatgaattttcaatttacattatttacacaagaaataatttagaaagaaaaggtaaaaaggtcggctgccccagaagcagcaaattttgatgaatttttaatttatcgtttcttggatcaaacagtcagtagtagcatttcgattgttgaaagaaaataaacctgaaataccaattagatctgtccagactccatactaggggcaaccgcactaaaaacattttcaaaggcctacacagaaaatttgcacaacttcataacaagttcgtattcgctcagagaaaagagcaccttatcctgaaaaagaagacaaagaaaagaattaaacatcaacttgtgaatcctatcctatgaccataacattaaacaagtaaaaatgatacttgtgttgttacttccaccatcaactgaggtagatatggatggatctcacaataccaagcatgatccaaaataaccaaatccaaggccatcgaaaatttgtaataattaattgaagacactaaattcatacaatctcagcctaatgtatacttgagtattggacatgtttcttaaaaggaactcattctcatacgccagaagtgaagcattatatctggccagaaagggaaaattttagggttctctatgactatcatgccaagggatatctgaataatgtctagtgactcatgatgacaggtcccaataggcattagcccccttaaatagaagctggaaactgagttcaactaataggaatcctacgttaatcaacaatttgcaaacctacattaaaactctaacccacccacccttgtagcagatgtacagatatagcttacatgtcccacatcagaatctattgtgtaggctggatcaggtatcactatcagcataccataaactatacaacgcataatgctaagacaaaatttagaataataatgtaaattagaagtatcttaagttctcaccttcctcagagaaagcaaatacgccaccaagcatgtcatcattgtcgccatcttcttcacatttctccccatcacatggactgctgctgctatccacatcagtgacaacttcattagattcaggacagtcactctcagcagatgctttacaatagccctcttgaaaatactgttcaaaatctggtgaatcatgtactggtccctcatcaagactgttcatagtcaaatcagaacggttggaacttacgtttgaaccatcagtttgcccaccgccatcaaccgactgaacctcttttaatatagttctatcagcagacatcgagtcgtccgctaaagtagatagtccagttggaaaagtactatcctcaacatgagaaacatttgaagtagattgtctagaagagtatgaaactaaatctttgtttgtagaactttggttctgcaggcgcgaggagaatataaattttccattttttcccccactactttgaatggcagattgatgactcaatgaataagaatccccaaaaattcctgataaaaatgacaataaacaggaacttgaattagtagccccttagatggccaacaatgatatcagcatcacatactaatcttaccatctgagggttcaaacgatccagttgatgctaacttagcattagacataacagacatttccgaaaagttttccttagcttcgtgagaatctgcagaagaatgtgacccaacaaggcccctgcaaaaccagccagccattacacacaatattttagtaaactcacgagctgccacattcaaaaatagagaagctaggtcagtttgaaacaaaacacacttttgaagcatcgataaaaaagtaatgcatcattcaggaaagtgaaactgttggcaccacaagtaacaagttcccttgtgcatccaagacacttctataatggatgtaaaaacagaacttttgttttgacttttgaagttcttttgtactgttatagattgaagtatgttccataaaagaacttcaaaaaaaatactaatataataaaaaccaccaaataataaaaaacaagtcaaaagtacaagatcaaaagttaaagtcacaagcaatttgctattttaaatctctgcatatatgttaaaatgctagggtttcttagttaaaacttgaaaccctttattaccccaaatctactaagatcttctattgttaagctaaaaagttcaaaaacagtatcaaacctgtaaaaatttaagcctcccattactgatgtgcgtacctcaacaggcacctcacgtctcaccctaaatgcattttttaaatgaaaaaacaaaaacaaaaacaaaaacatgttttttttgaaaaaatacaaggacagagttccatcaaatcaaaccaaaacaaaaaataaaagtatacaagaatttactgtaaatgtaacatttacaaatggaaactccaatctcgatgtcatgctgagaaaggaataagtacaaagttcatgtcaccatgacaccataaagctagtctgtctcattaaacttatcaatcaaatattctgctatttctttctatctaataaacactaaaaacatttattactcacctcaaattgagaggtgccttgtgaacagagttagatgttctagagtctagatcgtagagcatggtttttttagttttgggtgagggtggggggaatggtagaacacgctaatatgtaaatgtaaaatgtttattagaaaatagtctgattgtttaaatatgaattttcctcaacgcagaacaacgagacataatacatgtcactaaatactgttctaacaaaaagaaactactgatagaagggttttacatgcagagtagaacaaatcagttacataaagtgcactgtgaaaattacctgtcaccccaattggactgcagcacaggaaaatgattaaaaacaggcaggagatcctttcgcttaatttcaacctcattaacaggaatcttttctatttcaatctctccaacagctaaatcatcagtaatgttattagcctccattgaactcatcgtaaagaaagatatctgcagttataagccacaggattacaacaaataaaagacaacaatgacataatgggtcacaaatttcaaattgaacacgtacctttgcattttgccagatcggtatccttccagagtttatttggacctcagcattagaaatatataaatgggacttttcatgaggttttaccaactccttatcccttgtatcattatcttcacaatcagaaacgtccatgaccatctccatagcttcttgtttcctacacgtaatcccagaaatacattcatctctttcgggccaatcagtccttcgacaaacatcccaccactgaacaggttcgactttcactctcagctcatcatcctgcatctgaagggaagaacccggcccacttcttgaagcagattcagtagactctccccccactgatggaagtaaattatactgaattacatgaccagaaggagcataaaccaacagacgctccaaagcattcaccttagcatggccaggttgcaaatcaggaggaacacaactatgaaaaaccgcagtcatggccccagaaggcaaaagcatctttcctgctgctgatgatgcagcattactaactgtattcagccaaccagagctgttgttttttattctgctaacaacagaaagggttacaggttgtggtggtggagaaaaagattgcttgttcacagtgaaagacgaactggaccaccagggtaaagacagggtaggtaaaagagtaggcccatcagcaggagaattatgtgcttgaagaacagtctcaccaccaaagggagaaagagcaaaaatatgggaggtccccctggatgtaataatagaaacccattggctatattgactaaaacaaatatcctgtatcacctgcatgacaagaacaatagaaaaaccctcagattaatcaacaacaaaaaaaaaacaattagaagacgttgaggacaggaacatacagcagatgtcatgcctcgatgaagcttgtaaaggtgcacatgagaagtactccagtcataattttgagtacctgaacccatgtgcgagcaggaaggcataattcgaaaaatgttgatattgttcccatgaattgaggccgtaacaagaagagtcccacttgggtcgaaacaaagagcagaaattggactagtgtgagctctaaactgtgaaacaatagcttttgatgtaaaatcttgcacgacaacctggaatggtatttgaataatcacacaaaaatcatttcttgaaacaaatcaacaggttggcaatattacctttctactttaaagctttaccactaaaaattaaattttccaaaaccatgagtatgtacttgtttctgtgtataaaaccaaaccaaacaaatcttttcttttcttgcatttgtgcagctcaaattatgattataatttcacgggtctcaataatcgttattatcttttataataactttctactttaaagttaacaagcccacaggttgacaatattaactttctactttaatgctctaccactaaaaattatactttccaaaactatgagtagctatttgtttctgtgtataaaaccaaacaaatcttttcttttcttgcatttgtgcaactcaaactattattacgattccatgggtctcaataatagttttcttttataataaagactaaccattccagcaatctctgattctgtcaaatgcccccgacctactttccaactacagtttgatggaacaggagagccagaaccgtcgggtacaagttcttgatagtatttagacaaagttttataacccatgtcacccaaatttaatatcccagcagctaattgcttactagattccttagcataccgagccatcaaacttccattgctgggtgatgttgatggactgacacctggtggagtaagactctgtggacttagccgtcccacatttgactgcagtgggttattcgaagcataagccaaccatcttggaccaacggccatgggtccataaccaatattagccacaaccattccttggactcccaactgtgggactgggaaagtgaggacactaaatttactctgaagagtgactggatcgaagcaatatatctggaagaaaatacacatacaaaaaaatgttgacaactcagccaagttccaatttgtcagaaagtaatcatctaaaagtaaacaagaagtccaatctaaatattccactttgttaaatgacagggaaccaatccaaaaggaacttactggatagtggatattaacaactgaaaaataacaatagtatcccataagattacaagccaaagcttacttgtgatgcaagaccaacagccactatttgtggactacatcggaccatatacacagttgagcgaaatctcaatacatggacgtaattgtgagacctcagtgagtaaaaccgaacagcagttggtgaataaacagggtgtccattttgatgttcactataaccatttctggccaacacatctctcccattttgcatcagacctgagctctgtgtttcatcgcatgcaacaaccaaaagtaaaggatgtgatgctgcgaatccttcatcactgttggattttgtaggccgaggctgcatctgcaaaaatgtaactggatcatcgcgtttcgaaacgagttcaccgacactggaggcattttccacatccaggacttgaaacccattggaatagccgagtaagagtacatgtttaatgaaagttggaccaagctctagtttgtcaacacaagcacacagcacctgttaggccgcaaaaaggtcaggcaatgctcgtgggtgaattgaaactaaatactacgcagcatgcacaaattaaattataaataaaagcttttcattgttcaaactcgcaaataatgaaggtgaaagagaattaagcattcaaatgaacccttatcattccaaaaaagccacatgtaagttatcatttccttccttaacaactacaatagttctaaattggctaatattccaggttgtacctcctcaacaataaaacttaatgctccaagcaatcaaaaatggaaaaatttttacccaaattattcgcaatcaactgcatcacccctaaaccatcactctacactatcaaataaaatgcaacggtcaaaatccttcatttcactttctattcttaattgctcaatagccaaaataattaaactagagaaacatccgttcccgaaaactaaaaagttattgcctctacattccactcagttttcctctcttaaaatttaatcagcatccacccaatacacgataagattcaaccgcaaaagaaaatccaaacaacatcaaacctagaattcgcgatttcgattttccatcgtgtccctcaactttctccgtaaccaaacacagagaatatacatatcccaaatccagggaaaagaaacctaattccaaattaatgaaaatcaaaaattgaaataaaaaaaaaatatctatacattcaaatatagtaatatatatatagtaccaaaaagagattttaatggtagaaattaaaaataagaacctggtctttatgggcgttggggtcgccggatatagaagcagcgacggaggcgctggccgaacgaacgccagaagatgcggtcttaatacaagaagaaatgaatttcaaagaattgggaagaaagccattgctggaattggagttattattagccttgttatggttattcttcatagtcagatagtaagaccttgtttaagttaaccagcaacctgtaagttaccgggagaatggtccccgtcgaccaagcgatcggaaatagcataagaatccggcgaagaaattgaggcaaaaagagaaaaagactaaaacgacgtcgttttgtggggagttggtcgtggtggttgttgttgttgatgacgaagacgacgatgatgatggctttgtgagttttgaccttaacacggacagagagaaagaaaagaaaagaaaagagaaaagagaagagagaagagagagaaagaaagacggttggcttgtgtttgagatggaaaaatacaattgagttaattgcactctaagctgtaagcaacttttggaaatctcaaactcaccctctcttgcctcttcttcagttttcgtttcatgtcttcttttccaatctattcaaacgttaccgttttgacttccaatcccttccacttatacctttacttgtatgccctccgcacgactctatctatatagtttattccataagcaacacgttccaactacacaacataaatgattttaaaatgagttaatatgtctcacgaaattgtggtatttatataatatttatgtggtctttggttagagtaataaaatggaatagaacttgggaaacttttttattccattttttgttgttaggttgcattttaaagtattgaaatattattctagtggaatggtctttttttcattttggtggaatgattattctattttaaaatagaaggaaatatcattctaataaaagatttgaaaaaatttaataattttttttatgcattttattgatcgagattttcggcaaccagatatataatgtaataatgatagcttagggagagttaatacatatatttttacgtagttcgggcattaatgagtcgtagtccacgagtctcttctattaataggtgggtgtttctttacaaagaatattttttgtgttctgtttcccatcccctcattaattttgttgaggggtatttatagtgattcgtaggaagaagaaaggtcttaattatctttaagtgtcatctatgggcacgcacaagttcccaaatgtatgaaatagggcattcacaacctacgtaggctgtctaggttttaggtgagattagctttcatcccttcttgattgatgtgattcttcataatggagctgtcacttgcaccattgattatcgtgtaatcgctagaagacgggtttatgacgtctgacacgtcctcttatggatgtttcctgacgcttcccccatactgcattaaatgcaagatgaccattcatttttagtttcgctaatccgaaggggttcatacgcccttcacctcccggaaaggaagcagggctactttgttgggttttatgccctnnnnnnnnnnnnnnnnnnnnnnnnnnnnnnnnnnnnnnnnnnnngatcagaaataacatttaaagttgcatggttcacatgattta

SEQ ID NO: 13914 - DNA, 2408 bp, Cannabis sativa
cccccacccaactcaatgccataataattagagcgcataaaaagttacattaggaagaaaagtgtgaaggaccaatctttctgcatatgtcatctcagcaagctagactgagcaaccaaaaaagggaagttaggtcagattcaatgattttgtacaaaaccttgaaccataatccacatgaatttctaacctctacattaaaacatttttagaatgttctagtacctttttagaaactttgagccttcaaattcttccaattgacaatcttttggttgccaccgcagtttctcataagcaaaatctgtacgttgtgtcatccggcaagcccacatccctgacagccattgcttacagccgaaccctgaatataaagaccggttgtggtctacaacccattttccatttccataattgcaggctaacataacaaacaatagacatcactcagcaatataacaaggacgaaaataaaggtttctagtcactcttaacattcattgaccaccactatgtgcatccaaataaaccagaaacacgaaccatgacacagaagaaaaagcatcactaagacataaaaatatgtaggactgatcagtgatttcattttctggattttttttaaaaaataatgttatctagtttatgtccaaatggcaaatcaataacaccactagcaaaatgacccaattatttaaaactaaacaaaaatgattgccttagacaaaatcaagctagctagattgacacgttaatgtaagcacacaaaattaaaagacacatttggaactagtatttgataaaataaagtgggaacaacaacatacaaaataaagtaataataaagagagaaaaagatggaaggagaaacttcaaatgctctccattctttcccccaaataaatttgtaggtgtggagcctatcagtgaaacagggtccgtggttacaaagaactatctatttaagattttatgccgagaaagcaaaaggtcaatatattacctttattattgatgggaagtgacaaatcattgccactcacaattttactgcttttggaagacccttgcacaggacttgttagagttggaattgctctcctttcattttcttcttttcccttttcttcaagttccgtccttactacttcactatcattcgtttctgtttttacgtttccagttttttcaatttctgttttcgcttttccattctctgttacttggtttcctatttcttcttttccaagtttttcatttttaaaatcttctactgcaattgccactttttctttacccaagccaactgcaggagcattcaagataatcattctcaatacaaaaaggactaataacattaatcacacacctctacgaaagcagagcactgctagtctgctattattgaatatacacttcttgcaccatttctaaatttacttaaaacagactttaactatagcatcatcaatcctaactatagcatacattaagcaataacttgtttgtgaacaaaaagaacttaccaaaatttcaaaaaaaaaattaatacaatacatacttctatgtaagctaacctggagtcaattgcaatccaccttggggtggaaaaggggtaagaagcggggttctcttccatgtcagcacaaaaacagtcgtgcacataagtaaaatggtaaccagagacagctctttagcccttagtccataaaaacctcctttcattctacaaaataaataaataaataaaacagatagatgaaaatccatggtaaaactacttaaaataaatgagttattgcattctttttctgtctcgtttttttttaaaaaaaaaaatgatataacaaacataagatgcacatgaaacgaatgcacaaaaaagaacactcagtccattgtctaacctaacatgccaaaaaaaacacaaacacaaacagggcacacgcacactgacacacgaaggaaggcaaggcaagagattatcatagattatcaactgcaatcgtgtccctaggtccgaaaaaataaaactttacgaaccccaattcagagaaagtgagttttttcatcttccactgaaaaactggaaaaacaaaatcacatgcccatttcacaaaacagagagcttatcattatcaattgcagagctaaccccaaaacccattttacagatcaaatgagtcatcccatataaactcctcccaaaataaataaacaagagccaaaaactttcgatgcattggtcaaagaatcaaaataaagttcaaagtggatctattcgtgttatacatatcaaataattaagcttttaaaacagtcaagaatagaaatacctgtaacgcaggtcccgaaaactcacctcaacccgtcctcaaccttcacttccgatcaaaattaaacaaata

SEQ ID NO: 13915 - DNA, 3296 bp, Cannabis sativa
  modified_base (2095)..(2102): a, c, t, g, unknown or other
ccttactcaaattgaaattggtgaagacaaataatctatttactcataaactaaagttgtttattatcgtgatgataaaattttagtaattgaataaatactatgtctatgtgtatgattgaaatctaaaaggagaaaagaactaattgattacataatgcatattgaacaaatgcttgatagtgtacctataaaactctccacataaagcacactcaaggcaaactcccaagaatatcttgaagcttggaacaatggaggcaattgtgcctctaactgttataattatgaaaatgtactcttcaaatgtaaaataaataaattaattttgggagtgatgtgatactattttgagagaaacttttaacaacaagaaacatttgagaaatacaatttaaaagtagttataatttagggacaaaaaaatttatttattaaaaaaatattattactatttcatcattttgaaaaaacgtaattattgaaaattttatagttgactaattaataaacataatgtgttttctttagaaaatcgaagcttaaagcataattctgctgatattgttaagtaatttctcagccccacatcataacatttctaatagaaatacattaaaatataattgatttgctctaataatatcccaaaatatgatacaaattcagtacattataaatgtgcttcactatttagtaaacatttgtcaaaatttatataattataaatacacaaacttttatgtcacttataataaaaatattaaattttatattagagtataacgttaaaaattgatacaaatatattacaatatattttttgtaccgaaaatggcataatttttgcattttccagaattcaatccaagtcaacaagagacatgtagacacgaaaaactcattatttttatatcgaagtaaatatcacctaagactctaatgaggtcctaagtaattgggagtcctcaatggtataaattcatgcagcaatgaggtgatgagacaaggtgattttgttgtttttgttgaagcttccagcaaagggttgtgttctgttgcagccattgtggttactgttacgtactgatccagaggttggctggactaacgtgactttggcttcggattgtcaaggtcgtctagtgtatggaattatctctccaaattaaggctccccattgtaagatggcttcggttttttggcaggtactggatggtttggattaacttccggattcggctgtggtgtggatcccttggactaaaaatgttctggccactaagacttttatttataagttggcttttactttattgttgtttggtttttttattgctgagaacttggccctcttgtgtccaactagactggtttctttgttttaatatagtttgcagttcataacatttaaaaaaaaaaaaaaaaaaaacttagactcgagaatgtacgtataggataaatactatttttgaccttgtgttttgtattttttgttttgttaaatgacaaaatagatcttgtattttctaaaattgtacaaataggagattgaattcatataatgtcaaaataaaacttaatattaatctaacctagaggtgttataataaaactggttaaattttctatatctgttcgtgtttagaattatttttaagttggttatatcaaaaaaaattgtcgaaaattaaacccaagatcccattttaaaaaatataggaaatattttatcatttgaaaaaaaataaaaaatctaatttgtaacttttgtaaaatacaatttctaaaataatatttaccagacaatatatgtggcatgaaatatctttcaaaaagaaaaaatatatagagtaagtgttaagtgtagttaatgtctagcaccactagaagtaggtgccttgcgtagggctaattaataatattttataaaagagcattgttataaggcaccagtagtgcttagcactatctcgacatgtcacgttgctattggttagcgatactccctaataattattatattaaattatatgggacccgatacttagttagaccaatagcgatactgacacataggagggtgctaggcannnnnnnngccctttagcatttctctttataaaattattaaattaaattatcttccttgatatttttattttaataaatttaatcataccaattacattatttatctaattataaaaattctatttatatgtaaaattcaatatttaattatacacataataatattataatggactttgagtggtgctaaacaccattaataagttctagcatttttttcaagccgttaagatgaagggtaaccaaatgatgtgatatatatgaccatggtccatggctatagtttctttaaattctaaaagagcactcagtttattatttgaagtcataaaaacatatatttgagctcaactgaatcatgtaaatctggagtagatcatttgttaaatttgatgaggatttgtaaaccactagacatgagtataaggtcccaattgtgaattagggtcaacttgaagctacctccaaaaatcaaatttaaatttaaatataataaaatataaaataatacataagtttagtattctgcatttaatgtacacctcaaaaaataaaaatgacatattcttgagttcatattagaatgaagatgacattttgtcttagactctttaaattggcacattgaaagatttgtcatcaccatggcatagttgtccaagaagtaaagataaaagtttggatagacaacttcacatcaataaacctcagatagatttctattagaagcagtttatactaaaattaaaaaaaaaaattaaaaaattgtactaaaaatttaaaaatagtaaattattttagatttatacaacattttatataaaatattattttgaaaaattattgattgaattttttgttttgttgaaagataatttaacctatttatttaaaaatagtacaaaataatattttgttaaatttaattttcatcaaaatacaacataataatttgaaaagtaggttttattatgattaaactgattataatttttgtatatgttcctcttaaataatcatacaatttatttatattattgaaaatatccaatacatatttggaatgaatatctttgaagttttaaacgtgaaaagttttagggaaaataggtggagaaaaagtaatataaaattattataacataacatataatattttatatctctactcatacaaacactaaatcacaaataacttcaa

SEQ ID NO: 13916 - DNA, 3333 bp, Cannabis sativa
agcgttgcaagcatttcgagataggtggagacaagaagggaaagggaacttctctgttttagatttgtgtcactgtgtcatttttgtttttatggatgttgaaatagagttatggggatatttgttaacctagacatatgttgtcatgttaaacatcgattttgtttgttgaacttttgtcaatgttattcttcttaaggttcctattagagtttaagcattttgcttttttaaactttgtgagttccttaaaatcactgaaatcaaaagctttcctgaactaagttaattggattaacgcttggaatatttgataatgggttttttcacaataattgtttctaaaatggtataaatagtttcaaatgttagctgaagctgcatatattttttttaacgtggacttaactaaatctgaaaccacaattacaccaatgcaaacattaatcgatttcttgatttgttttccatcttagaaatttgttttgagcaaataaagatgccaagtacctgaaagaccatgcttttagtgaaacctgaactttctagaatgaataattgttcattagtactagacattcccgaaaaatgtaacaatatcttgctctgattaggattgagtatcaccacttgagaagagtaagaggtcatctgcaaacagagatggttaagctttaaatctacacatctagggtaatgtttaaactctttcatttgagacaccttagctaacaattttgaaaggtatttcatttcccacacaaataataatggagatattgaatcttcttatttgagatctcttttgaagcaaagtactcatgcatagtaccattgatcaataaagagaattttggggtaataacactccattaacaaactatcctaagtcttattattcgaaatcacattctattggtacttattaaattaaaagatttggattagtctttctgtttctgtacccacccgctatccctgtttgagggtgattaaatatctacaggggagcctcctaataaagaagttgcttcttggaattgaaagaataacattttaaataatactatatttaattacagcacaattctaaataattttcgatataacatttgtctattatcttctaactattttggcatgataattcacaaatacattagagataatccaaaatctacaaatagaagtaaatgggaaggaaaaaaatttcccatatgttaaggtgaaaaagaaaaacaaaaaaactaggagaagtttgagttttacaactattaatctgaatctgaagatattaaagattcaggatttaatttcatcaccattttcgatagcatctcccccatgtcttgtaactcatcctgttcaaagccccaacttctaagtaactgcgccccaggtgctcctctctcgactccatatcgacgaagcttccccaacctattatccaaatatggcaacacagcactgcttgaacgtagtctagctgccatgggaatggagtgaacatcaagagaacctcttgatgagaaaccgctgatcgggctgcccagcagctccccttgttgcccaacgaggttgccaaagattgagggaaaaggcaagggaattggaagagggcattgagccacagagagatggcaaaacatgggccttgatgttgcttgtttgtatgaagcttcaaccatatcttttacttcaggaactgaagcccgtttaagtcctgtaatatcaaaagataacttacattattattttcttaaaactataatccccgcccaattctacatgtataaatcggcaactgataataataacggtataagtatctaaaattttaagtttataatcagtataaagctaatgactctttttagcaacataagtacccaatgttgtaaaattatattttcttgtctaattttgtgagtacaaactctgttagcgtcttaacgagaacacatgtaaaatccaaattctaaatcattaggtctagataaaaacatttagtatcagtcttcttttaataaaagagtctaattataaattttagacattaacagagtctgtactaataaaatggacaaaaattacagttttactaacattcggtacttttgccgtaaaaaaataattaggtttataccatttacaaactcaatactttgagtccttatgccgctatttactatagttactatagtgacatctcttgggtgaaaataaagtacattattgcttttgaaagtgttattctaattgaaaactcgttgtgttaccaagcgctccctagtttctagtctatctatcttatatatacaagtaaaagccaacttgaacaaaaacaaagtgaaagggccaagagcaagtgcatttttacttttagaaaaatgaacacattcaaaacttagaggcaatggcgtacacgttacctgaactaaatgttccatgggcacaaatggattctactgcctgtaagtcttctgcattctcatttatctctggtgtcaatgactgcaaactaccaagcaaagtctgattgaattgtgtccctgaattccatgatgccgaataattagccaaaatcatagcatcatagaacaaaatcccaaatgagctaaggaattaaattaaattaaataccagtcaaggaaggagctggcatcgcgacatccatgatagccaccatattctccctggcttgagctgctagcatctgtacaagctcattaacattcatggagcctgaaatatcacgtggatccgaagtaggcccaccttgttccattcgaaatgggaggctaatgctatgcagtgcggctgcataaactgcgcttgaatgatacggcatttcatctttgatgttaaggttcattgcagctttaccttcaatttgcccaaaacaaatgtaatggtaaataacagcttcataagatgaaaatgcaagagaatcaggagaaataatgagttttgcttacttgtactcaaagaaggtaagccaataggtataatcagtttacagaagggtgaaagccttgaaaatgaaactgcatcatgaagatccctagagacagtctgcttccggctcctgggattcacgtgagaaacagggccacgaacagtatataacaatactggaatgttcgtgtagtcatcagcaatgttctccaagaaatctgccgctagaccagagaagcctcctgaatcatccacaatgaattgaaaaccctgttccgatcaccaagactcatcagcaaaaaaagattatcttaagagttgagaatgttattattgattattgtaaaattagataagtgaaaggaccttccataa

SEQ ID NO: 13917 - DNA, 1337 bp, Cannabis sativa
aaaaatatattctataactactttaaaatatattctataactacttttattttttctataactacttttattttttaattttaaaaacaaaaaataaatttattaatgcatatttaaattaatatgttgttattatgtaaactatgcaatttgacacattattaattatctactaaatagtatataatatattgatatatatactcaaaaagaatccaacacatggagttagtatcacaatgacaataaattattttagatgtcaatgagtattaaattgtattagttactactaagtatcaaaatataatagtagtaacgacattactaataacaaataattaagtagttataatgaaatagtaaaatatcatgcacttacccatactactaatttttttcatctaaagaatgactaatatggaatatgtcatgtatttaataattattttaaagagcactatggatttgtttggtacgtcgtataagggtcgtattgtattaaataataaataacactatttttaaataaaacaatgtattgtattaattattacgactaaaatttttaatacaatgtatgttgtattatttaatacataatattcggagtcaaccccaatctccgacctggatctagacccaaatccggactcgaactgggacttagacccaggagtcggacccaaaactgagacccaggagtcggacccaaactcgagacctacgacccggacccgagactctcgactcggaccgagacctggtctcgaacctaggacccagacccagacccatagttggtgttggggtcgaatgtattgaaaatatattataactttacacaatttattaatacaagtcaatatcaaacatattattgtattaaataatattaatacaatacaataaaatataattcaacataacataatataatacaacatgctaaacgagtcctaaatattttaggaatgtcatgaatagagttattagggtatctattgaaataattgtgtttgatttgaaaaatctgttatatataataatatgataattaatttcggtatattatttttcataataattaaatttgtaattattttataatagtagtgtagtattgtaattgtaaagcccttttttgaacccttttctatttttttcatcaataccaaatataataataatgtacccaaattagcattacacgtgtacgatttttataggaaaaatattctttcaaatcacatgcctttagctaaataaaaaaatttgaccttttgtattacgtactttaaaaaaaacaattgatagttataaaaaaaaaaaaaaaa

SEQ ID NO: 13918 - DNA, 1434 bp, Cannabis sativa
gagagtgcaatttgtaattgtgcttaaatataacaattttttttttcttcatattctacactactacgtttttgatactcttttttttccccttgaagataagatattatgttgaattagattataatagcagttgatctgttcaggcatgctttgaagcacatgaaggaaggaagctgtgtaatcaacacaacatcggttaatgcatacaaggggaatgccaagttgctggactacactgcaactaagggagccattgttgcctttaccagaggacttgcacttcagcttgtggagagaggtatacgtgtcaatggcgttgcccctggaccaatatggactccattgattccttcctcttttagtgaagaccacactgctaagtttggctccgaagtgcccatgaagcgggctggccagcctattgaggttgcaccctcttatgtcttccttgcctgcaaccactgctcctcttacataactggacaagtcatccaccctaatggtgagtctctaatgcttggtgcactctactgttctgttctcatcattgtgattgaatcaactagtcaagcccatccgtttttcttttttttttttttttggtgaattttgcaggtgggactgtggtgaatggttgaagtgaactgctgaaaagggtttttttttgggacttttgtctatggctttttgctgggttttatctcctgtggattcttttgtgcaactatgtcttttggtttagattaccgcagggacgacaaatgttaagctatgtaatgtacataaatagtgctgagccatctatggtggcttgtacgagcacctatggttgtgtaataatgattatgtgaaaaaaaaaataaacgtagcagcttctgaacatgtttttcattttttttaactcggcgcaaaagtgatataatttgcgctactgcatgagttaaaaccgtataacataatcgctttttaactggtcggtactgtcactctgaacttgtgttttgaccaaggaggtgtctttctctctgtatcaaactattagaagaatggggccattcccagcaaaaaaactagaatgaaataaaatcacatctttttcttattatagagatgttctttctagctcgtgtggaaaaaaaaacaaacaaactgacaactgaacagatttcaagataaatgaggtaagggtctgcagtgttgctctgcattctgggcctggttagtggtcgaccctccacacggttcagagattttcccatttaaaaaacagataaggaattgcaggtgctattagaattttctaaagagaatctagaagaaaagaagctggtattattgtttgctcaaagtctcaatacatcaatgtgttagacaattgttttgtatagattaaaacattaatgattatgaataaagtgcgaaattaataaa

SEQ ID NO: 13919 - DNA, 2087 bp, Cannabis sativa
ttgctgattttgaaaaataccattttttttctaaataagggcccaaaaaataatttttaccctatagcccactacatttcagggccgggcctgctcgagattcatcatacaccaccaccagtacagtactgaaactaagtatgaaagttgtcaagtaattaagtcgatgaatttagacaaatacccccttacgtcgtcaagctccaaccacagcttgccgcaaagaatagaaaacctttggcatttggcatctcacagtactgaacccaatgccataaggtgggtatcgtcgaccgaacaacaactaaatcgttccagaataatagaattgacacgagacgagatgtgttacttgaacccgtacattaatattgtgttgcaccatgaccgttcttttaaatactgacatttattttattggatcaatgcatgcctctctaatgtttgagagccaaaaagtttttagttcattttcacactactttattactatacaataatatctcataatgtcaactatataacaataagtattccattagattgttctttgactttccatttaaaaactaaataacaaattgttatttttttatatttaatataaaatctgaacacaatgggaaaagtgggggtagctagtgttctaattgcggctttctagttattattagtgtatactaaaacaactgtgtatgtatgtatgtatcctatcagagtggctaacagccaaacaataagcaaaaccatcatcatatccctttttttctgaagattctcttaattcatcaatcaaataaacaaactatttcaattgtgatgatcagattattctcgaagttaaggggatcttcagtgttgttgtttgtcattctttgtcttctttttgactttacttgatttagttggtgagattgtgatgctatatatatgccagtgataactacctttcactttctttttcttttttcattacattctcatgatgcttcaacggctctctttcgaatattgtacaaatggtaactatcagcttaaatgagtgacaggccatatattgcaataaaaaatttcattactgtggaccaaattgaggctgcattgtggggccctaagaatatcttctctcttttttactcttttatagcatgagcagcacttgaaggaacaatgttaaacttggaatatttttgtacctgaactaaaaggtcatattgtagaatagacagtactgattattagttgatcattttggattcttcatgttcaagcttgtctaattgggtccacatttctgcctcctaaatacaaattgttcatttaacacacccaaaaaaaaagtaaaataaataatagtaaaagcatattatttcagatatgaaaagcttaagatttggtccatgttacaatcaatcataatgataaaccttagcttctgttttcctagacaaagtttccaaaagaaaaaggagcttaaaaaatggttaaaaaaatcaattgaagcaagttcttgaattttgacaagtttattttagtaatgttgagtctaaacaaagctactagagttagcatctttagagatctacggtcaactattggttcttaatattttttaatattttttattttttttaatattttattactcaaagttgcattatcttaatattggaagcaatggaaagaaacttttatccttgccttgggttttaaggaacgaacatattgtgtcccaggataacttttctgaaaactacttgactaaagaataggctgtgaattgattcaacattttatcttgtaaagtagcaaaagattggctaataatagctcttactaaggtcatataaaatgttgtaaacacacaatataaattatacaataatctcaaacaaagataagcaagatcaagaaataagaaagacaatcacaagcggaaaataataatcatatacaaaagcaacacaacagatacaactactaaaactgtagttccaaaactattgacctacattcagttactccatgggtttcactatttctaataatctttttaggggctaaagaactcagattgaatctatacg

SEQ ID NO: 13920 - DNA, 3814 bp, Cannabis sativa
atattacctagtttatagaagaaagaagaaagagaaatatttaataaagttttaataagtttttctatttaaatttttttgacacatgataatttattatgcatgcgacaggcttactacagattactggcaacagtagattttaatccttctaaactacaacaaactacattccttcatctttcctttgacttgtttcagccttgccgtaaaatttgtatgaaaactcattgctcgagcattgttccaccaagttgcaaattccttattaaagggagttgtgtcctggccaggaagtatcaaaccggaaaggacatggtcccacaccacaacaatggattgtagtccaaaacgataaggctgtgatttgatacatcctgcttaataaaggaatataactcaattcctttgtttttttttatttgaaaaactcattccatttgttagtaaactggaatctatccaatctacaacaaacggattgttctgaccacgaaatatttaccgttattcatgtttactaatgtcagaaatatgattgctcatgtttttgtcaaatttaatatgttgctgaatacaaaatgtatatagttggaggttactaagtgacacagacaagttaacaccaagcaactcctcgtgccatgagaaagatgacaacaacgtttaaataagcaatgggaaagaggtaatgaacatcacttcattttgtagaaatagtctctgctaaaaagaatatcactttttccacacattacacatgaaactttactaaaataccaaaaaaaaaagatacaaagacatactctgtaaaataaattatgacaaaaaggaaagaaaaagagaagggtcagtaatacgaattcactgatgttgcaaaccaaagtcttcttcagcttgcttcagcacagctgagacactagtgaaaaactctggctcgtgtgctttgatttcatcaagagtcttcgattcgtgttcatccacctgaaaacatgtaacagcaaggaaaggacaaagttgtaaaccaagaatcatttattataaaactgaacttttaattatatctaaaaaaaataccttttattaataacaaaagtcaattactgaagtaatttttatatattatatctattaaacgttttttttcatccaaaaatattaggggagcccatccctaatatacacaatgttcgacccctgattgtacctatgtttagaggaaatctagtaacatggagaagcagaagtcagagcattgctcttggagtttgtgaacaaatgtggataagaagattgctgtgtcaactacgaataactttgacgagatcaatcaagatgctatgtgatagtcaatcagctataggtatttcaaaaagtcaagtccatcatataattaaaaatgctgaattagattgagaacaaaattgtgcagacactccaacaaagcttgtgtattcttgtcaaatattttaaacacctacaattaagttattgagaatgctctcttgtctctcctccctcctccaagtaagtagtttatggtttccatgagtccagttagaatagtgaaaaggactagattgtcgggaaatgagatttcaactactgtgatgctgctttctggcttctcggatcagtagctgagttgctcagaaaagggatagcagggtaagtttaaaagaaagtatttacgaagatgagtttactggtgggagtcttcaagaatagaagaggggaattctaaagatttccaaagtaggcaacagcttggcttagagtgtgattgtcccggcagagagagttgaaatggtggaaagaacttccaaactgtttggataacatagtaggagccaagaaaaaggatacaagccatagttttctaaacaaacaatggcccataagaacagtccaaggaggacatgggccaatggtacggcatggagggaaggagaaaaggcagggaggatgaggctgggggctaatgtctgatttttacttcctcagaaaaatctgattggtagaaagatcaatgattaatttcacatgaagaagaagacagggaagaaattcgaataattcaggaaggctggtaggacgcaaacactagagcaatgctgtcagtgttcgggattccatggggcgattcactatgcaatggagactttttcctcaaaagtcatcgagatgagtcccttgaaggatgatagaaccattttgtggtgttctttgagtgaggaaagagaaaggttggagggtgtgggacaagtaagattaccttatgaaatcatctcaactcttcgaataataatctacgataaacaagttttgaaatgaattggcaaatcaagatataaacaaatgcatcaaacaaatattaagatggatgttgcattccaacacttacttctttaaatttcaagagaactaaattagagacagatgcaggtttttctctatcccacctggaaaagtaagaaacacacaaattccaagcatgtcagtgtagatccgtactgcatactataataaaatatgaattatgaattctgattctaatttatatggataacatttgtaattttatttctgtaatgttatattctgtttagaattaaagcaacattttccaatttgtcacaagagcatttaaacctccagtatagctaatttttaactaacttacacaagcatgaccttattgatctgtgattaaagcaccgtacctcacaagcattaactcattgacagagcgccacattccacgccctacatctttaggaaatggttctcttgcactccttccatgccataactcttttgtcacatacatcacttcatcaacatctacctgtaagaaagataattaatgtgcaaccaaaaggtaagaatgtaagacttgttaccaattgtggtgttgttatattatgttgaaatgtcagaagagtattttatattttaaaaccattcaatatgacgaagaaaaagtataaactgctgagaatatttactttctattaagagtaatttttgagtacacattacatagtgtatatagatatttaaaacgtacattaagagagaataaaacaacaaactcttattttctaggaataacattctctgactaaagctgattaatttattcatttgaataattcaacacttcccgctcaagcttgatcatatatactatataatccaagcttgtcaatcaacctttcaaacaaaggcacatgccatgcctttgcaaacactttgagaattctttgatcaattttctcctttatgaaatgacaatcaacttcaacatgttttgtacaatcgtgaagaactggattataagatatggaaatagcaactttcccatgaattttccaacatgtagcctttgtatatccaagcttgttgcaatgttcacaaaaagggcgattatgccatgacctaggagcatcagtacctagggttagacatcaagggagagtgctcaatttcagtagttgagagggtaccacatctgtatgtagctttcttcacgacgaacctcatcaaaggccgcaaaaatagaggacggaggatttttcccaagaagacgaccatgaacctcttcataatcccagttccggccatgcaagatatcacacaatctttcatgatcaagcaatttttgatcgcttcatctcaccgacataaaacaaatcaatttcttgccatagattatacaaactataatattgtgttggagttaggatttgttttcgggggtcccggacttgagttttgtagagaatggtgaatagaattatgtgttgtattc

SEQ ID NO: 13921 - DNA, 11567 bp, Cannabis sativa
  modified_base (1433)..(1445): a, c, t, g, unknown or other
ttttttttttttttaatttgatgtttaaattatccttattctttgtgaatttggagtttggaaaaaaagagagaagaagcctgccctttggtgtcctgtttcttaagcaagtactgtattcatgaaagtttttggtctgtcactataaagaatggtgattcttttttgtggaaaagtattatggaatttaaaaacattctcctttaaggatatatcacttagtggcgagtccattgacttctggcaccaaccttagattctttggcttcattttgagtacttcaagttcaaggaattaatggttggtttaagaggtaaaagtttcactttggcagacatttatgaggagagctcttgaaaatgaaatagataagttgtatatactatatagtggatcaagaagtctaatattcatcagaggattgctaactggctttggagaatgcttaatgtggccattaatggcgttaggggtgaaaatcggtcagttatcgtcgatttttacaattttataaccgaccggtcagttacggtttttattttacgaaaaccgtaaccgaccgtttagaaattataaccgtataaaatcgaccatacgattttcggcggttttttagtttgacggtttttggtgattttggatagtttaggcggtttattgcagttttagcaattttttggtttaactattttttaatttcaaaaaccgaaaccgaccgctatgtcaaaaaaaccgaaatcgaaactgaccgccaaattcggtgatgacgtgaaactgaaaattcggttacggtctagtcggttttggtttagagagcaacttacatttattcaaagattgtgtttttgccaaaacaatcgggttattattaagttttattttgacaaaaaattagtttagagtcttatttatacaattttaaaaaaatataggatctattttgttatttaacaaaataaagggtccaattaataacttttattggtataaaatagtatttacccttatcttaataataactatttttttaaaggggaataattatttaaaataaaaaaatatctcattcatttattagttatctttttatttaaatttgttgtaattcgaattagaatagaaaagtgttaatttatgacttcaaaactctataaatagcaacctcatcaccacttctatttgattaagattcatttttcattgttttcgaaaaaataaaaacaaaattagaataataatttttcttaattgcacatttttgttttttaatacgtggaggtaggctactacgtggttgattattttcaacatcattatatgtaagttatctttgtccaatatttaagtttaacttaattgtatttttggtaatgatatttaaattctatttttaataaattattaaatattattaaatttttatttttttatnnnnnnnnnnnnntaaatatactaataaaaaaaatacttaaataataacttaatacttataaaatttttgtaagaaaattaaatttatatttttatataaaaaaagttatattttagattttaagatgacatgacatttaaatttgaatttttttatcatatatatatttaaaattattatatatattttattattatatattaggtggaaagaatatcctaatttaatttttttttccaaataaattaaaattgaaattaaaaagaaaatgcaaagaacagaaggagagagagatctgtaagaaccaaaaatcaatctccacaaacacactcctctccttctctccgatctgatcggacctttgtccctaatcaatttttagggttttgtattttcatattcaaatacatatatatatatttcaattttcaatatatatttgttttgtttcaaatataccgaccgtttgatcatcgaattccgtcgccattcgcggatttttttttttggatttgaagtgttgcgctagggtttttggtgctaatcactgggagaaacattgtggattctgattagagttgtgaagttgaatggaattttgtttgtgcagtgaatttggttaaattgtatttgagctttgggatcttcatcttgttttgggttttcgatggcttcggctcaggtattgaccaactcggtgagttcttcatcgaagaagcaaggccatttggaagctggaaaacgtcgggtatggattttgttggcctcttttgtgttcaaatttttttaatgggttgcgtttttgaatttggtttgattcgaattattcacttaatactatattgaagcttgattgtttattgatttggtttccaaattttcttatttggtttcgtttatctaaatatatttgtaatgacgatttagaatttgatgttttacgctacaatgtggtaatctcctatttggtatctaaagagttgatttgagcttagatttagcttgcattatgctttagtcaaattataaccacgcactgggtttgtatgccttatttcgaaaaagggacagaggaaacttgtcttagactgtggttacaagccaactttaacatctagacaatacacctaaagataagtagttagcgaatatggaatgaaattacagctacctaaggttaacttagtgtagtatgaggtgctattccctggccaggtcttgaaaggacaatccctcaaaccctctcaacttaaataaccatgaagccacccagaatttaatattttcctatacttcttcagccccattatcgattttttgaagatcctcccatttttttcccaacaggatagacagtaaggcaatatattttctttgatgcacattaaggatagacagtactttgttatttgttcttcattgagttcttcgggctaatgttggttctaagtggggttagtctcatttgtggggattttctgtctttaacaaattaagtgggaaatgcttttagagttttcctttatgtagttgtgaatggatttttcttaagaattttcaacatgtggattaacaagttatttgatttctatcattttagtaatttttcttatagtgtttcatcaaaatattattttcttatagtttttctaagtggggttagtctcatttgtggtgattttcagtctttaacaaatggatcgtgaaatgcttttaaagttttcctttatgtagttgtgaatggatttttcttaagaattttcaacacgtggattaacaagttatttgatttctattattttagtaatttttcttatagtttttcatcaaaatattattttctagaagaaaccaatcgattatggtgttcctttatttattataaacttgttgtagcttgaagagttccggaagaaaaaagcagctgagcgtgctaagaagacttcatcaaccagccagaaccagaagtctgaactcaatttaaatgaaaaacaacctttagaaactgaacatgaacgagctacatattcaagtggagctggtacatcagatggacatggcaacactgttactgaaactgcatctgtagtattaaaccataatgaaaatttaattgattctttccagaaaagtgagcaagtttctttaaatgccagccacagtaatcagtttttatctaatgattatagttcgctgtctttagatcagaccctaaagcacacaagtaatgaagaatctaagagatatggtgatttaggttttggtggacctctagatgtcgatcaaagtcatggtaaaaaggggaacagtaatgacctggagaattatactggaggcttagttagatttccatatgggacacctggccagtccattcctttacactcacaaggcagtcaaggttttgaaagcagtattagtcaacttggtttccatcagagtgaggaatcccactcgaaagaaaagttgtcagaggattatgcaatttcaaatactggttcttctcgtgtttctgtttcaagtcaaaattctattggcacggtacagcaaagtgaacctagtaatgttgttggctctaaatcttcttccctgtatgaaggtacgtttatactttggaattataatttcaagtttttacaataattcaataatatttcacggtctttagttttcctgatatctatactctgaaggaagatactgatcattagcctttttgatttcatggtagacctgattcgaccaaccacaaacagagctgaatttggacacaacatgtttgatagtgggaccttcagggataccctatttcccaaatcaggcaaagaaaacattagtagctctgttattggtttatctggtatggacaatggggctggccagacatttggtgcgagctttcaatctgattttcgaagttctcccaatcatgtaccactttacccggtgacaaatgaagctagttcaagacgatctcgcccttcctttcttgataatcttaactttcctagagcatcttctggaactcatttggaacaagatgaacatattaaagattcatttaattccaacagtttgaaatcgaaaagcatggataccctagaatcttctccttttgataagccatccatttattctgaaagtttaggtcaactttcaaagcttgactcccatagcaattcatatgcatttgaatcttcaatgagttcagtttctgatagtattgtgagtgacctgccaaaaccatctgtatatgaaaatggcatggagaggaaacatgatttttacttaccaaagcagaatgaagactttacagctctggaacaggtaccccgctttgttatttctatataatttagtgttcattggttccccaccaaggagaactagtgactaggtgtttgttggcattggaaaaagtactgtttacagtcacttttgtttcccataagaagatttggttcaagtttttagagattttattttttttagccatctttttactcacgtcttgttttggtttacatagcatattgaggatttgacgcaagaaaaattctccttgcaacgtgcacttgattcctcccgcactttagcagagtcattggcttctgaaaattcatctcttacagacacgtataaccaacaggtcagcttgcaaatcatgattcggtcgcattgcacttgtataattttgttgcattaaattgttaagggttgaaaagatttatgatgctacatgtttttgtaaaattcatattttttatgacctgtataagaactctaattgtcttacttttaattttctaatagttgtaaaatctgattattcaactacctttatttcagaaacaagttttctgtagcagaccagctgtgttgttgcaccctttcaaatcgaaaataatcatactgaattctatctaaatagtttcatttttttttgtattttccagagaggtgttgttgatcaactaaaatctgacatggaaaagttacaggaagaaatcaaggcccaattggtttgtactaattctctccttactgcctctaaggcttagtagtcagtaatagttcctttacattttcatgtagaatttctgatgactatggaaggatgaaatccttatggaatttatctgtagttgcaatatttggattatttcattagagtgataaggagattttttaaagaaagttggaaggttttttttttttttaaatgtgattgatcattcatatggatttcttctattaggatttacttgtgagtccttgttatgcattatcttttttgccaatgaaatatttctgctatatgaggacatcttctcatctcatgttaccttgaactctttcatatattatttttagtaacgtttctcgtttcttctactcaaactatgtgaataagtaaacgacaaacttagggaagatttaggaattcacatttcaatgggaatgctgtagaggtagtttcaaaagactattgttgttttgtcgaaaactttgtgaatttgaaagtttaagaacaaatgagtaccgtagctcatggtacgttgtaatttgaacaaatgtaaaaaatatcccataattgtaagggaaggagtaactgtgaaagaaattaaacaaataagtgattgacttcagacttctgtagagtgcataaaaatggggttagtagataagggttggtggcttagacaaattttaggtgtttgtgatgatcatgattccctagatatgttgaagtctgctgtaaaaataagatttttgtattccacatgggtttcccaccttgtttgagtactgcgagtgtcattttatactttcaatcaattaatctcctatttttactatgttgtataacttattctctctgggtcgtatgaattttgactatatttttataatatagatggaacttgaggctgttagaaatgaatatacaaatgcacaactagaatgtaatgccgctgatgaacgctctaagttactggcttcagaagtaatcagcttagaggagaaggtatggttctctagttttcttctgacttctttaagaaaattatcggcatggattgctgtaaaggaatttggtttctacctgataatattgttgtggttggaaattatattactatttagaaacacatttaattttgatttctatctcactgattagtttatgttctgtaatcttcgattagttgcattttatacctacaaggctattacgtgcatggttgtggaagtacatatgtgacgctgaaagctttcatacttaatgttttttaacacgactatgctctcaattgtttgtgtaggcacttagattgagatctagtgagctaaagcttgagaggcaattggagaactcacaagctgaaatctcttcgtacaagtatgattttttttctcttttttattgcggatgagattttatgatttgtgacttgtttatgttttttatctggtccgtttgctggcaagatacatctttgtactggataaacctttctacagtcaattatttttatttaacacaatcttttcatgaagtaactgttgaatttgaaatgttacaggaagaaattgtctaccatagagagggatcgtatggacttgcagtcaactattgaggctcttcaagaaggttagtgttataatattatgaattaaggtgccacttttgtcactttatatgctaggttgtgctactaatttatgccaaatgagagtggaaaaagcaagggttaattgaaactgctataacagttatgacaaggttttagaactttacaaatttgcatttgtattaagggaatgcaatgtgttcatttaaatacttgaaatttagtttgatgatattcttatatgtcgcttcttgttatttgggcagagaaaaagctgttgcagtctaagttacgcaaagcttccactagtggaaaatccgttgatattacccaaagtactcataaaaaagatgaatctacttctaccgaagatttaggtaataattcttacattgagaagtctcattgggatattgctgtttacatacatttcagaatattaattgtgcttaaaactaattttatcatgaaaaaatcttagtttgctatttcttgtctgtgataacagcagcttgttgtccatgtgataaatatgctgttttgttattaagaataactgtagattactggttcacattatttttactcttttcccttgtttgggtgtaagcttactagtttgaatccacacagaaaatgaagataccaataccaatacctcgggtccggaagtgcaggatacacctttcattggaattgatgcctccagttcttcgatgttgcctgacaatggttattcaaatataccttctgatcagatgagaatgattcaaaacattaatgcattaattgcagaggtactgtttgtctagtattttctaaaacggttaatttcttgcatgatatgttatttttctgctcagattatattaaagctcagacattcgatgatgtttgattcatagttttgctaactaaataactaaatttgtctcttgcagttagctatggagaaggaagagttggttcaaactttgttgtccgagtcgtctcaatgttcgcagttgaaggtaatgcagatatgatttttctctttctttattggttaaagctttgttggattaacatatttgctgcttatgatttttcgatgagtgaaggagttgaactatgagttgacccgaaaacttgaagcacagactcaaagattagagtttttaactgctcgaagtatggctaatgagaatatacctgcaaaacaacctaattctcaggatgttcgcgagaacattcaatacgccgatgaaggtgacgaggtaagcaatctggtgaatcacttgaaaacataaattgggcattttcgaaaaactattttcagtttgttctttttgtactaggtggtagagagagtgttgggatggattatgaagctgtttccgggaggaccgtcgaaacgaagaaccagcaagctcatttgagtgtcaaacagtcaaagtagtacagcaattgagagatagtaaaatgaaatatgtgtatattgtgatcccattcttttttccaatagaaagaaagaaagaaagaaaatgaggttgtttttttgagagagagacatattattattccccttttgttggttaatctcacgtgtcatttgtttttaactatgaacaataaagaaattgctttattgacatttactactacaacaactactattagtctattatatctttagaagtaatggtatattggtatacactatattcaatataatatatatatgggatgagaaattgtattattcaattgttattaattagtataacaattagtacttattttgttacttattgtacttctatataaactattcttcattcaatcaatcaaatatagatctttattcctataatagttgatttatctctctttctctatctaaaaacaatttcacaaaagagtagtattctagatttgagataatttcatacttatgccagcaacaaattgttatgaattatttttaattttatttactttaaatattttatgaattttattgttatattgtttgaaatatttaatttttttttttattgtttattaagattacttagatacattttcttatacataaatttaaatctagattaaatatatatttaaaaaatatataattgaattgtattaaaattaatttttatttttattatttaatttaataattaagtaatagcaactctaatgcaagtataagtaaatattgcattgcaatttgcatgttattaatacttagtatatattatggttactatctgtggtgatcgcgttccacctacagaagcggtctcattccgtcttaattgagtcatcagtatatatctcaaaaattctcattccattaaaaattacactagtctcccaaaaatcaaaacataaattctctaagctacccaacccatagtaaataattagtgattttaatttagatttttaaacaaaaataattttacaataaataaataaataaaaattattacttttaagagagtaaaactactcaaactgtcataactgtcataaataaaacaaataaaataataataataatccccaaataatgtgtggtggtggtgattggtgaagtcctttttgctctgcttcttcttcttcttcttcgtccatggcttccttcatctccaacctctcttctcctttctcattctccattgtttcttcttcttcttcccctaaaggtaacacttttcactcttctcttctctcttttctatgtactgattttgtatgtggaactttccagatgggaagccaaactcagtgaagcttagagatgattggaggcaacgctccaaacccattccttctggagggacttacccagctaaagaccattgcaggttctgtttcaagatcacttttttagccatacccatttctccatttttgtttatttttcttctgattatggcattttatttttcctttttttgggcagtcgttgtgggttgtgtgatacttattatattgcccatgtcaaggatgcttgtgctttcttaggtgatggcatgtctcgaattgaagtaagtaggaactcaaatttatactacttttttcttcttgttaatcacacttattatactcaaatttaggaatgtttatgtagagtaccatgttagagagtctcatatcgataaataatgtgtgggaacttaggttgcatttggctggaaggaatgaaaaaagataggaataggaatagaatgaaatgaaatttaagatgtataaaaaaattgataaaaaaataatgaaattttattcattttatattggaatgatgtttttttttattttaaaagagttgtcattctaccaaaatggtagaaaagttattctattgaaatgacatttcgattctttaaaatgtaacaaaacaaaggaattgaataaaaattgattcatttccattccattacgttttataacctccaaccaacaaccttaataccatatataagatacattggctactctactatagctgattggttttgagataaaattccatacatcttaccgtacactaaaccttatgatattcaactttctcaaccatactctgaaaccgtatataaatagcatattattaatatctgagacatgtttatgtagagtacccaatactatgatttttgttttgttttttgtttttggtttatgacttagaaactaaactagcattgtttgttacattggtctaaatcagctaaaaatgtttttgtttgactcccaagttatacactctatttcaagtgtggttgttagaataatactaatttcttttcatgctttcttctaacttagagtttggaacccattgtacatgggaggggaaggaacatggattccttagatgagacttacttcggtgtctatgatgagctgctatatgctcggaaaactaagcctgtagaaggtaagttcttctatacattttacataatgatcacaagttttttgtgtttctgacttttgattctgtctactgcattactgtgttcgaatcacaaagtcaacttatgttgttcaagtttaatcccttaattgtaggtgctcaatggactggtatagtaacaacaatagctatagaaatgcttaaatcaggcatggtagaagctgtaatttgcgtacaaaggtgctgacacagaagtattctagcttgaaaaataccgaaattaacagttttttgtgccatttgtctgagtgtttgtcattatttttttgattgtcacagtgatccagatgacaggttcaccccaaggcccgtcttagcaaggtttgcgttattggttttaaaattcgttgtctacacatttggtttagtttcattaagtacatatatactcttatgtattacccttatccttttttgttctttcctaggacaccagaggaagttctagctgctaaaggtgttaaaccaacattgtctcccaatctgaatacccttgccttagttgaggtgtctgtgttcttgttt

SEQ ID NO: 13922 - DNA, 4233 bp, Cannabis sativa
  modified_base (1892)..(1906): a, c, t, g, unknown or other
  modified_base (4173)..(4181): a, c, t, g, unknown or other
ataattcttaaataattaataatacaaagtattctttcataggcggtctttacagtttctgtctaataaagattattttcattccaaaaaaaaaaaaactaaatttgaatgaaaattataaattattaacctttttataattttaagaattttactgtaaaaattataaatttaaattaagtgctgaaaatattaaagattttaccataatttaatcttagcaccacacttaaattttttttttaataaattagcatttatcaatcactcgactaaaataaactttatctaaaagaaaacaaaaataaataaataacaaaactcaaaaagtcatcgtcacaaacgacaaaatacttacttttacttctagtacaagctaattacccattgggcccaactgaacagttgccaggcccatattgaaaatttaacacgtgtcaaaatcacagacccataacaaaccaaccaagacaagagaagaaaaccatctgagttaatcgaacgccagtatgccggtcaccataggaatctccgcgccggaaattcaaggttaggagggtttcgaatttcgatcggagaatcgaatcacagagtacaaccgcagaagaggaagaagaagcagagcatagaagctaaggccacagactcaaccgccataattactttccaaacgacatcatcaacgatcgttagcgcgtcccaaccacggaggagttgccattgccggttcgagtttcctcccagaagatcccacctcgaagccattgaatccggccaccggaatatcgtagatcggaatgctgaccaagacattctattctctctttctgtgtgtgtgtaaaacctttctcagtctctgtttggtttgttaaaaaagcgaagggattatatgaaagaaggttaatgattgtgtgttagtcagcttatttttttattggtgttactatttctgaggggtgatcttgaccgttggtttgttgcgatgagactgaaacggttgagaagatgattacagctggtgataattaatgtatttttggtataaaatattaaaatgtgtttacataagagacaaagattatgttgtttgaaattttaggctttggagtttggagggagattggaaaaataataaggggtttttttttttttttttttttcttataatgggaatggaaatttgaatttgggatttctttttgttagaagaaatgaggaaccaagtagagttttatttagcactccacaataaatatatttttatatttaaaaaaattacttaaaataatttttaatttttgatatttttttaaatttttttcgttaattttaatattttttttttattttatttttataattttttaaaaattatgtataatatataattttttattttagttttatataatttatttttatttgataagtatatatttttagaatatgaattgagaattgagagaattttttttataaaaaattaatataattacaaatatatattttatacaaaataaagtttataaaaataagtgcatttataaatttttgagttagaaataaaattgtaataatcaaatttagtaatagtaaactaattttatacaacattaattattaaggattccaaaagtttattattgtttttttgggaaatttgcggcaaaagtccccaaaaaatttagtttgatactgataagtctccaacctccaaaaatagcggcaatagtcctcaaggtcatattttttatttgtctgttggtctccaagttaacagatccgttaaacccatttcaaatgccacgtgtcaaaatattattggtgggtgttattattttaatttaaaaaaataaaaataaataaataatttctttttttctttttctttnnnnnnnnnnnnnnnttttctttcttttcttcttcgtctgcttcgtattcttcttcttcaacccaaccccaaccagtcacaaccggagcaccaccacgatcccaaccacaaccacatcccgactgctaactccggccagccctaaccccactccagcctcgatgttgtcaatcagccaccaaaaaccaacccaatataattttttaaaaataaaataaaaacctaaaattaaaaaaaccctaacttttaccaacattcattcattcatcatctatcaacaatggccgtctctctctcaaatcacgacatcgaccacaacgtcgaatagattccgctacctgactccggtggtgaggtcgtctctgaacatggcgctttctgtttctggcgaccaaaaaccattaacaagccaattatccgaatcgttcttgttcttcaatacacaagagcctctaccatcgtatttaaacataaaccctaaacaatcacgatttctcgtacaattcaattcgcaatcgctcagattcgttgctccgctcaaactcacctcattcgaagtataatgaaattcacgtaatcgagtctaatgtatttcgtcttctgtaaatccataatttggattttcctctcacaacctttttctttagggttatctccggcaaatcccggaggacaaacacatgaggaggaataaaaaccgttgctggtacagattgcgttggctccacatgtgtcgtggattgtgcagagcttgtgagtcgcgtgcaaaacctcagtccactccctctgatctggatcgaaaccatagatcctcaaatttccatcattatccaaagtcagcctccgtttcagattaggaccgaaatcagaagttatgagcgaagcactgttctcctgttccactttcccatccgaaccgagcctcaaaaacgcgttattcgccctccaatactgatcggaagaattaaacaccaaatcagtagcatttcggaacgtgaattttccattaccggaaacgagttcagtgttggatatgttctggttcgggagaatcgtatctgtcgggaatttgaaactttcccacttcccaaacaccaaattaccgtcttccgttaacgttaagctactgttaagattcccagtggtgtttcccggccataagtttgatccagtggaggagtttcggagacggagttcaccggaggaggtgattgtaagaacagcagagttagtaagaaacgacatgtcgtttttatcagtggaccaaacgacatcgtttcctgtgacgttttggtaccaaatggagaaagtgaagcggtttgagccagaggatttgggtttgaaacccgcggcgaaggttgagttgggagagagaagagtttggttctggttgggtctccatggtgagtttgaagatgagaatgatcggattgtctttgtctgtgcttgaactgagatgagtgaattgaacaagaagaagaagaagatgaagaaaatggtgttcatggttattggattattggaaaaggatgggtgagttgggttcaattcttggtgggttaatggtgaaatgaggagaggtttaagaggggtattaatggcggatactatggatgaagatgaagaacagagacttttcttgagttgaccaaaaagtcaactgagcttaaaacagaggaccctactctacgtgtcatggcggctttatttgtggatttgcaaagattgattgtatttattaattagttacattaattaacgattagttattaattaattccgatttagttgaattaattattgtaagagcattcctatttgctaagctattttcttttgttaaattatatggtttttttaacatttctctctttttaaaataaaagaataaataggattttgaccatgtagaattttgcttatttttttttatgcaaaaatgtcctcgaaactatagacatgagatatataaagtatgagagtttatttaataatttgaaactatttaaaatataatttattaacattaagtatataaatattaactctaaatatatatattttttcaaaatttattattgctatttatgtttttattttttatatgtgagcattatgagtcagattaacatcataatactacatcaattaattgtttaaagaataagtttaatgtaagtggattgagatgtttgtaatattgatttttataggacaaaaactatatgtcattattctataggataaatcttatttattttcatatatatatatatgggtgnnnnnnnnntggttacatttttattataaccatatggttacatttttctttaacctgtaat

SEQ ID NO: 13923 - DNA, 2255 bp, Cannabis sativa
ggcggcagctgtgggtgggaccaccgattgcttttcctgtacaatctgccgtacgatgtcggggaatttcgggcagcttttttggtagtagtttggggtgagctttgatagtgttgtggagggaaagaaggtgaggatagggagggagagggagaggagtaagggaatgaaataggaagaagccatggctcgctgtcttgggagattagagaaatgggaattgagcttgcttttcttttatgggttcgtttcttttggaagttggagttaagaaaataaggagatgggattgtggaggagagggtttataggagaaagaatgtttatatttggattttggagggagaggaagagagtcattttctgtccatgtactcggaatgttttgcatttcccctcctacgtatgtatatatattatatttatatataaagccatggccaactcgaaccaaggagttaaaacttttttgtatgttaatttaaaagaactaattaaaggaatgaaaaatatgttcgtattccttaactagaaatgatcaggtacaactagaaagcattgcatataattaagggaatgatgaccacaatacacgcgcgtctccttagtacagaaatatagaaaagattaatacaacaagttactgcatacaattggagaaataatgctctaattatagaaatttttacattatacttaactgtataaaatatttatatatacattagaagattttttttccaccttttatacttgaaaaaaaataaaaagtacgttgagacattttatctattttttttatttagcacttgagagatgaaaatagataaatttaaggataagggttgtatttggttcggccttaaaaaaaaattaaacaactaaaaatgagttaaatatgagtttttaaatgaccaaccaaacaaaccctgatcggtgaagtattgatcttctatcctactttgatataagggtcgtgtttggcttatcctgagaaaatatatttttcaagcctgtacctcacctgtgccaactgagacttaataaaaaccgaaaaatcgagataaaaagtcttatgtaagcaaataaaagtaagaaacccctatcctgttcacgaaccctagatagtggtggtcatctccacctacggaagaaaccctattctcatcccagaacagagcatgcacatacaattcaaaacaacaaattaaaaaaaatgcattccataaatgaaaatagcatacttgatgttgataatggagatgttaagttgattattgttgggtttgtctcaggaagttgattgcacctttctcgaagatgagaagctgcgacaatcaacgagtcgatttttgctccaaaatccaagcttgtgatctcctttgttgtagccgtcctaatcaatggagaaggaagatgagggtattctcatgatctaattctcaatagtaagtgaagacagaagtccacgacattttccaagttggtaaaaagggattctccttgaaggcgattcgaagttttgggagtggtaagaagatttgtgtgatttgaaagattgaaaatttggaaaagaagataaaagtggtaactgaaggtcaccagggttatttatacccaaaaaggctatccacttgaagaagttaggggaaaccacgatttattctccaaaagcacaccttctatccaacaatcagggagatgtacaatctatgtgtatcatagcttttaatgctcgccataataaaggcatgaagcaatgatgaagattatccttttctgaatttcattctagaaattgaacacctgtcaaagcatagtcgttcttggaagatgactcctcgatagtcgcgcattgtcacacactcgactgccacgtggacatatcattatcacaagtggaagttagcttccgtggatgagtagcctgtgaaatatcactacttcgttctccaatttccataagtccaaattaagagattagagcaagctatcaccacgtgcaatattctgaaagcttgggggtaaatgttatccgtattttcggcattgaacacgcggattccaagtcagaatttaagacccatcagtgggaccatcattaatgataaagtgggccaagcctaatagcccactctattcgtaagtgttgaggctagcttgaaagatcaaggtgtggattcttcaatcaagttcttggattgaatgttcgattgttatacgaaaagaatcaaggatactctaataggcatcaa

SEQ ID NO: 13924 - DNA, 10252 bp, Cannabis sativa
  modified_base (6965)..(6967): a, c, t, g, unknown or other
tgacatcataaataaaaggatgaaatcaaaatctccatttatccactttggcaatgtcatgcaatcctttccataaaaattagtcaaaaaatcacatttaagggacttaattgctattgtttaagaagctgagggccttaattgtattgtttaagttcaggactaatttgctaaatcatgtgtagttcaggttctatcatggtaagccataaagtttgatgcttttcactcgggtgtttctttcttttcattttttaacattgattgcaataagctacatgagacaaattgctattttatttcatttaatagaaagagtgtcgttctttctgtatgagatttacatgtggattagaattttttgtgcaaaataggctaaagagagtgcataatttttttttcagatatatctcaaatgaatcatcaccaataatggcttatggttttgtggattttgatttcaacaaaaagttgtctgtcacagaaaatcaggcaggatcttattacttcatcattcctcaggtaaacttgcgatatttcactgcaaccatagatgttaccccttattttagtcgtgattctttattatactcccattgggagttaaagtttgctgctattgtattttcacttagcagatttcagtattgacttttgagtatattatttatacagattgagctggatgagtgtgaaggtgtttccattttatcagcaacacttgcgtggtgcaactattctttatcgacatttgaagaagcccttaattcttttgactcgtctcttatccaggtaattttcccatgcttttggttacattctgttggaagtttttattatattttagattgatcaatagtatgaagtcatattcagccaggttataatatagaagatgctcaatctatcatacctctgtaatttttcaattgtttggttaaatcttcccctccaaatgaaactgaaaactattctgtgtttgagatgttataaagtttatatactgacttctttagaaaagattatatgtgcataatagattggaagttacaggagatattttatatatagtgtaattcaaaggttatcacaatatcacctcatcttttagtgatttttcaggcttattctcacagtttgcccacagtggagaaacattacaccagaaacttattatcttcgttgagaaagctaaatgtggatgaggacagaattattcctatggtaaataagtatactctatatttcgtttacgttttaggaaaattgatttattcttactacaattgtaataataatcagtaagcagtttggtatcagtaagaagtctagctctttttcttcttcttttgcttccttgtgctgctgtattattatatcataatttggttataatccttgaaccaaatgaaagagattaaatttattgttgtagttttagtgctgaacgatttctatggtccagatttctgtagcatcatcttttggacaattttgtatgataatgacatccttcatgaactaattcatgctcttgtttttccccttctcttataccaatataagctttatcctcatctttgtcattgacatacagggtatacattttcattggcaaagggatttgattttaatcttatgcattgaacaagcaaaataacaaatctcctttgatttttagtgctcctagttattttcttttgtaggatgatgtcaaaaaaattgttagtctttatgtctccagtcattcttaatagacgtaaaagcttcgtaaagaccttgatctttgtcgtccacatctgtttttccttttcaaaattgcattgtatgacatctacaaaactgcttgaattcaaattgatttgcatgttatgcgttgaattgcaactgtattttctttttgcccactccttcacatgctttccttgtgctttatttacatttcttatattttattatttttgcaatgcgttgacatatatctttcgtagttgctattgctactcagtttcatcacccagttttgcattgtattgttgacatacttttggtgtattcattcatccatttacacgtgcaacacacacacacacacacacacacacacacacacacatattttcctcctcaaatttcattgttttctcataaaattgatttcagtgagcattttcatattatttgaccacatttttctatgatacttcttatttgtttttcatattcctttattgagacaatgttttgtaggtttaccttaacactcttttgccatgtgggaagtatgttgtggatgacctcaaagaactggtatcctctttttcctggtaattttcatcgtcaatgtttttaactccaatctattggaaagagttttagtcataactctcataattgactatattatcgattaactattattattctgtttgtatcccttgctgaaaacatcttggtttccacacattacagagggaagctcaatcttccaggcagttctgtgttaggctttctgcaagcattgttgtttccaataacatggtatgatactttgatcttagtgaaattaaaagggaatgttttacataaaattgtttttcttcaaagtaaggagtatgttatatagatagcttagcagagtttctctatgcctgcctcgggaatattgatgcgcatgaggttttacgttgacgtggaaaaaaaggttctgcatttggtttatttgggatgccttgcttctcacatgtaaggggtaattaaataagagaaaagacatatttaattctgactgtgaaagataaataagattatttttgtaatgtggagagtacaaaagttggtgaggcaagtatcttttaagggagtggaggtctgaaagggtaacagaatcattcattacacacattcacccgtaaaatgattttgtgaggatttgctcgaggaattctggtataattcctctattaagtagcatccttttgatttatactgctgtagaatatattgatattttagaacaatagtgtcaggtgaaacatataagtaaagatgtttggattttgtttctttctactagcagctggatcaaaatagcggactcagctactcattgcaagattgtgccaatataaacactgtttgggcatcacttataattgaggaatgttctcgtcttggtttgatggtgagattagtatttcttgacgggtcaaatttttctagtacgtgaatttgatttatttcattttagtatttttgtgtagcccctggatcaagatcatctccccttgctattgctgcttcaactcatccacgcattacctgtgttgtgtgttatgatgagcggtcacttgcatttcatgctgttggttattccagaggatctcgtaaaccagcagtggtcataacatcatctgggactgcagtttcaaatcttcttcctgcggtgagtaaatattcatgctctatttaactctgtaaattcatggttttggtactgtcctggtcctctgactctagtgaccataaagttccatcacctttaacttccatacagccttcatacattcttcaaatagaagatgctgcatatcaccagtgatggttgtttgcttaaattgttttgctctgatacaaaattctataatgttcaggttgttgaggcttctcaagattttgtatctcttctattgctcacagctgatcgccctactgagctacaggatgctggggcaaaccaatcaataaatcaggttttacagataattatttcatccacgggcatagccattggttttataaatggaaacaggaaattgctattttattgtttaatcatgggattatatctagaagtggtcccacttgaaatgatcatctaagaagttagcattgtcgcctaactaaaatgcacctaatatcctccttaacacaatttttttttcttgtgttcctaaagctaaagaactgggatgtcagaaatcttctttctcaaaaacttaagctaaatagaaagttacatttgtatttaggtaaagaaaccaccgcattataccatgattgatcttatatcgtaaaaggagaggaaaaactagataaaaaagaaaaagaaaaataggacatgtatagaggatgtgtagtaatgagattacaaaattatgattccttcctaaattcactttttgatttggaaaaccagataaatcattttggttcttttgtgagattcttcttcaaccttcctgcacccaccgattgtattcctgctagaatggttcttacgacagttgattctgctgtacactgggcaacttcttcaccttgtggccctgttcatattaattgtcctttcagggagccactagaaaatagtcctagcaaatggatgtcaagctgtttaaaaggattagatttctggatcagtagtgctgaaccatttaccaagtattttgatgtacaatgtgctcatgcatgtaatattagccctcatgacatgtcagaggttgtaaatgcaattcaaaaagtaaaccaagggattctaattattggtgggattcatactgtggatgagatgtgggcggttcttctcttggctaaacacctttcatggcctgttgtagctgatattttgtcagggttacggttgagaaaacttttgacatcttttcctgaaattaaacctaacatattattcattgatcatcttgaccattctttgttatcagatgccgttaatgactggatgcatgttgatgtgattattcaggtatatcatcttcttgatactctgggttttttttttggtaatcactgtcaaaaatgcatagtccaaaaattgactcatttaataataaaaaattaatacacccgcatctctttaccctgcagaaaatagaacacattatagtccacatatgagtaatcttttaaagccattctatatatataaatcttagaataggcttctttgtggttcatagatgttatggtagttgcatattatttatttatttttctgtgttgattaactgccttcttaacatgtatcatgatcagattgggagtaggattacaagcaagcgtgtttcaaagatgttagagaactgctctccttgctcatatatcatggtggacaatcatccattccgctatgatccttctcatattgtaacacataggatacaaagtagcattatcaagtttgctaattatataatgcaagttgaatttctgcaaaagagaaacaaatggagctcttatctacacacagtgaatctgatggtaatcacctaagctgtacacactactgggtttgttttattctttttggtttgatataatatcctggttcatcagttccttctggacataagtttgagacatataatgtaaaagttaaaactctacggtccttttcttccaacatgttctttctaaaaagattagaaacgttaaaagtggagatcacaatgtaaaattctatacaaatgtaagctattcttttggggattatatatgttccttcgtaagttcttttccctattttgtaggtagccagggagttgtcatttcaaatctctgctgagtactccttgactgagcctcaagttgcacaagtaatttcatcagaactttctagtgatacagctcttttcatcggaaatagcatggcaatacgtgatgcagacatgtatggtcatggctggtcaagttgtgacagcacttcagctatggttttaaactctggcgcactttgtcaattggtttgggttgttgggaacagaggagcaagtggtattgatgggttggtcagtacagctgttggctttgcagtaggatgcaacaaacgggtaagttccttgtgtatcgtatttgtagaatgaatgtcatgactgtgtagggcactgattactggaattagggtgtccaacccattgctaccttagtggagaatgataatgagaaaattatctgggaaatcagttagttgttattacatggcttctttatagacagcgtttcatatttctgtgttattgttcaggtcatttgtgtaattggagatgtttcttttcttcatgataccaatggcttggcacttttgaagcaaaggtagttatcttgattcttatctgtgttattgtaatttatgttttgataaatttcccttttaacctcttattatcttctatatattgaaatgaaaatgtgactttgtaaagttttcatcattatatttatcctttaattttgttatccattcgatgttcaacttatttatattgcatctatccattaataagaaattcaacatactatcttgtaaattcaataataatttacaatgtatgcaggacatcacggaaaccaatgacggtgctagtgaataacaatcatggaggtgcgattttcagccttcttccaattgctgaaagaactgaagaaagaatactaaatcaatatttctacacttctcatgacatttcaatccgtggactgtgtatggcacatgggtaaaatcttttatgactagttaataagtgaacttgtacaacatgcatcccaattgtaggaactttcattttatttctattttgttcccctgtttatcttttttcccttaaagttattgagcagacatacatcattttatgattgtatttgggatgaaggtttgcggaaagtatttgcagttgtacatttctgcgaaagcatatttgagttgaatacatgactggattaaaatatagcttgtaccaagtgatcatattttgatcgtggattccacttaaaatggaagatcaatagacatactagttttgatgtgcctatagacttaattgcatgattatttttccgccacatggggctagctcaattggatgggaatgttgtgtgtttgggaagtgtaaggggttctaatccctgttgtatcataaaatgaaaaaaaaaagaaagaaagaaannnagaaagaaagaaagaaaaacaatcggatgattatttttctactgtactgaaactatgctgcatgatgtagagtttacaaaatcaaaaaaaaaaaaaaaaaaactatgctgcatgtttttattaacaacctaatcttggttcccacttgtgtatatttgtgagttgaaaagtatttactttttaacttaaaaatatgttgactgcatagtgtgaagcatgtggaagtacagacaaaggccgaccttcatgatgcattagtccgatctaaacaccaagagctggattgtgttattgaggttgtgagctctattgattccaatgctacctttcacaggttgttaccttatgttgctcttcaatacaagtcagttgtgagcttattaacttatttttgtcatttctgcttctcatgtaagtattttgagaaagtttgctcgtcaagcggcagatcgtgctttaagattccttctaaggcttcctgttgaagattctttttcagactttttttgttgcaaagtccaatctatcaagtactcaatatataggtgattttgattccttgtttcaacttcgttttattttataaaataacttacaaaggcaaaacagatttaattgtttctgttctctttgtgacagaataccattatgtgcaccacctactatgagtactgttgatcacagcagcacaagcttctatagagaagggtttatcatatctttgtctcttgaagatggatcggttggatttggtgaggttagtgttggttgactgtaactccccctatatggagcagagtatggtcctgtttggctaagtttttttttttagctaaaagtataagataagtataagcttggacttatttttaccgtttgaataactattgtatggatctttttttaatgaaaagtgtttttcaaagtttggatatcattaaaaaaaaatcttttgtgagtaaattaggaattatgtaaattattttaatttaaaaatagcttctcaaaaatctttttgagagaagctaaaaattttagcttcttccataaagacttaaattaaaaaaggacttttgattttttatccaaacaccctagaaggatttttttaattctaaaagctaaaaaagagcttatagaagttaagccaaacagagtctatttgatgtcagttagcttctcaagtgaattgtatgttctacagtgttgctgaaaaatttagtcttgtagtgatgcttgcttgatcttgttacatttctctgtccaacttttcttcatcatgtcatttatctttggctcattgtttattcctactactgttgcacgtcaacctcccgcacaaaagtataagaagatataactagaggaaatcgagagtctcgatcatctaatcatttatttgtcttgtaaacaggtttctccatttaatgtcagcaatgcaaacttgctagaagtggaagaacaactgaggtttcttcttcacaaaatgaaagagactgaaattagttgtttccttcctctgcttaagggttcattttcctcttggatatggacccacttgggaatcctggtagattgaattatttttgtaatgtatcatcatatgcttgattaataatattgaaagaagaggagctaaatatatgctcacataaattcttctattttgaattttgtgcagccatcatctctcttcccaagtgttagatgtggtttggaaatggctattctcaatgccttagctgcaagacaaggtctcgatcttttaagtttactccatgctcaaaatattgaagctatacctaaaagatcatcaaatgtgaaaatttgtggtcttgttgattccagtggaacacccactgaggttgctaatattgttgccaaacttgtagaagaaggttttggtgcaataaagctgaaggtcagtttgtttaaaatccaattcagttcttaaaagaattagagaataggtatttattgatatcaaagaaagaattacaaagttccaaactttttgagacagctggtatctacgtagagtaatcttttactctaaataattcacacaaaattccacatcctcataagactctatcttagaatttataggctagactaataaagactcctaactagccagccaatagcaatctagtattagacatacttaaacaatcatctcagccactaatgacttgacaaattggcctctaaaccctaaaatgctaatgaattgtattattgagactaatatcaaggcgtagcactataatatgtgccgacacctttggctatatgaataaagagaattgattctgcaggaattattagtaggcttctcagttatcatacttcaattggtgaccaggtagctcgccagagaagtcccttacacgatgctgaagtaatacaagaagtaagaaagaagattggatacgaaattgaactccgtgtagatgccaatcgaaactggacctatgcagaagctacagagtttggctccttagtgaaggaatgtgatctgcagtatattgaggtagagtttatggattgttactaaatttactatatgagtccaggttaagcattataataatgtaatttattgtagaatctattctattacgggtcgtgatccgtgatttggtatagattattcagtttgtacatcttctgcctacatttgatttaggagtatatacatcgaattccaggtaatgaatgagaataatgggtacctctttttgtactatttgcagctttcattttgtgtcatacattgccttattcaatttgctctagttctgctgtaattcaacaacctacctgtaaatgtatgtaactaggcttgagtttcatgtgttttaggaacctgttcagaatgaggctgatattatcaagttttgtgaagaaagtgggttacctgtggcactggatgaaactattgattgtcttcaagaaaatccacttaatgtattaatgaagtatactcatccaggaatagttgctattgtaagtgtttgttccttttaattagtacaatttattgatgtaaacattgtttagggtcaattagcttatcgttcttcttgtgaagaaactaagggattgcatatttctcattcaaagtgcattgccacttgggtaagtcacatctaaaaggttttttaggcaatcagatacagaatttttctaattgtatgaccaattggtgcttgactcattttgtagtttctcttattaataatataatttatacaatatgtagtttcttcatgttatatt

SEQ ID NO: 13925 - DNA, 1416 bp, Cannabis sativa
  modified_base (27)..(30): a, c, t, g, unknown or other
actaatcagattgtaaagagttttatnnnnggcataaaacccaacaaaaacttgatcatcataatgttacaattgaaatggatagtttagtagttgtagaaactatactcgaagtagccttgtgtgttcagcttttggttttctaattaagattctaagcgtattttatcttcttttaataatgttgtgttatttttgtcaagcgatctacgaatcaacttacgtactttgttgccaagagctctcgtttaatttgttagttgatcgtatgttttcgaagacttctactccgtctgaattgttatccattttaaagtgtgattgctccatttagtaaagtttgcaaatttggtttaaaaaaaactcctactagtggtgagaacgagttgggatggtggcactgggtgatgaatagccgatcattgatttgcctctcttccctatatatttttacttcatgttgtattgttcctctttttgtttttttttgttttttttttttttttgctctctctcactatcttttgccttcactcttttctttgcaggtgataaaagcagtggttggagttttggttctaagtagttgtgggttcggttcggctgagctatatataactttttatttctctattgggtttgaaaatatcaagaagttaaaatgttaatttttgcttcttattttgtgtgtaatattacagataaatatggtaatgtataacaattgtttttgatccatagtatttttgttttgagataatacattttatttgtagttttttaaatttttaattctcaacaaaaatgttaaattactttttctttttaataatagttaatgaaaaaataatttgttaattatttttaatttatttattattattttaataatttatataatattttaaaaaataaatataacgacgcgatatgatggtagttggtttctttagactttaacaaggtaggactctaaaagtatacagtgacactcgatgaggaactatacaaggttcttactgacacgcattgaagggttactaaaaattaccttttcagttaaacacattagtgacccatagtgaagagtcactaaaaatctttaaactctcttgaagtgtgtcactaaaatatatttttgtaataccgtcaaaaactcttgaagttgaagtcataagctctgataccaaattaaaaaagaaagataataaaaaatatatatggaaggataaaaggcaaaaaaaatttattaaaaataaattgtattcattatttaatggtttatatagtcaattaatacagaatataatcaatatatataaaggaaaacattaaggagttgaggtggcaatctatatgattttttttttcctaatcttagctctctcaatatttcatattatttcattagttttt

SEQ ID NO: 13926 - DNA, 2821 bp, Cannabis sativa
  modified_base (882)..(891): a, c, t, g, unknown or other
  modified_base (984)..(986): a, c, t, g, unknown or other
taataataataataatatacatatgttatagatgtattcaatgattaaatattatatagtatagttttggagagactttagcaaagagccaaggccagggtgcggggaccagtagggggttttgcggtggtgttagggcggtgcagacgggggcgcatgggaccggtttatgagtgggctccactgcgggccgggttgggccatggaggaggggcaaggccgcatggctccgacccccttagctattgaattggcttgtctcttttgtcatctattaattaaagaaaagaaaatttgaaataaattaagaagataataaaagggtgacaatgatttaatagggtggtgtccatatcttcttacacctaaagggcatgggctgtcccaatttttagtactttagtcccacttgttctatatataaactccaaaattatctaattaatatgaattaattgtcatacatgcattacataattctttttttttttttttctttttacaacactaccacaaaaatagttttttttttcctattaaccgatgcagttgattaatataaaatttttacgttaatttataacagacgatgtatttgtcgtgattttcaaatgatgcaaagcaaacacttcccaattttcgtgttgcaatagtataatatatacacgttcattattagaggtgacacaataaacgaatatattagctcaaaaccgacgctaatggatctttgtaatggtttatataaaaaaaggtaaatactattctggatcctgtgttttgcaaaagttatcaattagattttctgttttgttaaatgataaaatagactttatatttttcaaaatagtaccatgagttcaattttcaacaattttattnnnnnnnnnnaccaactttaagataatttctaacgcgaacagatacagaaaatataatcagttttgtcataatatttttagatcagattattattaaattttnnnttgacaaaaaatcagtttaggataaatcctatttgtataattttagaaaatatatgatctattttgtcatttaataaaataaaaaatctaattaataatttttataaaacacatgatctaaaataatatttaccctacaagtaacacaggtttgatgtatatctactttctttttaaccctacaaaagattaaaataaaaactaaggtccaagctagtcctagctaggttagaaagcataagagagaaaacaaagctgattagaattttgactctatatattatatataagacattaagatgtgaagttttaacttttttataatatatttgtgggttaatagtatgagaaaaatcaacaaaagtatttatatatatattcaattgtatcgatcatcattatatgatatctttcaaacacagagacgtgggtgttatgttatttttatcaatttgtgacatgacatgattaaatttcaatatataatatatgtttaaccctaaatgatcatgagtatatttgagagtaatatataatattattaatattcaattaaaatatttaacaaccaaatatagaaatataaataatcaagagaaagtcaaaatagtgtaccccaccgacatgaaaggtaagtaagtgacacttttgtaaccatattaacatcaaaaaatttatttgatcgaatgtacataaaatatataatatagagattttgtcctgtgatgtatttttacagaatgtatttcgtggtatattagatggatcttacggtacattagacgagtgtcagagtacgttactatttttaaccctaattacccttagatcaatctcaaccctcaaatcaaataagtctctcatctaacggccgccatacattacggaataaatttcgtaaaagtacaattacgagacaaaatcatgtccatatatataaataatctaactacttgtccaacttgttcatattgtagatataacccgatacatggaactaaaaaaaataactaaaattatttatttgaaaattataaatagagtgaaaatcatgattggatgagtgtcggagaccaagagattacatagtatatggcgtaatttgtttttttttttttttatctatttggattggtctctctatataataaatatattcttttaaaaggaattgaaatattcattcaattaggtttaatgggacaaaactttatagggaagccaaaacaaaacattgcaataaaccaaatcaaaatatgacaaaccacgtccattagaaatataagatcaatgaacaaagtccttctcataaggaacaccaactatgtattggatgcaaaacacaacacacaaaacaattaaaggtccccacttataaggtgataaacactatttttttttcttttttgggtaagtaattaagaaagtttcattaatattatcaacgagcaatacaaagcaaaggaaaaacaaataaaaaacccaaaggccaacttgcaaagcaactgtacaaaaaatacaatggctttaaagctcaaaaccaatcaataattttcttatcttattatatacaatattgctttttgcatgtttaacaatcaaagcttttctcataactttgcaatattctattatgtacacagttgcaagcctagcttccatatccaacaaacttatgtttctgtacaacaccaattcatcccaaaaaaccctctcaaattcaggactcaactctttgtgaaaaagagagaatttttacatacctgagttacttgcactaataccaactcgaattaagtagggccttgtaatcccaccaattacaatcttttaag

SEQ ID NO: 13927 - DNA, 6873 bp, Cannabis sativa
tgctccaaagaaaaagacggatacttactgtggttcgctggaaatttggcttcaggaagtgctgcaggagcaaccacttctttatttctgtatcatttagattatgcacgaacaagactagggactgatgcaagggagcattctgttaatggtcagcgtcagttcaaagggttaattgatgtttaccgtaaaactttgtcaagtgacggaatagtaggtctatattgaggatttggagcttcaataatggggattacactgtaccgaggcatgtactttggaatatatgacaccatgaagcctatcattttggttggccctttagaggtaatcatttcttctttgtatttatttttttctttttaaagatctattataaattcaagaaggttttattttgaaactttaaaatctaatcaactaatgtgaatttgactctggtacataaattgttggacacaacctctctagcacacatctttactggctccctatgtgaagttgtgaacactgggttataattctatttatactgtgttattcaattgattttgagcatcttcttgaggttatacattagttttcatttctatcatgttctgatcacaactatcttggacactttcatttttgagttcattcttatgtcgcaatttgtgtgtatttgtaaattaaccacatgtgtgtagcctgtttttattatggtcattcaaatatgttctaacgatttagaacccttgtcaataatttcaaatctcaagtaattttatcttgtaaattatctgcaggggaatttcctagctagtttttttctaggttggactattacaacagtctctggggtgtgtgcatatccttttgacactcttcgtagaagaatgatgttgacctctggtcaatcctctaagtatcgcaatgcagtgcatgcttttcgtgagattgttcgccttgaaggttacatggcactgtatcgaggagttacagcaaatatgcttcttggtgttgctggtgctggagttcttgcaggatacgatcagctacaccgaatggcaggtagacatggttactattttgagccacgacaaacaactttgaagtgaaagtagaatctggatccagttgcgtacactagtattttatttattcttttcttttccttttcagttgattcataccctaaaagggtaaatctaaaatctgtgaaaatactgatttgaatcatttatcttcctgataagccagggggaataacttacacatgtatattctatgtacagttgagacgcacaatctttaatcaatcttactattggtaggattgttggtacaaaagcggtagttgaaacatattctttgtcaatttatttgttcttctgatttgaactggagttattctttgaagatggaatatagttttataattcattgttttgtcgtgtaaaactttcattttaaaaaattttcttgtagtaatttcttcaaactttacatatcttggactcatttttattgaacaattcaattgtaaattttgtgatggtggtatgtgccactaaattatgccctaacattctacaacatggcttaagacctaatatgtcaaaaatctatgacatgttattgtgtaaaaatttaattacacaatttgtctgcaaatatcattattcatttaacaatttaattcaaaaatttgtttaatatttgatgatttcagtattcataattgaagttagtgccaataatttgttggttgaaacagttagcgatcccagtaaattgatcacctattttatatctttcattaccaatgtgcggaacagaggtaaacaacttgtcccaattaaggggacaaacatagatcaatggaatttgagggtatttcatacatctctctgagcatggagtagtgcaatttgattgcaaactagtcataactcagccttggtattcagatctaaatgccttaaggttagtaaaatcattcctctttaaattagattgtatgatttgggattgcattattaggggaataattgtctaattgtcttagtaagcacaattagaaaaccatttatggctgataaagtaactaaagaacgttcaatggtgaaatttgcatcactttcccagccttgcttctgcgagcgtcattcggtgtcacctgtgtgacaatggcagtcatgccatcaaaacttcaaactttcataacttgctcaattttgatctaaattgagttttgtaaaaagcaaacttgcataatttttcaccaactttcattataaaataattttagaagcaaatttagcaataaaggctcgattaatgtctttaaatcttcaaagtctaaaccaccataagctttaggctggcaaatggaatcccagactttaaaaacacataaatctcgattgctcattgccacccgtccaccaaaactttacaattgaagcatccatctatctacattttttcttaggaattaagtttgaagccataacataagacggcaagctctgggcgactgccttaatgagagtagatcttccatctttagtaagtaacttcaccttccagcctgataatcgatctgacatttagcttgtccaaaagaaacttgaaatccttacatcttggtgtagacctcaacaaagggttgccaaggtaaatctcatcaaaaggtaagatattcatttgaagaggtctaggcactgaacgctaattgtaaagagtattgttggaagagaaaagagccctagatttttggaaattagccatggcctgaccactgttgatatctcaagatgcaatctttaagaaccaaggcttcacctctatttgcacaaaaaaagagaagactgtcgtctacaaagacacaagcaagttatggcgagagatttggatgtcgtggatgttcccattaactttctctttatgcaaaagtttagacagaacttcactacataaaagaaaaagaaatgggaataaaggatcatcttgacgaaaccccctttaaagaaataatctttttagcacagatctattaagaaggactaatacactaactaagctaacacaaaacataatcaatttcataaactcctcagagaaaccattgcccttaagcacatgagcaagaaatgaccattcaatgtagtcataggccttactcatatctattttgattgccatcagaccacccaaaactttttcctcttaaggcaatgaatcacttcttgggcaaggaccaaacactctccaatccatcaggcagagataaaggcagcctaaaatgacttataagacgatacgtaatgcctctaagatggttagagatattttttaccaggaccttataaagcaaagttacatagagttatgagacgatagtgattaaaactttagcattatgcttcttaggaataaggcatataaaggaatgatttaaatccttgtgaaactcgccactttaaaaagcctccttaatgaaagtaattaaggaaccacccacaacttcccattgagatctatgaaaataaccattcatattgtctggcctcgaggatctagacatattcaaagcccatacgaccttcttaatctcctcagtaggcatcaccattaacttctcattctcagcacttgaaacaatttccaagaaagagtctcaaaattatcaagaataataggacaggaggaagtaaaaagatataaaagtttaagattgaagtattcccatatgtccactcgattggaaatccaagacccgtcattttttttgatcccccaaatatgatttttcttgtgtctaaaggcatggaagaacttcgtattttgattaccaagtctgagccaagaatcacgagatttctgtctccacattttttcttgagtttcccacagctcctacagtttctctttgatcacaaatttctcaaagtcaaagtccaacaaactagaaggactttgaatcgctaaaagacaatcttctaaaatgcagatggtctctctatctttaatgaatttcaaataagaattgagttgtttcccctgattatcataagcccctttgcccccaagaatctgtaatgatcttcccacactctgagttcccagtctagaaaacaaaaagcaatagggagaaccccttttatctttgtccagatgcgtatctagaataatagggccgtgatcaaagcccagaataggaagattagagacacccgccttgggaaagtcagtacaccaagccgacaagcaaatagcccgataaattttttcccacaccaaattgttattttggcggttattttccaacgtaaagagacccctaacactctttaattccacaccacctactttgaacataaaaaatttaaggatcaagtgacccttcttcctgctccctatcttatcgttgtcattgatggtttcattaagatcaccaataagaacctaagaaggaagacatataatgattctagattgaagagagttccaaaaagactttttgtgactactatagggagagtcatgagccaagaagagactccaatccttagaaccttgttctccaaaaataattgcttcaatgactgaagaatcaacctaaagaacctttatttggaggccagccttcccacacaaacagaggcctccgaccaaacaattatttggaacaataactgagtcaaccaaaccaaatctcttgactttagaaagcatctgataaaactgaattttagtgtccattagaaagaaaatatcacgatctctctttctcaaagtgaaaataatagcattgattgcacgagactaagccaagcctcggtaattccacgccaatattttcatgaggacggcgggggcatgttgggggctgcatcctcaccctagctaatattggctggtattccacattgacttccactaagtctttaaactttccaagtaaagtcaaacttgatcatttcctttgactagtagatgaagagcctttacgagtacccatccatcttttaactgttaattcattagcattagcctccattgcacttggagagaaagaatgttcacttatctcctctgaaactccttcaggaactactgtcaagttgatttgagaagaaaggggacataggtacaattcactcctaccaataaggggcctgaatccaaaataggtaagggctttcctttttttggaaccaaattgataagagatcttatccgatagagaggttgggttgtaaattagagtgtggttgggtcaataaatagggacttcatttgggccgtagagattggcccaatcaattgggcctatgaatgtttccaactcagttctagcaaaagtagtaacatgaatcgaaagatcaaccatctaagggagagattggggcttagtggataaacaaagatctttgtggggtaggtccaccatttgagctaatgggggcccagtatttggaataatttatatttcttgattattatcaatttcttgagtgccaaggacattgtataggttagtagaattcccactttcttgcatttttccattctatacttgattcgtcaaagaatcgtgctccactatattgtccttggtagtactattcccactctagacctagccaccgatagcaggcaccgtccccagcaaatgcacggggccaggagcagaaatatttcttaaattcgacgaagcaggggccttacccttcaaagatctagaattatcggaatccataaggctacctttgtttcttaggagacacttcctatttttgttccagtgagagaagatgaaggctttatgccgagcagtggtatcccctagtaattaagtcaaatgttgagcaaaatacgagaagcataaggaaatcggactctcaacatttatccagtcttcataaattttgacagtattgcccaccagagggtagaccatggcaatgacagccgtgcatctactggacatgtgaccaacagcaccacacttgaaacacactaaaggaagctttacaaatttaaacggaatccatctctttggcttgtccttcctggcaagaaaaaacccaataatgataggtttagatatcatcattatttcaacagtaaatttcatgtaacctttcctttgcatctcctcattagaagttgggtctgtatcacgcagcacccccacctgccacaagaggaaagttagaatgattaagacaagggggtggtaagccatgagcctaaaccaaaaaagaccaaagtcaaactcttccagatcccagataccatcctctggctattcacgaatattgagaagctgacgattcacaatccagggcctgaaatgcaagaccttagcaccgtcctgttcagaattgaaatcgaattataaaataccattttggagttcttttacgtcctaggaatcgagcatttgccatacctccaccagaatattttttagaagacctttagaaaagaacttatgacccatgaactttcccaatagcaattttttagagttaacttcttctcccaccttgacttcaaccacttcaatacattgggaaggatcaaagaaacctaaaggaggcagcgcagaggaaaaagcattcatagaaaagaaatatgaaagagaacactaccaagagaaatagagaaatgaaggaatcctaaactctcaaatactagaaactccaacagggcagagaaagcaatttgtattggccgactcatttatgaaatagaatgacaatgggaacaggaataagaatagaatgaaattaaatttaaaatgtattaaaaaaattgataaaaaaattatataaaaaaagggtaaatggcggcaaaacctccaaaactttcattttg

SEQ ID NO: 13928 - DNA, 4089 bp, Cannabis sativa
ttaatttgacaggaattacttcagttggaagaagatgtaaatcttctggaggaaatgtacccacaaggagagaaggtaatgtactgtcagacttgtggctagagttcctgccttttcctttctcttcatttgctgattttcttcttcaaattcaggctgagacttcttgggctctgactgttcttggttacttggcaaaacttgtcttggggattttggggtgagtgcttattttgtattcgaagttttgaatggttcttctgtttttggctctccttttatatttttcagggatacttttcatacttttttaggtattttacaaaaggcaacgatatataattatgtaaagcatattaaatcatatttcatattaacatcatatgaaaacttttagttttgttttatacatccggataggtggatttgaaattgagacctcctcattgtgaggagtactgtagtgccaaataccaataggcgataccactgagagcttttagttagaagcttatagttgatagtatttattgatttttggaatttaactgacgttcatagtaacataattaaaggagaaaaaaaacgaaaggggtggggggatgaagtgaaaactcattgtaggagagggacagaaggagggaaggaatttttttgttctgaacttttgtttgtgaggattgtagagatttaataattatgtgggagtactattgtaattaaagcagacaatatgatgttgaagcagcattgctacaagtttgcatatgtgtacctttggacattaacaataaaaagggaaaaaattatttttctattttgcagtacaagtactctacattgtggtcaatttctttctccgttgaagcaacactatgattaatcttttgttgtcacttgtcaggttgattgtttctatcgcttggattgctcacataatcatctatttgttgattgaccctccactttctgctttcctgaatgaggttttcatcaagctggatgatgtttggggtacataatataaatcctaatcttatatttattttgtcgcttatttattgagtttatttatccttatacctgatgatactttttaaccaggtcttttgggaactgcggcatttgcatttttctgcttctatctcttgctagctgttattgctggagcaatgatgcttggccttagattggttttcattacaattcatcccatgaagtaacaaaattttctgttcttttctaatttaatttttatttaccagagtttattcaactttgtttgctaataattctggttacttatttaatccaggtggggagctacactgatgaactcatttttatttaatgtggcactaattctcctatgctcaatcaggttggcatgttagtctatttttattttcatccatgttagttaggctctgttgacgtattatcatatagactggactaggtagtcatgctctaaacttttgctctaagtcaactacaataggacacgtatgagtatgaaggctcctttgctacttgaggttagctcaagataataataataatgtctactatgctgtttatttagtaatattcattcagggaagtcatgggtttcatattgccagttataactgtctcaggatacctttcacttattaaacgaaaggcatgtttttatataatgcagggtatctgattgtatgtcatggttttagcatatataattagggggtttagagagttaatttgatggagtggatggaggcagttgctcttcagtcattacatagctattttcttaccagaagtatggttgcttatcttgttgtctcttcttttcagtgtgatccagttctgctctacggcgtttgcttactatgctcaagcaactgcagctcaggaaatatttggtcacactttgcaatctcttcgtggaattaaatatttgtacaagtgagttgcagttaccctgatgcactattaaccatttcttttatcaggtttatatgatttgctgatttgaatgggcatttttgttaaattcacaggtacaatgtatttcaaattgcatttatcatcctcgcgggattgacctttgtgtattatgctgccttcgtaagtcttttaacatttttttctttcatatgcattcgatatgcttccctagtttttagttaatggcctcttgttactctttgtatttaattctcgatgaatatgcagggatggagaagaagaaaacctagtggcaggttccaactttcctcttaagctatgtttttggctagaaaaccatgcacccatatgatggacccatcagaattctcagttttaacatatcttttggagtggtttgcatttttggatggcatcgtctagttttgttctttgttgagagatttagcgaaatgggcggatatcatctgattctgaatcgggttagtgcagtgggaatggcatttgataccactgttttttcttctccttttttcatatgctttactctttttctttgtatctattattcctttgtttgatctgtgtttaaaaactggctttttggtcatgtaatttagatatcctcttcacacatgcaaattgggttttattggaaatatccttgatgtaatataaccatgaagaacaaatagttgtactttgcattagtttcatgtagctgtaaccattattttatccaagtttaatttgtttgttcaaatatcagacttttgttcttacttcaaacgtccccatctgggcttccatagcttattacattgattaagtatcttgagttttgaatgatcatctttctcaaattttaaacagaaactttgagagtactctagcaaactatacccttaattctcatcatcatcgtcgtataattttagccattcgatgattttgtcactacgttcacacacattgagagttgtctttccatcaggcatgacagtatcatagggcgaatcttctccgaattcagttggcaataaactaaagtgtaaacttggttcccagtctgcctctttgatcaccttcagtatctccttcagtataatcttactagcctttggagtgaagtgtattccatctctgaacaagcatccaaatatacaaaggtatattattacacaccctaaccaaaatagcacataccattggcattgaattattattcaaactttaactcacaagaagcaagtagttttccaattcttgtttttctgaattgaagtccacatatcaacgaccttgatattcatctctttacatagctctaaacaagcgtctgagtactctcgacactgctcatttgttctacccatatctccattttcactatatacatttttttagttataacaaaaagaaaaaagttattaagactgattgtaataataatactaagacaaaacaaaaacccaataattataagaacctatagaattcatgaatttgttcctcatttacaggaggagcagtgagaaagattatgtgagttttttctgaaaggtcctataaatttggaagtaaaacaagtgttagacaatgaattcaatgatcattggtgataaaatatgataaatgacaaaagttttaaaagaaagagattgaaaaccttgagatgggtagcaattttgctcatattttgaacatattcatgaagtgggacatgagggcctaatccagaaggatgtggacgcaatgagtcattacctccaaagtagactatcaccaaagaaggttgaattgctgcatccttaaaatgtgtaattttcacatactattattactctaaagatgaatctattatgtcactgttctgtttttatacataatttttagaataataggtagttcatttattaatacctttggaaaaacttgatccaaaatttggacagcacgccttgagttccaaccacagtaacctcgtaatatgatgtctgcctatatatgacatttttttttaaataaagatcataagatttattaattaataaattcgttcaaaacaatagaacgcaattcagaggaacagtcttccagctgaagcacacgacctgtagagaaacaagagtc

SEQ ID NO: 13929 - DNA, 4556 bp, Cannabis sativa
ttttttttcccttcttcaaagtttggatttattaaccatttggtgagatttgattggcataagcataatatagatgttgaggttattattatgatatgttagtttgtggttaggtataagaattgttagccaaaatagcaataaggggtaatccatgttttggtgaaaaatgatttgtaataataaagcttgtaaaagcaggcatttatatttggtttttggtccctacatacaaaatggtgtttggcaatgagtctattctattcttttttggtagtattatattaattcaaccgagtttttgacccatttggctttggtggtggaattgtatctcactgcacattcacatgcacatgctcaatcccaatgcttattattcaatgtcaatgccatctcattctcatattagcttttaagtcaaggctaaacctacaacacataacacaaaacaaaaatcaatgtatttatttatatataaaatgaaagaatataaaataaaaggacattattggttgttactggtcacgggttatgttccaaagttagttttgtaatatgttaaaactagagattaagggtgagaatacgataagatccgtgtaacttgtttataagaatattttttttaaatcatgtaatatgtttatgatttgttaaaatattaaaattactgtaaataagttattaacgggttaatatcacattaacattgtcaatccgtatacaatccaaatttatttaagacaaaatcccaaacccaccgactcttatataagtttcaaatcgtgttatcgtatttgactccttttaccacttggctaacaagaagtggttaaaacaattttcatttttatgttttgtttgttgcattctgagtgaattgaatgaatgaaaggaatagtagtactagtagtagtaattggtggcagtgttgcagtggcagtattccgaaaacccaacttgaaaaatcaaaccaatgatgtgataataaatgtaggaggaaatgttattatgtttttagaaagacaaaaaagaacaaaagacaaaatctgacagaaaaaccgcatttttatatattaatacatccaaaactgtcagaattcagaaccacccaaccagcacggtgctcaacacaaaaactaaactaaactatattcattgagaagaagaagctgaacaaggaaacaaagagtaataaattatttctcttttattttttgactatttttatgataatttgaatttaaagagtaataaatataaaataaaataaaaaaaaaaaaaggaaagagcttttagcttttcagatccaaatttctaaaagagacatattctacctatgaaaattattatgtatggtatgtaaattaatcaaatttatggggatccgatccaatcccacaatttattttttaaaaattaagaaaattaaggtaagaattaagacatatatatatatataattataggaagaatggtgggatatgctaatgtgcgctgattagaataatacgccatacgcggtcgcacagtctttctatatctaatttcacacttaagacactgagagagaagagaagagaagagtcagtccccaaaatcaaataaaaatactttctttttctctttcttagtagaaaaaccaaaggaaaatatgatggaagagaaagatgatttgaatgtgaatcatgtgaatatgagtagtagtagtgttgttaatggcggagtaattggaggaggaacacctgcaattccttatgtgaaagtgatgaccgatgcccaactccaaacccttcggaagcagattgcagcctatgccaccatttgtgagcaactagttcagatgcacaagaaccacacttctcaacttgacctttcaggttttattttcaattttcatttctgggttttgatttaatacactttttattatatcaagtttagacctttagccttaatttattgctagccccatttaagtagagactattatacacttttattaactttattattatcagtttcaagacatttctgtttcagtgtgtattttgtttagtcttaatataatttcatgacatttcttctctttcaagcaggatttttctgggttttgatttagtacactttttcttttatggaatatgaacccaagtttagtcctttagtcataatttattgcagcccaacgcatttcaactataaatattctcttatttattatcatgtggttgtacttgaattagtagagactatgtatatactgtgtgtttattaatttactgacagtttcaggacatttctattatatcagattggttcttctgtcagtttcagtgtatattttgttctcttgatttattatgggatactgtgaattaaatgataaaatattgagtcatatattaaaacatgggttatgagatggaatcccctgattgttgtcatggctgattggttcatttcctatttgttgttcttgttaatttattgcagccaatgcatttcaacactaaatattcatcttatttattatcaagtggttgtctttattaatttattgacagtttcaagacatttctattatatatcagattggttattctgtgtgtttcagtgtatattttgttcacatgattctgatttatcctttgttgttgttgtttcttttaggagttaggttggggaatgtttactgtgatcaattaatgacttcttctgggcacaaaatcactgccagacaaagatggactccaacacccgtgcagctacaaaatcttgagcgtatttttgatcaaggcaatggaactcctaccaagcaaaagattaaagagataacctctgatctcagccagtatggccaaatttccgaaaccaatgtctacaattggttccagaataggcgagctcgatccaaaaggaagcaacagaatgcagcagctcccaataataataataacaacaacaataataataataataatgctgaatcagaattcgaaactgatatcgagtcacccaaggacaagaagactaagcctgaggaatttcactcccaacacaatcacctaattccaagggctaatgatgatattaactttcacaactctgagctgggttctgacctgcatttctttgatccacagtccagtaaaggagataccattttcacatcgagtactgatttacggcctcctagagacttgagtccattgccattttatgatggtctcctctccaattcaagtgtgtatattcattctataaagctctttcctttgttctggttttacacaaatttacaccatttcattaattgtgtcttcacatcacaaacactggacatgtatgcataataccatatggtgccatgaatgaaactaatgcaaaagcattaagtagtgtttggtttggtgttttcttttgtaggaaatgagcacttaaatggaaagatggaaatgcctggaagttatagtctttatgagcatgcagaggacttcaacatgacagggtgatgagggtggttagttcagtacctaccgagaccgataacggtgtcagtggcagtgtcagtgtgtgtgtgtgtgtgatgacttagattgtgaatagaagaggcaccaggctgttgggtgttattatcaatcaatgccattgggtatatatttacttagtataaagagtaaagactaacttagaagagttttatgtttaatgtttttaatttttctttttgagagagaagagtgagttatcatactcaaatttaaggtgggtgacttctagaagtgtgccaatttcacttttgaaaatttgccagacttttttttttgtgtgtgtgtaatgttttgaggtttgaattgactgataatattttgtgttaatagagtggaaatattatcaattatttccttggttttttttttgtttaatttttgtattttcaagttgcaagttgcaaggttgagctttttagttttgacagcatttgtagtccttccatggctatgggatatctgcaaattttcttaatataatcttatgaagtgaatgtctaactaactaatccctcctcttgtttatagtacttctaacttattcttgaaattctaaattttcagctgtgaaatctaaaaaaaaaatctaaagcaaccataatgataatgacgtttatacccaagaacgaatgtgttgttgcatttaaatgagagaacgaattaaattttctttcatttattctttaaatatttactttgattaaatattattatttaatgtaaggtaaatattattttggaccttttgtatttttaaatgataaaatagaccctatattttttaaaatagtcaatataagaccattagtttaattttcaatagttttattttttaatataatcaactttaagataatttttaacacgaacagatacagaaaatgtaactagttttgtcataacatgtttagattagattattaatatgaattattttgacaaaaaagttagtttagggtcctatttgtacaattttggaaaatacagggttcattttgt

SEQ ID NO: 13930 - DNA, 3087 bp, Cannabis sativa
attttaaaatttaaatataaaaaaacatatattttgttttaaaaaagttgcagaaattcttttaatggtcgggttgaaacagatattcaacatgcccgttaatagttgttgaaataagctccgttatttggattgtgatttcttcttgttgttttggtggttacttaggcaggttagtaaaatgtaactgacccctctctaacaattatcttcttatcttcttattttcttttttattgttactgattttacaattacacgagttgctcctaacttgttttcaaaggacttggctggagttttgggtcgcattattctagcatttttttttgagtaggccgagttttatttggctagccttgtgtttaaaatttctactccatgcaacaaaaccattaacattatagagttaggctctttacttgacaggattatctgtagtttaattatttttcttattgctctttgttagaaatgatggcttttgttgcttctgtcattaatgtttttctctcttctccatcctcaactttctttgttagagaattcccacccaatacccatattgtggcataatatatttagaaagtgactgaattctgcttgatttgaactttttttttatactccatatttaaatgcttgttttaggtattatgaatccgggtgtaacggctatcttttgccggttaaatttgagatctcattggaaatttgatttatataggtgagatgttggggatctgatgctgtctgtctatgccaaccatactcttggtgtcagtagatataccttttacattttgagagattttgatcatgatattatgaatgaataaaagacgtagtagtggaaatggaatagaaaagaaagctcatcactccaaaccagaaaagcagtgtttgtaaatcagtttgtactaaagaagtaatttatgaatataacttttaagtcttgcagggctaatgcattcgttttattaaagatgattacattattatctctaactttgaatcttgcatatatctctgtataagaattccttatatatgtgacttgactttaatgagaaatataatcagtagtagtagcactttgctcttgctactctaattcttagttcttgttgttcctcccatgtatatatgtgcttgtagctattatgtaatctctagcaaaaaaaatgtacgaggtaaaatgttttttttttttttttttgttaaatgggagtattttgcactttgatgaccttcaacacctaaataatttaatgattagtgtaagtaacctacgtatggcaaattattccttactaactctatagatctgtaattaactctatagatttgtaagcatattggaaagaacacacctctcattgtctctagctagactccagtgttgaaagattgatgtgtttttctaacacaagttgattaaccttgtgttgtttcaatcaatttttcagatattgacagtaggagaacaagtaaaagaaaaagtaaccctttttttaggaaaatatatttgttatcataatttaaagaggtaaatcatttacgataacaaaggatataagtggaggtatattctccaactaaaaacaagtttcatccaattttagaggaaatttagccaaacagtaaaggaagctaacacacgagctggtttagaaatattattatggaccactcggtttctctcagtccatattgaccatagaatacacataatttgttcaatctcaacctttgaatggattgtagaaagataaatcaagtagtcacccttatgcatataagaagcttttttctaataaaaaatcatatgtgaagaacgccaaactgaacgggcatatttgcattcaaaaagtgcgtgctcaattgattcctaagtcttgttgcagatcgaacaagtagagtaagtgataactttccttctaaccaacgaggttgctactagaagtgcatcgtgaataatttgccaagcgaagattttaactttttgtggcaaatgaagagaccaaaaaaagttccacataaaagatgttgaggaggaagttgaagactgatctaagtcatttagagagtcaactatgtggtaacctaatttaactcagtagaggcctaagtgatgatgttgccaaataagagtgtctttattgggcaaaaaactcaaaggcagagttagaattctttccacatcctgcgggagagaaataccgattcaacaagccaatatcccattgtctttcctccacgataaggttagccataaccctgttgtgaggaacaatatagcagattgtaacaaaaacgattgtgaccaagaatccaagggtcaatgccacatctaatccacctaccttcaccaatttttcattgcaaaccagtaaataaaagttccattctccaagcaatcccttcccaagtcatcaaaggagagtgaccataatgtgcttcaaaaaacaaataatttgagaaatagcgactctttagtaacctgcttaagagagagtgatggttctctaatattctctaggttttttggctaacaaagcttgattaaagtgcacaaaggagcaaaatcctatacccctatctactttagtcttacaaagaaaattcaaactacaccagtgtattttttttttttacctttttcatctaatcctcaccaaaagttggacatcatagactcaagctggttgcaaactaagatgggtaatcagaaatacttcatgtcataagttggaatggactgaaccactgctttaaggagcactttttctccctgtcgagaatatttttttactctaagtgtgcataagtctccatattttctctttaatactactgataattatgaaagaaatctaaggtatttctcatgacactcacatatgggcacgagaaggtttacagaagtaaacttaatagcatttgcactgacaggagtacaacaaactaaaattaaagagcccagaagctacgaagaggcaattttaggtggaaacaaatcaaaatggctccaggccatggatgaggagatggattcgccccggaagaacaagacttggatagttg

SEQ ID NO: 13931 - DNA, 6668 bp, Cannabis sativa
ttattattattattattagtggtgacttgaagacattatatagtaacacttaaggaaagaattcctaacccatcagttacgcaatcccccaatatgacatagcctggacgtgcaataggacgccatattgagactggccggcggacatcgctacccttgtcccaccagattctttcaaagttgggagttgacatgtagcaagtagttgcttttgagatggatctgacaatatcccatccggatgaatttgcactctgattacttgtttcatgacctctactatcttggttagcagtaaaagctgatgcagactctttagaagaatggtgtctgtttgaattccaggtaagaaggtgattaagatcaaaactactatcaacaggacattccatagaagaatgagcagaaaatgatccaatcacattgtctaggcgccagatgctaaaaccagacaagaaatgggaatttgaagaggcactaaacatacactcagaatatttagttattgttacaagatcagagcgtatacaatatacaatgtgattaggtggtgcctcattccctatgtttactacacatcccaatgccgtgtatcctggtggtgcaacaggttcccaaacagagcaatcagagttgacatcggcttggccttcccttcactaagccctagaatacctgagaacaagccaatgagattgaacccaataggttttcgcacacgcccatatgtgttactcaccgccattactgcttgtgatggagggattggcctggatacaaattataaaagtaaaccaaaatgaaaattcaaaatatcttataactaaagaagcatgtaaatcagtacacattcctcatatgatcaaggtaggaacataagtaatttcattattccatgctagctagataaatcattactctgttttgtttacatggtgaaagcaaaatcattaaatcgacacaatgtattgtcacaattaaatataagttgatctacaacatgcacaatatgctatcatctcctgcaatttttttgttctctttccgaaaatttaggggagtcttgtattgcaatctattgaatgaatgttatggtaccttgacgtcacacaatctcccaatatgacataatttgatggagctcgaggcctccaaaaggtaaggttgtaaccaggcccattttctgcataatgcataaaaaagcagactccaataaaaccgaataaacagtatgcagaacaaaactgaaaaataacatcaaaattcactgatgattgataataaaaaaaatgacaaggaaagaatgtgacaaaaacctttaggggacacccagatacgatcaaagtttgtacatgtagccaagggtataatgtttccaaattgcaatgctgcaaatgcctgcttttgcaaattgagcataagagaaataacactaagcgaaagatggatgcatatattggttgatgtcagagacatatttgttttctccttcacagaagtgtatccccctgaaatatccactggatacagaacgatcagaccagatccagcctcaactgtaagatccttcactaaggctcgaatccacgtatcattttcttttgatgcatacctgtgtaaattaagaagtcatataattatttgtgaatatttatatatgtagatatttatgaaggtagtattatccaaactaggtgcctaactgatgtgaagtgtttcatctaaatattgtaatggaaagaaagtcagctacatatttaaaaagaggctaagtcattagcccttttgtgggtttctgattttatggaattttataaaggattcccattacttgattgttcttaggtggtaggactaggagttagtgaaaagctaaaagaaaacatgaggaaagtatctacaaacaacataacaggaaaaccataaactcttacataaagcttaagtccagttttgcacgaagaagcttttccccaaatgatgagtcattcacagaagattttgtaccgtcatagaaggtaaactcaggagaaacaacctaaacataaattggccggctaattaagaatacaataagcttttcaaataacatgaaaatcatttttttaagagacgggccactttgcaaagaattatcaaaacaaggaaaaaatgcaaaatacacaatatagcatgaagtacctgggtttcaaatgtgaaacttggaattctattcagattgccttgagaaagagattctaactctgtggcatctggtgattcgtgtgtatactccagattcttcttgtcatcatcagataaggaactgtccagcaacacgatatctactccatcctcaaatgatactgagtaactactttcagtacccaaatatgtgtacttctttaacagagaaccattctggtggatgcatgaaaaatagaaactatcaaccaaaaggtggaggaaaaaccgcagattacttttaaaaatgttaataaaattattacgtatacagtgtaaccatgtcatcttactgtttcttttattattgaaaaaaaaaaactagactccccacctaaccctgcagtatttcctacaacatttgaggaatggaaactataacaattgctaagaaggtacctaagaaggcctcgaacctcatacttgatgagagcaaaccagatgcttagccaagaagcttgatggaaaaatcttaagaactaaagatgttcaaattaacaagaccctgaacaatttcgctcagagcgaacacttatatttattacgaataaaagataaactcctaaaacaaaagaaaaaaaaaaggtaataacccaaacaagtaactaaaaatagcaaagcactgcatcacacactgaaaggacctgctaatcaaacaaactgaaacccatgtcatcgtcactctctttctttggttcttcctaacctatccctcttgggtactctttgtttttcaaaagggggaaaagatccacaaaagatttaaagcaccaaacaggtaatcgtgtatgaatggttattcacaacatacagcttaatagtctaaaaactacacatttcacaaaaaaagtcaacaattttgtaccattataaaaatacccatctcagtcatgtaaatatatccattaacactgatacatatggtaatatgagcactggtgtacatatcctattttctatttaaagaatataacaaatttccatcagctgagttataatagaatagttgcattaaatggtatctgaacgagtaaattcaaacatgcttaagaaaataacaaactgactacgtctacactgtaacatttgtagtttataccacatttctatagagaatacaatttacaattcaaaatcagaaactatccaatacatatttctttagaaacctgtatggacacttgtaattgtttttatttatattaaatattctatttatgtaaatctttctgctccagacacgaaattacttgtatccctacatttgtgtttcctattatcgattattattcatgaatctaatctctaattgaaagatagtacctctaattatattatttatgattctatttcagattataaaaaatgaattttattgtctcagtacctcaattttaacatttataaaccgcaatctcttcccgcgcccaataatgatgattggttgagatctcatccagtgagattctttaaaatctccttcctcacttaaacagatagtctttccacaaccatcatatgtatactcattaacatttgaacaatttgccactaattgtctactgggagagaggtgaaccacatcttcgctttgtttgtaagtaggttcagataggacaatgttactgtttctacatagtgggtcattcttaggatccatagtttcctctcttccagtaattgttcctaaagctggcacaaagaactcagtcacagcgagaaggaaatcaggcacaacaagaactctaggttgttgaactcgaaccacaaatgattgagatgattttctccatctgtaatccatcaagaacattgtcgaaactggtaagtctccatgtaggccaacttcagactctgcttttctaaagctccccttatttagaataaaaggcatatttccagcagaaacttgtttcgaaccatctgtggatgacccaagcatgaggcgcatttcaggttttgtatcagggcgaacgtcaagaacagaaaatttaggtatagtgatgtagagatctgtctcggacaatgacgtcattcgatatgatacccaaagaccttctagctgcaatgtgggaaaagtgaaatgtaagtccacatcccaacatgagaaataaatatagtatcagaaagcagcaccacatttaatatttgacatcctaacaccatgtccaaacagtaacgtcaaaacggttacaaaagttcacaagtaattgaaaaccaacaaatattaacacagatgatataattactcacagcaatatgagccaaaggtgactcatcatggatgccattatacaactccagcaaggcatggtcaaccacaaccgtcgatatggtgacagtacgcgacagaagattttgactattcgtgttaaccttgtcaaccaacagccgcattgtatcttttgaaccagatttgccaccacgaaaacttggaggaagcctcggttcttcacacaggttcatatatgcacaatcaagaataactttatattctttgctagtcatgacacagtgcaataagccaacctggttaaattgaaatctgtaagaatgcttttaaataacaatcctgcatgtgcacgacacaaaggaaaacacagcaaaaaaaaaagtaggaacaaagtaaatacaagacaaaaagtaatacactaaaacacaagtaaggattagtagataaaaataagccaacatgattaaacttagcaaaaaatcccaattccttaacagatcagaaaacgaaaataaggcaaaatctttgacatccgtgcacttaatacacagtgcatacaagcaagaggatggcttaacagaagtaaactcctaatgccaaaaacttataaacatactgcaaatcaaattctataaaacaaaccaagttaccttcacttcaagagaaaatgtcggaacctttttgaagacatccctcaaacttctccgaacataaatgtcaagtcctttggcttcacgtatcattggttcaccaatacgaccattaattcctacagacatgttaatacctagaacctgcaattcgctatcagtcagacataattttataatttaaagtttatggctcaagacaacaaaagcatgtacctcagcatgcagaacatcaatatggacagctgaaggatctttctctgcagaaccataccacctaaatgaattttcaacttgtagctggcccaaatcaagttgaataaaactgccccaaaaaaaaaggtataataaacaaaacgaaaaatgctacaaagacatggaaacactgaagtggatcaagcaatagcataattttattatttttatctattttcttctagctgaagtcatttttttctctcaaatcttaaaaagggtattcctttctttttcttctttcaattcttcattttcccattaaaagaatcagctactgtcaaatgccaacaggccctgcactggtaacataaccaggtcattgtgatcaaatcaccaccaccatccctacaattgataataatgaaccatatgcatccataaaataaaaggctgccccagtaacccatcctgctacatccaaaacattgccacaccatagtcaaaactaccacaagtaggacttcatcaacaatgcccagtcgtgactacttatttaatctcccattttatgtattaacaaacacaaccataaccttttttatccatcacatttcaacatcactttgtgagggataatttgcagtttcatgatttctaataaatttaagtgatatagtgagaaacacaggcagccatgtgtctgcattcttagctactaaacttcttaggggcttaaaaaatcaatttgtggttttgtaatttctaattcatttaactggaaaacccatagtatgaaataggatcgtatatacgcactctttgctagtagaatttcttggcacaatgattattggagtgtccagtgagagatccaatttaagtgcagtagctccatctatctcatatttttgaataaaccactcaaagcctccaactttatcaacaagtttaatagcttcttcagtatgcggggtggcaagttccataaaataaactgtaatctgcagcaaaagttgtaattaatttgaaacacgaagatacatgtaaggcccacagaatctaaatagtgatagtttacaaaatagtgaaatatcattcattccttctaaaaccatattcaatagtttaaagtcatttccaacatacctcctgaacaaacctatagaggaaaacaatacgaacagcagaaagtcggccttgcaagctgtaatcaaatccttcgtagtcatcatcttcagcactataagaattaaatttgaactggaaaagaaatgaaaaatacaagtaaatattgatcttccgataaaacgatgcaacgaaacaaaccaattatattgcaactatggattgtaaaaagaacacat

SEQ ID NO: 13932 - DNA, 1265 bp, Cannabis sativa
  modified_base (66)..(67): a, c, t, g, unknown or other
ttaaataaaaataaaaaatcaccatgaatttctcataaactaagaatttcagttatataggcacannttatatagaatagatatacatattgtgttagtaagtagtaaataaaaataagatttgtgttgttaaactagttcttgcatgataattgtttacttgatatgtaatgtacctaagcatccatgttttgcaagcatgcatacatgtagattaaggtacacgtgtgcgtgtatggtgcatgtgtgggcatgtgacatgcaatacatattattagctagttagttgttattgatttaattattgttattttttttatagataactattgtcatttaattgcttataaaaaattagtcatttgattaattattaaatttagagcttaaaagtaaatatgtgatacctattagcttatagaaagaatactctaaaataattaaataaggtattatgtaataatttcgaatagaataaaagaatttaaatgtatagctttgttggtaatcaaagaaactcaaaaagaaaacaagcttgggtgatggacaacttaggaaattttaagaatagaaaattcgtaattagtgaggtaactgtaataaaacttccctaactagagctacactacacagaatatcacatataatataatgttgaaagatctcgatatctaaaactttcatgaaggacttgaagtcaaattcgtaaggttatatggtcaaaacaatgtcgcaaggtgagccgtctgagcagagtgcgaaaatcctaactagtttctatattaggtgaaattataaacctgaactagatgcttggtcttagtgtattgtgtgtctctggtggtaggacaacctggggtcggtttaagtgcagtaataagagactcggagggcttgcttgtggtggcagaagttgaattcactcctgcttgcagctcggttctgttggccgaagctgctgcaatcattcttggcctgcagttagcaatccgatggtctatttccagagcaaaagtttgctcagatagtcacaccattatccatgctattcaacaggtttctcctaactttacggagtggggacaattggttcaaaaagccattcatatgcgtgattcttttcaatgtttagagtttgtttttgctactagacagtgtaataatgtagctaatagtctagctaagtggagccgtttggctcagaagtctgctatttggactgattgtttacctatttgtgttgctgctaatttactagcagataa

SEQ ID NO: 13933 - DNA, 1765 bp, Cannabis sativa
taaaagttaggttgtaccagctttagcttttaactgtaacttttctataaattcttcaataagctgtttttgaactgtttaccaaacacttttaaacatatccatacattattttccaattgaagctttctctttattagaaactatagtattgtgtgacggactttcttttgtcgaccacaaatctggctcattaatatttttgatatttgcatgaaattttgggtacaaaaatttgtcatcactgtatatatatacgttacgtgtattcttacgtagtatcaaaatataaattgagatgaaagtaaaaattaaataaatattttgataaaagtatcactattttgaataaaggccagttgctgcagcagctaattaccaaatattaattttttttgaaaaaaattaaatatcacttggtacttttagtagtagtatagcagtttgtgtataaccgtgtaaagatttttccttgtgaacaacaataacaacagcaacagcaaactacatagtgtccctttacctttctatatagactatatacctggacctggtcaaatgtccaatttctccttttccttaattaattattgtgctcttttaggagagacacacagaaagaaatcatttcagtttattggatcgatggaaacagcacatattgcaatccaatttgaaatgcacagcggtagaaaatgacccaagtaaaaggaagacatttcaatattctttaaatacaaaaaggggaagaaagaagaagaagacatttcaatcaattatgggaacaacttttcaaaatatacaaattttgtaacttattcagaaataacgcaaaatacataggacttttccatgcaaaacaatttcttttcctttctatgattataaccattaattaagactatattggtcaccattatttttattgccacaataatagaagagttattttccttttcaaccaggaacataataaaataattaaaaaaattgtcaaaaaagagcataataacatgaaaaaaaatgatggcaataatttaaaaggaaacgattttttttttttttttgaaatagaaaaggaaatgattttaaaaatgttatatttaggtatatgtacgttctggtataaaataaaaataaaacaaaggataattgaatataagcgattaaaatgaccattatgcaactgggttttcaaaaagagttgtttaaaatttgtcacgcgtaataactttttaaatttaataatctaaataatttaaataaaaattttaactgttagaacaaaaattctaattaattaatttttatattaaatcgttgatatctatcttaaggagagattgaatgaagtcttcccgtactagatctaatgacgtgcgactgatcaaggagtaactccatcataatcatatatgaatcccatttcacttatcatctaatgattaatgaacttttgtttcatgaaaatatatttaatctatttggagtttgtggccactggccacattgttctactagtcaataaagaaaagaaccgtgtcattatttgagatttttatacaaaaaatttccgttttttgtctaaagccactgggctacatggcccattacaataagggtatgggccaaaaacaacacaaggcacttttatcataaaaaaagggggaattttcatataaatatgagaatttaaggtatagtttactttttgtgccataaataaataacactacagggttatgggttttttttttttttttaa
